United States Patent Application Publication US 2007/0054278 A1 - sequence listing, part 43

SEQ ID NO: 94578 - DNA, 186525 bp, Homo sapiens
  misc_feature (1)...(186525): n = A,T,C or G
cagaaccttcatatagacctaataccattctctggtccttcttcttgcatcaaaggtaaaaaagtacctgaaaattgtaacaatcatcttaccctctcaccagactaatgtccagcaaataaaggataggattcaggacaatagggaaacaaatctcttcacctgagatctcatttattggaaaagtatgagttctctgaaccttgtctcagagccttataaaatgtgaagagctaaagggaaatcatttcatttctttgaactttggtttactcaattaaaaagtgggtgtaatacctgttccataaaattgttatatggattaaatgagattaatgtgaaatggctggctataaaaattctcatcttcaggttattataggtagtcctggttctactaccagctagaatgttggtccatatttatcacagacaattactaaaacaagaatatttgcataacactccatagtttacaaagcacactgacctaaagaatactttcacttatgcatattcaaatgttaaatctgggtaatatttttacctgttcagacacgaagtctgggcatttgggaggaacctttattaagaaacattaagcagctgtgtgccagagttttggcaagctgacattcactaattataatttaacacatctacattgagctcacatatgtgctagtgcagcagttctcaaacttttggtctcagtactcctttacattcttaaatattatcgagaaccccaaagagtatttctttatgtgaaatatatctattgatatttattgtattaaaaattaaaactgagaatgttttaaaatattactacttcattaaaaaaccaattcattaaaattcatcaaataacactaaaccgttacatgataatgtaaaaaacatattttgatgaaaaataactgtatcttccaaaacaacaacaaagaaatagtttggagtgccattgctttacatttttgcaaacccctttaatgtctagcttaatagaagatagccggattattttgtttttgcattcaagctgttgcaatatcacacttcacacaatctctggaaaatgacactgtgtgctcattaaataatgggaacaaaaaaggtaaaaaatacgtcttattattgtaattaagacattgacgtcttggcacatctcaagagattccctcttgaggtttccccattccacacttcaaccaatgtgctagtgcctagtatccaattatcactcaagaagtaattgtcaaataaagtaatgaataccatatcctgggccaggtgctgaggctacagaggtggacaagacaagagatcttgactttaaggagtttagacttaaatttgtctctcttaaataggagacaagtatttacaaaactctgctactagaactaccataggagaaaacacaagatactatgggaggtgagagggtacctagcctagtttttggtgatcaaggaagacttttagagaaaatagtggttaagctgagacttaaaggaaaaaccaggtaaggaatgcaaatgtaaaaaggagagtgaagtgggagcagcagggcttactaggatttagggtgagcaaggtatagcagattagccagaaatgagggaatgtgtcatgcaagtttcttcaaggaaaattttaagactttaaacaggggactgacatagttaaagtttagaaaggtcactctgggtacgatgtaaaggatgagttgcagtattaccggccagaaaagctactgcaaggagttgaggcaggagataattatggcttaagtagaatagtaatgaagcggagagaaatggaaaattagagttgagaaggaaaaactgatagggctttctaatggctgacagagagagacgggctgagtaaatacccatatttctggtttacaaaagcgggttgatgatacccacttttagagattagaaacataaaagctggtaaaataaagagtttagtttgggatttttgagatatcttggaacatccaggacagatattttgaaggcagtaagacatataggtttgtagtcagaagagagaactggactagaaacttgcattaggagttactagtgtatatacggcggctgaagccatgaaggtgaatgagaccacataaaggataatgtaaaaagtgagatagaaacaaattgcacacaactttggggttcatggatatttgacagccagaagggggtcctgaaaggtaaaatagagacacagagatctaggagaaaaactaggaaagtgtggtttcacaaatcaaggcatatgaatgcagaaggccaagggttctagtatcaaatgctgcagagaggtcaaggaaaataagacaaagggtctactggattgaacacaagaggttcttggtgacctcgttgagaatttcagtggagtggtagttgcagaacccagaagcttgttgaataaagaacccattgactgcagttcctggaaaggcaggaggagtgagaatctagagaacgagcacaaagagatggaatacagggaactggcagagatatgtgcctcagacaggggggcacctaatctaccgtgaagcttgaaagaatgagtatggagacataaaattgttggagttcctgttttttttttctgagacggagcctcgctctgtcaccagggctggcagtggcacgatcttggctcactgcaacctctgcctcctgggttcaagcaattatcttgcctcagcctccctagtagctgggattacaggcacccgccaagacatccggctaatttttgtatttttagtagaaacagggtttcaccatgttggccagactggtctcgaactcctgacctcaggtgatgtgcctgcctcggccttccaaagttctgggtttacaggcatgagccatcacgctcagcctgagttcctctttgatggtttctatttttttctattctcttatttgagaataagtgaggggagtggtttgaaaaataaggagaaaatcagaagtggctgttgtggaaattaagagagagccaactagggaaacaagcattgcttggtaaagttgaaggcccacgtgagtttggacgctgtaaatatgtggtggaaaccatctatatggtctgtccagaatttcagatcagtttttttaaatctgtttctgagtcagtaaagtctaggctatattttattaacaaataaatgcaataaagagatcataaatattgcaaataagtgcaataaagagatcataagatcaatacaattctctttcctcgtgcaccacgtataatttgcataacacatgtatatacattatagaacattggctatgaaacctccctacaaagaaagttcctcagaatatcattatttcattgcctgtaacactccgtataattttttcttttttttttttgagacggaatttcgctcttgttgcccaggctggagtgcagtggtgctatctgggctcactgtaacctctgcctcctgggttcaagtgattctcctgcctcagtctcccgagtagcaggaattacaggtaccgccaccacacccggctaattttttgtatttttagtagatgcggggtttcaccatgttagccaggctggtctcgaactcctgacctcaggcgatctgcctgcctcggcctcccaaagtgctgggattacaggcgtgagccaccgcgcccggccactctgtgtgattttcaatgaaaagtagtgaagctatcatagtgtggggtgaacatgaacaaacttcagacaaggaatttaatatagtttctattaagaatttatccattttcatagcacaaaataacacaattcacctctttcatacccattaagagatcttcctcaaagaaatattatcaatagagatgggaggcaaagatttacttcctttagactattaggttatattaatataagtatttgctttaattttatattttaaaataatctatatttaggtaatatttactaagcattgactaagcaccgtgttcatgtattagtctatttaactcttatcaaaatcctgttagataagtattatctccgtttatagatgaggaaactggatcacaggaaagtttaagtaacttgttcttggttgcaagcctaataaatggagagctgggatttgaactcaggcagtctgactccggaggctatatacatttaccctccttggtacactgctttttttcaaaaatagaaattcaacaaaatttcccaaagtaaaagttcatttgaagtttcagaaacttaaaacaatgattgaacagataagttgcaacagacttcataagcagttcagtaaaaatgtagacttacgaaatggcatatatcaagatacaaaataagttgcttctataagtttcttttcttaaaaaaaattacttggaaatatttcaagtatatagaacagtaaaggaaataattacaagtgaacacccatgtgccctctacttagcttaatgttttgccacattttcaagatatttctggtagaaaacaaacgttatagatacaaatgaacccttcttgttacattcccttctgttcatctctggaagcaaccagtattctgaatttggtatctatcatttccttatacaatttttagtttgatcttacttttttgtaattattaaacttttatttatggtatgtcatatatatctttccgcaacctgtcttttcatttcttcctcaatattaggttaatgactctatccatatgaaaaatggtagctttagttcactgattttttggttcgtgttgtatgtcaatttgttcaacaatgacacttattcatccattctcctattagtagacatttattgtttcactaatataagctattttgctctgaactttcttgcacgtgcctataacttaaaaatacacatacttttttaaaacatgcagttaaacaggaacatacacatttctttaacatgtagttaaacaggaaaagtaacacatgtgcatgaagaatacaaccaagagagccatcacgttcaagaaaagaccacaggttattccgagtgaagtaaggctttcactagaaggcacttggggaaygttccaatgacagcgacattcatcgctacagtagaaactcacacaatcgcagccctttattagtattttgttacccagtagttcctgtgtccattcatttcctcaactggagtgtgagctccaagaggaccgaaccgggcaccgacaaggtgagccaatatgaatgtggcgagtccgcaatgggggctacagcggccgacctctggggctgtgccaggccactagagtgtgatggcgcgagggaagggtcggggaaacagggcctaacctcacttttcaccccgaaagtcaagatagccacggaaacagggatgaatggggagcacagacacctgcctcgaagtgtctcttcactttcactcacaaagccgtcgggtcagtaaccagaagccgaggggcggatgcggcccccgccctgtggcactttctcagtctggttcttccagccgcgcctctttgccttacgccaattccgtaaggaggcgctgaggccaactggccggctcccgcagctccaaaasttgacgtgaaattgcgcggggcagagctgactgcggccatctttaattcgggcaagaccccaccctcgcaccccacccactagtccttttcagcgttcccaggattttctccaacaaatgtaacgcggttaaccttagaagcagtgttgaagaaacacgcaaagaggcctgagtatccatgacctcagtggtgcgaaacccggccaacttaaacatggcggctaaacccgaacagcaaaacgttgctgacgccaatgaagtcatgctcgaaatggagcgaggcggcggagctggggaggcggtaatctcgcgagatggaagccagcctccgctaggcccggaagcctcgtctgagggggcgggggacggaggagggagcgggagtcgagcgagagcctgtggaggagtccgcctgctgtagcgtgcgtaagcaaggcagctacgccgggcggctacgctgcggaatcggcgtaggcgcctttggagaatcggcgggctgcgctccgctggggctggtcgcggagggggggaggggatgtcggtcagtgcgagatccgctgctgctgaggagaggagcgtcaacagcagcaccatgggtgagtctcagcttcgggctgccgcgacttggggtcagcggctccgaatgccgggaagctctgcggccgctggaccgagctagggaacgccctgaggcgaggcggaggcagcggcgaggggagccgggatgggggccactgcgggcccggggcgcggcagcggcgggctcggggggaggggaggcggcggcggtgacagtttgaattgaacgtgaggagagccgaggcggcggcatttcctgtgccgcggcgggctggcccccggcgcagagccgcggcctccgcggccggagcagcctgagcgtggtggtctcagccctgcccttgcttctctccgtcccttcgcctttcctcagtctcctcccgggcccgccggcgtccgcggccccgcttcctcctgtccccggccgcatccccctcggcagaagtcccctcgtggggcagtgggcctggctaggagggtggggacgagtgtgaacgctcgggcgagggtgctgtgtgggccaacccgggcgggcggcggcggggagggaggaagaaggatgcaccaggctgaggctgtggtggaggcggcggcggcggctgcagccgcagctccagtcaccgcgtcgcctccccgctcctcctcccgcctctcggggttgcctctctccaggcgcagcccggaaggccggtggatggcgggcgagtcttgagaacggagggagaatcggtagtttggtttggaatttgggcttaatttttaggagtaagggaaagagaacgcctgggaagggcgccccccggaggagatagaaagggtgggaagggtccttggaaaagggagggagcggagatgtggagtggcgaagtttagggaaattaatttttgaaaatatttcaatattctcagttattctcttaacgagccctttcatttcctttcctcccccacatgttggaaaaagaacaggccatttcatttacattttccactcctgagttccatttcagctgtgtgtatagtrrgaaataagcaaccgagatttttctaggacatttccatttgctgagttacttttgaagagtacactgtttcaaatttgggtttttacagtcctaggaaagaatttgtgacgtccaggtgttttcttagttactgaaataataacttactacatttcttgagtttattgctaaatagttcagctttamgaattctttcttctggcttttttattttgatgaaaggaaaaaatatctttgttagtgcccctgagaatgtaaatgaacagatcatctaaattactaagcatctaacctgttttacatatttatgcacatgcaggtgatgagtatagtcagtttttccccctaaagtttatgtgcagacatggggaggagagtattttaracttaaaagtgtacaggtagggatgaaatttrtggaatcctgatagactgaaggggggatataaacaatgaccaagtcagctattgctgcttggattctttatttcttcaractgcaagggaatgagtaaggggtggttgggtggtgatggggrggtggtacggtcgtggcgggagagcastaaacaatctttcatctcattcagctgttcagtgggtgggactaaaggagataagagttgagtgaagctatgaaataaatgtggaagctacataggtgatttgcatggtagcattgtcttattctatgatgggacaacatgatggaaccaggtcttcataacacagttattaaaaatacatattttaccacatcttaggcttacagaattcaaattcacaacaaataacagaaatgttaagttgattttaattagttcttatcctttaaaaagaaaggatattgtctttttctaatgtagcttaacaatttttgttgcaggctttggtttggagatatttgatgcatacataatacatgaaaggtagtgttaaaagattgtatttcagaagtttgtgataaaattggttgttcagatttgcacattgtcccgtagaagtcattttaagtaaatccatgccagaacttctgaacaagtctgaggcaagttaggaatccttacagaacctaggagaatttagaggaatatgctaggacaacaacaacaacaaagcttgggggagaagagggaggaagaagagttacatctatggcttctaaggtctcagtaatggagagtgatcagatgagggaccagtcagaataaggatagtggtagagcagattagtttcagactttgtataatttgatgatatacatattcattgtagactgtattctgggaattgccgatagagaattcctacctgactaaattgcctgctgagaaatgtgtttcacattttgaattaataagctatcttcaatttttgattataagttgaacattttaaactaatgatttatgtcttttactaagttttgagacaaaactttttgtatacttctttttttgtactaagtttggactgtaaagataaactttattatacaatagaaactgaagaaaaattatgtttttaaggagcagaattgtaaggtagtttgattatgggtttagttcgctatatgagagcatactgttaaatgtagaccattgaactctacagcagtgttttgaagactgcaggttgtgacccattagtggacattgcacttaatattttgagggagattaaattttctttcaggtattgtgtactaggtggggaagtaattttttttaaggattgtggtcaaaatgtacagtatggatgagtcaaatctaaggtcttcgaaccttatgttaggggttggaggtcttggtgtgaggaaggaagactttaaaattaaagactgttaagtccgtgtggctttttcttactttggattcatttatcctgtactccatgtagctcgcatggttagagagatctgaggcctactcctatttgagaggatgttatcccccatagccagaaaccagggtggcttccaaaagaaaagggtagcattcggtgactctgctttaggccttgaggatgaatcttttctttgtttttgtcttcctgtgtccttttgcatcatcagagatctggagactaagctttgagcatgggcttggggaagaggggccaaagaggcagcttggctggcattaagtgttgaaggccgtagaccagacacacactaaatccttgtgacttacacttggtgcagtccagctatccagatgtagggattacacattggggtttgagttcaaaatcttaataatgatttagaacatgggctttgatgttagatatggatgcaaatcttggctttgctactcaatagatacaccagtcagagtaggttagattgtaattttaaaaactacagttaggcgttgttaacaatacggtacattgagaaatcatagagtattttacctacacaaacctagatggtagagcctactatacacctgggctatatcctattgcttctaggctatgagcttgtatagcttgttattgtactgactactgtaaacaattatgacaaatggtaagcgtgtttctttttttgttttttttttttttttttgagacgtaatttcgctcttgctgcccatgctggagtgcaatggtgcaatcttggctcaccgcaacctctgtctgcctcctgggttcaagcagttctcctgtctcagcctcgcgagtagctgggattacaggtgcttgcctgcctcagcctcccaagtagctggggttacaggcactcgccaccacgcccagctaatttttgtatttttagtagagacggggtttcaccatgttggccaggctggtctggaactcctgacctcaagtgatcctcctgcctcggcctcccaaagtgctgggattatagatgtgagccatcacgcccggccaagtgtttgtgcttctaagcatagaaaagatgatgtgctgtactatgaacttgtgactgctatgacatcacaggtgatatgaatttttttagctccatagtaatcttatgggactactgtcataaatgtccattgttgaccaaacgttggacatactgcatgactatactgcaaataaaaaaagtggaaatggaataagaaagataaactataagccccaattttttattattagtttcaatagacataaaattattctgctattaaattttccatttttgtgctctcaatttgtgtttctctgacataaactgataattcacagactggctcattggtccacagaccacactttgcatagcactaggttaaactatgctgcagcaacagactgtcatgctaaagtttatgtacagtattatgttttaggccagtgttaactttaaaaatactatactttgaaagctgagaattaagtatcccctgtgattggggggatagcctgaagctgctcctgcttacgttattttgaagttttctaagtcttaagtattcatgtgtcatttgcattttattcaatgtttgtttgctttatgtgaaatataaagatgatattcttcctccttccccactgatctggaagtaaaaatggactttcctgaagttgtaacatcttaattctgttgttttgtttaactctgggacacaactgactacttctggtagctttattggaggtgaggctccaggtcagagtttctcatttgaggttttgtaattatttgagggaggggagggctgtcttgagcattgtacagtatttaccagcatccctgctgtcatcgtgctaagatgccagcagcacatgctctctctggttgtgaaatgaaaaaaatgtctacagacattgccaaatgtcacgtgggggagcagaatcatccttggttgagaaccactgcactaggtgatggagagccattgaaggattgtgggagacggggaagaaggaacaagcttccttaactgtcttactttttacttcttcctggaactcctaccacttaatattcttagtatttcctaaacttgggaatcaaaattacctagatttttttgtattaaaagtttatcattaattgatatatttttgcaaagcatgatcagtaattactggacatagaacattatgctaggtcattattttctaaagtatggttgaagggtcaaccatggcttggagttaaaaatgcagattaactggttcccactacaagacccattgattagcaatctctgggagagggacccaggagtctgcatttccaaatgctttccgacttatcaagtaacttcattattgtatgctttcatagaaaaaaatacgtggattttaagtatttagttcaatgaattgctgatgtgcatacacacatcttgtagcctttattctaatcaagatagagaatacttccaccatcccagagtttcttgtgccctgttggagttctccttctactgccccaggtaaccactgataagatttctaatagccatgaattagtttttttgtttttgttagttgactcatttaaagtgttttttctgggtaactttctaaagtctccccatccctataacttctttattatataagatttcaaataaaatgaacgtcatggtgtttttcaaagaatacagattctcatagtgtttcacactttgataaatgataggcctgggatggggccctgaaaatctttggctctgattgactgttttcaggaaaatcaaaactattttccaccagttttgctgtgctttataaaatatatttgaaatattcctgcagtggtaatttgaaacttttgtaaactttgttcattgatttaacaagtatttgactccaggaagtatcagacactttgacaccatagcaatcaagaaagctgtggtcatggatgttatgatgtttctgttttcatttctgaaattgcttttttaaaactttttttttttttttgaaacggagtttcgctcttgttgcccaggctggagtgcaatggcacagtctcagccaccgcagcctccgcctccccggttcaagtgattctcctgcctcagcctcccgagtagctgggattacaggcatgtgccaccatgcccggctgaatttttttttttttttttttttttttttagatggagtctctctgtgtcgcccaggctggagtgcagtggcgcgatctcagctcgctgtaagaaggtctgcctcccgggttcacaccattctcctgcctcagcctcctgaatagctgggactacaggcgcccgccaccgcgcccggctaatttttgtatttttagtagagacggggtttcactgtgttagccaggatggtctcaatctgctgacctcatgatccacccgtcttggcctcccaaagtgctgggattacaggcgtgagccactgtgccctgccaatttttgtatttttagtagagacagggtttctccacattggtcaggctggtctcgaactctcgacctcaggtgatccacctgccttggcctcccaaagtgatgggattacaggtgtgagccaccgcacctggttgctttttaaaaattttattgggaggttttttgttgttgttttgtttttttgagacggagtcttgctctgtcacccaggctagtggcatgatcgtggctcactgcaacctctgcctcctgggttcaagtgattctccttcctcagcctcctaagtagctgggattacaggcacatgccaccacgcctagctaatttttgtatttttagtagagacggggtttcaccatgttggtcaggctggtctctcctgacctcgtgatctgcctgccttggcttcctaaagtgctgggattacaggtgcragccaccgcacccrgcmtggttttttttgttgttgttttttttaataggtaatataatcacttggttcaaaattcaaaaggttaaacagagagatacagtgaaatctccttcttacttctacccccaagtcacccagtttcctagtcctcggcatcctgtgttaacagtttcttgtatgttcttccaaaggtgttttttgcatatggaagttaaaaacatttatccttcctgcccccacccttggtagcattaagacacattatttcccacatgtttytttccaatgagtgtaatttgggttattccgtatcagtacataaagagcattcttattcttttatacagctgcataaccgttacatgatatctcagtctgtttgtgctgctccaacaaaatacctgagactgggtaatttataaggaacagaaatctatttcttaccattctggaagctaggaagtctaagatcacagtgccagcaggtttggcgtctctgcttccaagatggcaccttaaatgctacttcctttggagggaacaaatgctgtgccctaacatagtagaaggagcaaaagggtcaagcacctcccttgcacctcttttataaggtcattaatcctattaataccattactagtgattaagtatcaacatacaaattttgggagaacacattaagaccatagcatatggatagatcatgatatgggatatattttgatttgtttaacatgtctgcctctgatagacattaatttccagtgttttgctattaccaactttgacatggtgagtcacttgggatattgatctcttcacatttgttagtgtatctaacaaatacactaactgttagtttttgaactctttgaagcaggagactaccacttaaaagttgtagtattgacattgtcattatatcaataatgtattgatgttatagtatcataacattgatgttaagtattggtaatattgctgttaagtcattagtttagaacttcaacaatcaagttcattcacttaacaaatacacgttttgtacttgctgtgtgctggccactggggaaactgaattaaatgctgtggcagttgaaatagaggcatggtgattaagagttttcggatctagagtcagacttggattcatatctcagttctaaagcttaactgaacctttggcaaataacagaacttctatttttcyttctctgtaatgtgggaatcataaggttattggagaagtaaatgagatagtacatgacaaatccttagcatgatgcctggcatataataaacactgagatgttagcttaaaaaaagttatcagactatattgcagttgactttatgttctgcctccactgtgcttaaagtctaggcctgtgttttgttcacctttgtgtccccaacccataactggcttgcatttagtaaaaaatttgtgatacgatataaaggtatgcagagcatacagtgaaagttcaaagcaggataccttttccatgctggagaaggtgaatctttgaaagtcggtaggagtgattaggtaaaggaggtgaaggagtaaagataattattctagactgagaaattatgttagtatcaggttatgaggttagaagaggtaagtaggcaactggtattgctgtgctgagaatttaaaaatctttattgaaggctttaaaagaaaagtggtaatcgtaagaatcgtgatgataattctctctgttgagagttgacagggcaccaggttggagccattaaattgaaggagtttaatgtagcagtttaggactaaaaattggtcagaagcagggcaatgggaaaggacatgagggggatggttgtaaggtgttagggaagatgtgggtggtgagtaatgagtccagaatatttgagctttctgacttgagtgaatgggtagatgaatagatgctatttcttgaaataggtaatttgaaacatgaaattgagaggcctgggggacatccaagtggacatgtcttgtagggtctcaatactaggaagacatctaggatagaaaataaacattttctgataattgtaaatgtattcatttgtgctttgaatttttatgtttagtaagtgagtttgtgaacagagttgaaggaaattacaataaagtgatttgtgtgaaacttcgttgtccttcaaatatagactgaggtctccagtttctggggtagtactaaaatgtttcctttttttttttttttgagatggagtcttgctctgtcacccaggctatagtgcagtggcgcgatctcagctcattgccagctccgcctcccacgttaacgccattcttctgcctcagcctcccgagtagctgggactacaggcgcccgccaccacacctggctaattttttgtgtttttagtagagcctgggtttcaccgtgttagccaggatggtctcaatctcctgacctcatgatccgcccgccttggcctcccaaagtgctgggattacaggcgtgagccacygcgcccagccagatgtttacttatttaaaatttcagctggtacgtttcacagcagcagttgcttcagactcagggttatgctagtgtttctttgcaggagtgacattttgtatccttatatattgttattgtccattcagattgtaatgagttaatgagtttttttttttttgagacagaggctcgctctgtcgcccaggctggagtgcagtggtgagacagaggctcactgcaacctccacctccctggttcaagcaattcctctgcctcagcctcccgagtagctgggattacaggcacatgccaccacgcctggctaatttttttgtatttttagtagagacggggtttcaccatgttggccagactggtatcgaactcctgacctgaggcaatctgcccaccttggcctcccaaagtgctgggattacaggcatgagccactgtgcccagccgagttctttcttttgaggaagattttggtatgtattgtccttcagttttagagaatacagtaaatattttgaatgagatcattatttgtgtaagaggaggcaaaattctcataataattttcttagttctttccatttatatatttttttaaaaaataaggagagtaccaccttatttattacatgtaacattttggggtatgaggcgatctatacaaggaaaaattttccagaaactaatgttctctcaaatattaacattttaaagtatttctaataataaaaatttagtatataaacttggtttcttttatgattaacttaaacaaattagccacaaggggaaaaataaattatttcaatcattgtaagttaatttgtattctttctaaatatataggttgtaattaggggtgtattagtggtcctaaaccctggaccagcattggaaacatttctaatgtttaacacagttggagactctataactcactaggtgggaagtggggcttagaagcttgcttattaagaggcgggcatggtggcagtggttctcatckgtaaacccagcattttgggaggtcgaggcgggctgatcacttgaggtcaggagttcgagaccagtctggccaacatggtgaaaccctgtttctactaaaaatacaaaaattaaggctgggcgcggtggctcatgcctgtaatcccagcacttcgggaggccgaggcgggtggatcatgaggtcaggagttcaagaccagcctggccaagaaggtgaaaccctgtctctactaaaaatacaaaaattagcttcctgcagtggcaggtgcctataatcccagctactcgggaggctgaggcaggagaatcgcttgaacgtttcaaaaataaacaaaaaacaaacaaaaaaattagccagacatggtggttggtgcctgtaatcccagttactcaggaggctgaggcaggagaattgcttgaacctaggaggcagaggttgccgtgagccaagatcaagcctctgcactgcctggtgacagaatgatactctgtctccaaaacaaaaaaaaaaaaacaaaaaaaaaacagtttttagagagatggctaactcaacttcagctgtgggcgaaaaagataactagaatgacttagctggcaagtagacccaccaaaaatacttgtttgtgttagtgcatggtgctgtgctgttagagaggtaattacatagacataggccccacgtcccttccccacccccccattttttttttttaattttggaatagttttggatttgctgaaaagttgaagcccctttctttttgaaagctaaacatgtggtcaacacagaggaaatgcagaaataatgctacagacatgcaaatatagcacgatatatgatataaatgcaccatcaacgttagtactggccagggttaagggaaatgtcaagggaatgggggttttatgcttaatggaaacatcttttatttgaatctgtgttgaaagttttgggaggctccattgctttttaattgaaggatgtgtattctagttctggttggtgggtagtggatttcatttaacaattagaatctagctaagataaacaaaggacctttttcccccgtagggtagtttcctcattgttcttatggcttccagtctcttcccacttcatttaataaataaatcttttaagattactatacctaaaacattacttttacaaaataacttacctattatagtaacataaatatgtctattatttatagtattggcttctagagctcttgttaaaaatattatttcttgggctctatcggcaagattctaattccctacttctagactggggcacagatttctatttttaatcaaaagctccccatattcttctgattatagccaggtttgggaataacttttctgcaagatataagtccggaggccttaataataactatcatctgtagggcaaccactgtaacaactgtcatttattgtacttactgtatgtgaagtgccaaaccctttatgttaattgttttgtatataccttacaaatatcctcatcaagatgttatcccaatctaaggctcagaaaggttatgtaacttacccgcctgaacacaaataagttacagcagatactggaattcagatttctagctagctgtacatatactgccttatgaatcttttatatattaaaaacttttaggtcatcattttagcacctccttggtttgaccttttcctacttacaaatgagtaatattcagtattccttttttttttttggaaagagtctcgctctgtcacccagactggagtgcagtggcatgatctcagctcactgttgcaacctccacctcctgggttcaagcgattctcattctctcctgggttcagctgctggcctccccagtagctgggattacaggcgtgtgccaccatgcctggctaatttttttgtatttttgtaggcatggggttttgccatgttgaccaagctggtctcaaactcctgagctcaggtgatctgcctgcctcagcctcctaaagtgctaagattacaggagtaagccactgcactcggccaatattagtattcttgcttctggttatggtgtttgtacctgccttgaagtcctatcatctgttaaggaaggcccatatcaaaactacccattctgagaagcttttaccaaccatgacatgatgagtaacttgggatattgatcatttcacattcgatagtgtatcagtgcttttgaactctttgaaataagagactatcagttgtagtattgacattaagttcattacatcaataatgtattgatattatattactgtaacattgatgttaactattggtagtattgctgctaagtcattagtttagaacttcaacaacttcattcatttaacaaacacatgttttatacctgctgtgtgctggtcactggggaaactgttaaaagttggagagtattttctttcatgctttttctgtaaacttaaaaaagctgtaatgatagtggctcaacattttatttctctttggtaaattcttggggtaagtaatatggtagatgtatgtttaatttttaaattgcaaaattattttgcaatatattagtaacattttacattttcacccccagtgaataagaattcaggttgttccatgtgctcaccaacacctagaatggtcactgcttttaattttactcattcttatagatttgtagagataacttactgtaattttaatttgtattttcctaatgactaatgatgttgaggatctcctgtgcttatttgccatctgtttgtcacctttggtggtccattgaaatctttggtccatttttaaattaggttatttgtcttaatgaattgtaagggttttttttaatattttaggtactagttttttgttggactgtgcaaatacactatttctcattacacttttacccactaactttagtatcttgtcaatgattcttgcctatggcagttattactgtgctgtttgtgttactggtgattttctgttacatgattttctgtttacatgtacatgatgctacattttaaagctgggattctgaccgggtgtggtggctcatgcctgtaatcccagcactttgggtggccaacgtgggtggatcacgaggtcaggagatcaagaccatcctggctaacacggtgaaaccccgtctctactaaaaatacaaagaattagccgggcatggtagcaggcgcctgtagtcccagctactcgggaggctgaggcaggggaatggcctaaacctggraggcagggcttgcggtgagccgagatckcgccactgcactccagcctaggcgacagagcgagactccttctcaaaaaaaaaaaaaaaaaaaaaaaaaagctgggattctgttgtaaggaagagctcttttatttattcatcagttcggttatatattaatttttttcattgttcagttgtccattgatagacctttcaggtggctcttgttcatcctttcactgtgtacccatcatttttaggggtacttctttactttctagttcatcttgtatttttcgtgcctaagccttggaatcaaccattgtccaaggagtccagcaacctttttttgagagtagtgattaagaaccaagatctgggcaccagaagtgctcattgctgctggggtgtcactgcctctagtagatgttttgaacagacagaggtaggcaatatatgaatttatatatatacatctgtatttttgtatatgtgtgtaaaaatatttgcatatgtatactaaaaaccatgaatttatactggtacatcgattccaatctattaatgcagagttcaatctagcctttctcttttccttgtaactcttttcttcaacattgagaaacctggctttcatctacaatttatttacatacttggaaaaacctattgtacacatagatgtaacttcagaactatgtaatatgcttacttgctagagtatatttgtgtatgctttttttgtctttagccttatgcagtaccaatactgttagttaatatagtatgctaataccttatgctaatcaaaatacttttttccaaagttagttatattcttttctgttccacccccttcagtgtcttcatgttattcttctgaaatacaattagttttatttgttactatttcttttcacatcctggctgattttgtttttttaatgggaatatatggaaaattactatggtgttaatagacttagtattcttcccacctttcttttaccctgttctcattctccttttttctaccactttcccacacatcgatagaggtaatggatctcatcagtttctgattgattttttgtgagtatttttttgcgcatatgagaagatatgtgtgagaaaggagatataacaatttatgaaaggtagtgtacagtacatgcttgtttttatcacagatttattgagataatttacatgccataaaatataccccttgaaagcgtgattttgtggtttttcgtgtattcagggttgtgcaaccattgtcactgtcaacttttaggacattttcatcagccccaaatgaaactttgcagccattaataatcagtccccatcccttctcttcccttgtcctggcaaccactaatttactttccgtttctatggatttgtctatcttggacattttatataaatgagatcatataatgtgactttttgtgatgggcatctttcacttagcagtgttttcaagttttgtctgtgttgtagcatgtctcagtagtacttcattccattttattgctggatattattctgttgtatatatactaccatatttcatttatccrttagttgatatttgggttgttttctactttttgactattatggataatgctgctgtgaatgttttgagtacaagcttttgtgtggacctatagttttcaattcccttggatatatacctaaggatagaattactgcatcatagtgtagtgtaactctagtttaactctatgaagaactgcctgactgccgaagcagctgccttattttacatttctaccagcagtgtatgagagttccagtttttccacattcttktccatacttgttattgcctgtgttttaaaactatcctactgggtgtgagctggtatcattgtggttttaatttgcatttccctaatgatgttgaacatcttttcatgtgcttattggcaatttgtacaccttctctggaggaatgtctattaaaatgctttgctgagtttttaatgaagttgtcttactactgttcagttgtaagaattcttcatagattctggatataagtcctttatcatatagaagacttgcaagtagttcctacaattccacaggttttttttttttttacgttcttgatagtgttctgtgaagtacaagcatttttaattttgatgaagtccagtttatctacttattgcatgtgcttttgatgtcatagtcaagaaagcatttctaatccaaggtcatgaaaatatacccctatgttttctaagagttttatagttttagacctttatgtttaggtttttgatccattttgagttaatttttgtgtatggcgtgagataggagtcattcttttgtatgtggctatccagtagtttcatcactcattgttgaaaagactagtctttttccattgtgtggtcttgacaacttctgtgaaaacaactggccataaatgtaagggttttcttgtggattctcatttgtttcttattgatctatatgtccttaatggcagtaccacactgttttgatgactaactttgcagtaagttttgaaactggggagtgtgagtcttccaactttgttctgtttcaaaattgttttggttattctggttcccttgaatgtccgtctgaactataggcttagtttgctaatttctacaagtaggccaacaaggatgttgatagccatggtgttgaacttgtatatcaatttgaagagtattgtcgtcttaacagtattaagtcttccactccattaatgcaaagtatcttctgtttatttaggtcttcagtttttgtgaacaacatttttatagttctcatgtataagacttacatttctttttgttaaatttatttctaggtattttattcttgatgctatcacagatggaattttttcttaatttttttatagaaatgcaattgatttttgtatattgatcttatatcatgcaactttattagttcctgtagtgttttttttttagtggattcttttggattttttatttataagatcatatcgcctgcaaatactacttacattactttacaatctagatacattttatttctttattttaccaaatgccttttctggaacctccagaactgtgttgattaggagtagcaatgatagacatctttgtcttgttcttgattttagagtgaaagcattcagtctttcatcattgtgggttttctgagatgttctttatgaggttgaggttcccttgtatgtctagtttgttaagtgtgtttatcgttgaaagagtgttgaatttttgtcaaatgtgttttctgtgtctactgagatgattatgtgtttgttgtgtgtgggttttaatttagtgtattacattgattaattttcatatgtaaaaccaacatattcattctgggatatatcccattggttatggtgtataacccctttttattgctggatttggtttgctagtactttgttgatktttttttccatccatataagatattggttggttgtttttactcgatgtgtttggttttggtatcagagtaaaactggcctcataaaatgagttgggaagtatttaatcctcttctatttcttggactagtttttgaaggattgtacaacctttaaacatttgatagaatttactggtgaagacatctgggtatgggctttgtgtaaagttgtgtttttgcctttttggggtgtgtgtgtgttagttattttttgttactaatctattataggtctattcagattttctgtttcttgagtcagttttggtagtttatgtctttctaggaatttttgcatttcctctaggttataatctgatctgttgtcagcatggaattaattgttcataggttcctttttatttctgaaaggttggtagtgatttcccttctttcattcctgattttagtaatttgagtgttctggttttttttttcttggctggtttagctaaggttttgtcaattttgttgatcttttcagtgaactaacttgtggttttgttaatgtttctgttttatgtatttcatttatttctgcttaaataatcatttccttattttgttttccctgttttgggtttagtttattctttttctagtttcttgagatggaaggttatgatrtgagatctttctttttaatataggcatttacagctgtaaatttccttctaagcactgatttagctgcattcaatacattttggtatgttgtgtttttagtttcattcatctcaaagtattttccagtatcccttgtgatttagtttttgacccattgattattaaagaatgtactgtttaattttcacaagtgtgtgaattttccagatttttctctgcagttgatttctaacttcattctctagtggatgaagaatatactttgtatgattttcagcccatttaaattgagacgtgttttgtgatctaacatatggtctcttctggagaatattccatgtgcacttgagaagawtgtgttttgctgtttttgggtggaatgttgtacagctatgtgttaggtctagttggtttatagtgttgttgagtcttctgcttctttatcatctgtctagttgttttacccrttattgaaagtagggtgttgaaggtcaggtattactgttcagttgttttttttacctttcattttcttagctttgtgcaatttggggactcttttattagggacatacgtgcttaaaattgttctatcttctcaatggattggtccttcagtcagtataaaatatccttctttgtggtaacaatatgtcttttaagtctgtgttttctgatattagtgtagctacttcagctctctcttgttttctgtccttttttttcaatctgtttgtgtttgtgattctgaaacatgtctcatgtgggcaccacatagttggatcttacttttaaaaatccacatagccattctttaccttttgattggagtcctattatacctgaaacagcaaaatacattagttacatttaatctaagtagtgatatgatttacacctgtaattttgctgttttctacatcttgtcttttttttttttttgagacagggtctcactctcactcaggctggagtgcagtggcaccatcatagctcrcttggttgacagtctttttctttcaacattygaaatatgttatccttttgctttcgggcctccatggtttctgataggatgtcagctattcttatttacagtctcttatacatatagttgcttctcataagctgctttcaagattctctgtttttggtttttaacagtttggttatgtgtgggtctctttgattttatcttattcagtttgttgagctttgatgttgatactaatgtttttcttcaaatttgggaagttttcagttctgtttcttcaaatatacattctgccccttccttcctaaacccaccccttttctccttccctcccttacttcatgtttgattttgttctgtaggtctctggctctgttcatttttctttctttacttaaattggttaatgttatttaacccattttcaggtttggtgattcttttttctgcaagctgcaatccttcgttgagcttctctagtgaatacttttatttattatattttttaactccagaatttttaaaaaattatcttttttgatattatctatttgatgaacattgttttcatacttgacagtttattagacttttctttagttctttgaacatatctaaaatagcaggtttaaagtatttgtttaatgtctgggctttctcagggactgttgcttttttcccctgtacatgggccatgcagttttgagttttttttgcaaggctcatacttttctcttgaatactagacattttaaatatttcaaataatacagtgtggcagctctggaaatcagattctcccttctctgcagggtttattgttgttgctttttgttatttgcttagttccttttcgaactaattctgtgaagttaatttttgccatatgttgtcactgaartctctgcttggttatcttagtggtcacttgtgagtgggcctttagggactaccagacacatcaaataatgacagcagtttgagagtgaggctttgaaagcattccatgattgttctgtttttttccagttgccactaggctgctggtttttactgtgattgtgtgctgatggttttcaaggctactgtagaggtagagagatgasaatgggcaagttaaaatgcaagagctgctgtttttaccaaggctcagccccttgtcttgaatcagcattacctggattcctgcaagcttttagttaatttccagaattttaagttaagttgatttgaacagtttgtgtcagttttctccttgcttttaatgaagcagaattttctgaagtatttactccaccaatttctttgatgttctcctgtgacaagtgtttaagaatgtttttctagtcaatatatcattatctgtccatgcatatttttctaaaaccttacttttaatggctgcctggtattttaatacatggaggtactgtaatacaattttagtttcacttgtctttagaactcatcaaaaattgttacaattttttactattatgagcagtgctttgttgaatattcttttatcttaatcatgtatgattctcaagactatccatttctggaagtggaatttgttgaatttaagacaataaaaacttcagtttttggtccacatggttaaattgccctttaagtaagtggtttaagtttatattccaaaagtcatgtaggagagtgtctctttttccacatcatcacccagtactgggcactagtactcactttattatttttatttttattttgaaatggagtctcactctgtcatacaggctggagtgcagtggcacgatcttagctcactgcaacatccacctccggggttcagatgattctcctgcctcagcctcctgagtagctgcgattacaggtgcatgcctggctaatttttgtgtttttagtagagacggggtttcactatgttggcaaggctggtctcgaactcctgaccgacctcagatgatccacccgccttggcctcccaaagtgctgggattacaggcgtgagccaccacacctggcctcattttatttttttaacttttggagacagagtctcgctctgtcgcccaggctggagtgctgtagcaccatcctggctcactgcatcctctgcctcccaggttcaagcaattctygtgcctcagcttcctgaggagctgggactacctggctaattttttgtattttagtagagacaggatttcaccatgttgcccagggtggtcttgaactcctgagctcaggcagtccacccgcctcggactcccaaagtgctaggattacaggagtgagccaccacactcagcctaatacttattttatttttttctttttttaagagatgaggttctatctagaggtgatgggagacagtgacagatcatcaggcattagattctcataaggactgcgcaacctagatcccttgaatgaacagttcacaatagggttcactctccaatgagaatctaatgctgccrctgatctgacaggtgccagagctcaggcggtaatacgagaggctggagatacagataaagcttcasttgcttgcccgccacttacctcctcttgtgcggcccagttcctaacaggccacagaccgctaccagtccatggcctggaagttggggacccctctactgsgatatttataattgcatatgtggttacctaatatttccatgatacaacactggtctagattctaggccattctccttcaaaaagaaccctgcttccttacagttttactgtttagcagcaatgttttctaccccttcttaaaattttcagctaccacacccctgttttgttctaatattaaagatgacatctaacactcaatttttctttctgctccaagctccatcatcattctgggacatttttggcccatgtgtaagacactttcagtaagttagcttcagtttcttgactgtgcttgagccatccttttttttctctctctgtctcatctgagagccatccttttaatagccctatggaggaatgggtgggaagaaaaaatatttaaaagtaaaatattaaaaaaagaaataataaccctgtggggctatcatctgcaacttatgttccacttctaaaatcttaattgtatagtccattttaaccataacttacatgtatttatttattttttcgagacagagtttcgctcttgttgcccaggctggagtacaatagcgtgatcttggctcactgcaatctccacctcccaggttcaagggattctcctgcttcagcctcccaagtagctgggatttcaggcatgcatcaccacgcctggctaattttgtatttttagtagagatggggtttctctatgttggtcaggctgatcttgaactcctgacctcaggtgatctgcccgcctcagcctcccaaagtactgggattacaggcatgagccaccgtgcccagcaacttatttttttactgtcttctttacttcctgccttccatccttgatcctctccattttcattcactgaattacttcatctgtatttgtcatctctcttggtcttgtacttttgtgtacccttcctgcaaagcaagtttcaaatgactcctacagccaattttattgtactcaagttatggattgctactggaggaaaagatcacatggcttcagggatacagtcaaagatttatggtcttcagccttaaccaggtggacaaaattgcttggatggctgttacgtattcctagtctctctctctattcttatggttgctgtttcacatctttacttcttaaaatcccctacttctcttctcttttttttkgggattttcaagttgttttatatctggtacttagggaaaatcctgtccttcattccataaatgttatctgtgtccttacttaactttgtctgctacttggtgttttctattagcattcacacaaatagaaccatctgcctttttttttttttaagtgcttaaaactcttgaccttgtattttctggctgctatcctgttgttcttctcttcaaagataagcattaaaaaaaattgcttatactcacctcctgtagtttttttttctgcttatttatttccagtctgccttcttcccctatctttccattgatacagctttgagagtggtttccaatgacaataagtagatttttctgtatccttagattgaccaatccagagcatttggtatagttaaccacttcttgagggggctgctacagttgacctcctttgaaatgcttctgggaactctttgattcttcttttctctcagcttttcctaggtttgtttaggtgattatgatgggatgttggtgttgcttcttggcctgcttcctactctgtatgctgtatttggattcatatccatggccttgataccatttaaatgttgattacttaagatattcattatctgtctaacctagatgtttctagcatttctaacctttatatatacaactgcctactagacattgtcttcccaaagtccaccttaactcagatgatttctacttttaacagttggtactcaccattcatcttaattgctcaagcccaaattaagaaatctgaattttatcacccttctacaagttagttacagagatctgtcatttcatgtctttaatatctaacctagcattgtccaatagcaatttgatgcaagccacatatgtaattaagctttcataataaccacatttaaaaagtaaacaggtgaaactaactttagttttatattttatgtaattgggatatctaaaattttatttcaacatgcaatcagtataaaattattaataagatatttttgattcttatactaagtctttaaaatatgatattttacacttacagcacatcttaattcagactagctacatttcgagtactcagtagccacatgtagctagtggctaccttaatggctagtagagttctaacctatatttctctttatccttactacctctatcttggttcaagcctttatttttcccctgagcagctggagcagctcttggggattactaccattttctcctccagttcatcatcaatattcttgtcagtagtaattttctaaagtatgaatgtgactctgcatgtgaattcatgtgattgtgcattcctctttgtatctttagtgttcttcctaagctttcaagatgaagtctaagttcctaagtatggccaacaaagtccttcctcatctgacttttgcttaactttcctaagctatagttccttgatcctaaaaatgagttgtattgaactgtttgtagttcctataaggaaccatacgctcttcttgcttttgggcctttgcagttaataactcaactgactgagacccatattctccagctcccaccctcatctgtcatcaaattaaggtctactagtcagtccttcagtatctaaaggatctgatcccaggataggatgaaacacccttccttgtttgctcttatatatccttctgtgctttcctgtatcagggcatttatcactgaattattttaattgtcctctagcttatctcacctccctattagattcttagcttcttgagcagggatcttgtttttattagcttttatattcctgtttactagaacacacatatatgcttggcatattgtaagtatgttgaatgaatgagtgaaggaatgaggtaagtctaggaagttaagatctgaactctaagttcagagcaaagaaaaattgatttaaattttaagttatctcattcttgtatgtatttatagagttaaatattagaatctttttaacagattaactgagaatccagaataggattaagaaaataaaagttggttctgtcagtacccagttgttcatatcagtaaaaagaggagagctgggggcatgctaaataggttatgaacctttaaaatagttgagggatgaggaacataaaaactratatttaggacatgcctatgtaatcttgtaatattttagttttcatattatattaaatctagaatctaggcatttttagaccagttatacttaaaatatttaaaacatttaaatggcaaatgaatttctttaacttttcccttaggctgtatgagagatggtaggaatttgactaagcaagtaccagacacatatctgtgtatgatataaggcttttgttaggaatactaaggagttgagaagtaaacttctgcattaatatcttttccttttgtagtctgtggttgtttttcatatttagaattacttacactttaggagaaacatacttcgtcagtgtgtaaaacaatatgctatatatatgtatatttatatatatatatattttttaaaatccaaagggaggcagattggagttatttagaaaagatcaatggctatttttgaaatacaaagttactaatgtaaaccttggatttttgtagcytgatgtttaaactgcaaatagaatttgggtgtgttaaggtaatttgaggtgcgcattataatccctagtcattttagttttttattaaacatctcattttgtaatgatattgggaagttgaaggtttgtagttccttctagggttgtttttctcaaattctgatttttattaggcatccattctgttacaaactccccttgatcaattttttgttactaaaaagcatatttaatagttttcaaaataagttgctgctttttcctattggaaaatttttatctactggaaaatttgttgaaaattagtattcagagytttaaaaatggtaatggcattttagatagcaagatttgggtaactttggaataggaacaaatggcaagagaacgtaaagaattcttaaagaatttcagtaatctatctattagaacttgtttgaagcgtgctgttacttgaatatatttgtgctgaactaatgtaaccttagaaggaaggttagaactaagttaccggatattgtatttaagttgatttttccatcaaacagtggagttaccgtagtttgatttttcttaactatgcttttaacatacagatttaacatctaaaagattttgtaaagcatatctagcagatacgcttttagaaaagattatttgataaatgtttcttcttaaatgactaatgtttgaaatcaaggaatactttaaagacctaggggtatttttgtagaagcttgggtgaatatgcttttatttatacatacttataaatgccacaattgtatcactcacatctataaataatgtttccttatcccgagatatttcacactggcactgtgaacatttgtgcaggaaaagaatcagtgggtggttaagtcttttgaattacagactatggttgattttagaatttagggtatggaaaaattcttatgagatatgacaagtctatatgttttaatcgaccagtattaaattttttattttttttgagacagagtcttgctctgtcatccaggttggagtgcagtggcgcgatctccactcactgcaacctttgcctcccaggttcaagtgattctcctgcctcagcctccagagtagctgggactacaggtgtgcgccactatgcccagctaatttatgtatttttagtagagacagggtttcaccatgttggccaggcaggtctcgaactcctgacttcaagagacctgcctgcctcggtctcccaaaatgctaggattacaggctggagccattatgcctggccaaattattagtatattttctaaatagtatttgtgctaggtagcttcagagccatatttttgtatctgataggacacttctatacgaattttgggatgatatgtttttagccaaacccatgttttatctttgtacagagtttcttcctcagaagatgttttcctgaaagagtagtcattcagatttttaaaatatctactgtgtgtcagcactttgctaagaacatagagatgaatatgacatggttctctccctctgggaaatcagtcatatgggggaactgacaaaatgtttaaaataattttattttaaaaaatatttattataataattacatgcaaataattgtctactgtaaatcatcctagttactcttctttgtcaccatgttactgagactgctcttattttttaagttaccagtgaccttatttccaaattttatcagtatgtctgtttctgtaatggtatctttctctgtagcattcagcatagttaagtgaatcctccatccctgagatgatcttggttttcttcctgtctccactgactgatctttctctgctccagggctttgcctcgacccccttcttcttttttttgagactggagtttctctcttgttgcccaggctggagtgcagtggcacgatctcagctcactgcaacctctgcctcccaggttcragcgattcttgtgcctcagcatcccaagtagctgggactgctacaggcacatgccaccaagtccggcccatttttgtatttttagtagagatggggtttcaccatgttggccaagatgttctcgatctcctgaccttgtgatccacccgccttggtctcccaaagtgctaggattacaggcatgagccaccgtgccctgccgacctcctgtttatctatagtctgtctttgggaatccaatcctgtttcaatagtatctgcatggcgatgattcctaaatctatattttcagcaccaaccaaccatgaaatttctcactctgttgtccaggctggagtgtagtggcatgatcacagctcactgaagcctcaacctcctgggctaaagcaatcctctcgccttggcctcccaaagtttggaattacaagcatgaaccgctctggatggctgagagctatctttaaaacagtaatcaggtcacttgcctatgaaaaactctctagtgtcttcctatcatgcctaaaataacatccatatacttcctactttggctgagtcccaaatgatcaggcccctgcttgcctccctgacctcatttcctatcactcatccccttgtccactacttcacttcattatagttcatggaccttcctttttttttttttttttttttttttttttggagacggagtctcgctctgtcatccaggcaggagtgcaatggcacgatctcggctcactgcagcttccaccccctaggcaggttcaggccattctcctgcctctgcctcccgaatggctgggattacaggcacacattgtcagtcccggctaattttttgtattttttagtagagacggggtttcaccatgttgcccaggctggtctcaaactcctgacctcaggcaatccacctgtctcggctttctttttactcttggaaataccaagttcatccccactttagggcctacccctttgcctggaatggtttcccgctttccacaattttaaaataatactgtgtgccaaagactgttcttgttgctaaggataaagcagtgaataagagacaagggcagaccctgagtcatttttgttatacctcttatctgatgagttccttcaaggtgcagtctaaaatactgtattctttgaaactactggtgcaacttgctctcagtagcttccttttttgatgtaccatttatgtaattcattcaatctctgcgttgatggagcttacattgcgggcagggtggaggtcacagtaaacaagttgggtaaaatgtgtgttggataatggcaagagctaagaagaagcatacagcaggcagcaaagtgctaaggtgaggagtggggtcgtaattttaaataaggtgattagggcaggcctttttgaaggtgacatttgagtaataaaaataatctgtggctgggctcggtggcttacgcctgtaatcccagcactttgggaggccaaggcgggtggatcatgaggtcaggagttcaagaccagcctggccaagatggtgaaaccccatctctactaaaaatacaaaaattagccrggtgtggtggcacatgcctgtaatcccagctacttgggaggctgaggcagggaattgcttgaacctcggaaagaggttgcagtgagccgagatcgcgccactgccccccagcctgggcaacacagtgaaattctgtctcaaaaaaaaaaaaactattccaaataaaaaaagcaacaagtgcaaaagccatgaagtgawagtatgcactgtatgtttggggggtagttagggattcagtgttggggaaagtgaagtgagcaaggggaggaagtgtagcaggagatgaggccagaagtaagagtagagccagatcttgctaggctttgttggctagtggctttcattggtacacattggaactacttgaggagctttaaaaaatactgatggatgggtttcgcttgcagagattaatgtaattgatctggaggtgcagctgagacattaggattttataaaagctcccccaagtgattctaagatgctgctaaggtagagaaacactgtaggccatcattgggacttcggcttttacttttgaggaagttcggaagtcattggatgattttgtcatggaataattttgtaattaactttaaaactggggttttgtttattacatttaattaccttaactataaaacggactccagttgtttgaagtgggttgtgatataactcatagatttgtatcagtataaaaatgcacacttttcacagtttggccaaggaktatctattttattttctgtgcttcattagttgccttttagttttcacagttcacatatgtctcctctttccatctgtttctgcttatcatctttagcttccttccttttcctgtatctaaatgtctacatttctttaaattctggacttcagtttaattaatagaacttgaaatacagcattgtataaaaaggttttaaccaaaacatttgcatttgtctgatctgagctgtcttaatccagtgactgacaaagcaaaattgcatgaaatttacattttttttcttcttgtaatttaaaacttggttcctgtataccttcctggatctttatacttttgtatcttttctaccatttctgtaaaacctcaactgcagggtgcaataatgggccttattttctatatttcagcaggacagttgctgaaaatgggtttaaactcactggcattatatcccacacaaaaatatattactttgacatgtttagaaaaaagtctgcctttaatttctttgtaatttacctctaatttgttgagttacatgtaagtaacttttttttcccctctgtcttgctgtgtttcaatggatttgcctctcctgtttggactgaatatgtcattacaattcttggaattctttgtttactgttcctctgtggatttcttctgttggaatctggaacactggaatgatggaaatgtgttctttacaaagtagctgtgagtatactacataatttatagagtttttttcagtctcagttaacttaaatttaatttatagttggatgaaatatgagccaaggaaaccttaggtttaatgcatatttctaactccactcatagcagactttcaaatatttgacttaaaaatgttagattctgattagtctcctaattattatgtttatagttagcttttcattttaatgggcttcgtttttaaaatttggcttaagaattagttttatgaaatgaacaaaagagccaaagattatggatggaatatttagctacatgactagtaaacattgtagacttctgttctttgttaaatccaaatgtattgaattgatgttttgatcccatgattgctttttaaatgagaatttaaatgtggcagaaacttttaagagaatgtgtgcctctttttgctattttttaatgttgagataagactgcctccaaagtaaaattaaccaatgagactctgcttattcaaatagtcttaactacggacagcatttctcacccatgggtaagttagaagtcagacttatttactacaccaatttggaagtagatttctttcagttactcacgaaactattgttgaggtcatctaggaataaaaaaccaatagaaaatgaagttataagttactttaaaacctggataaacctgaagataaaggcagtaggatcatgtgaaaccttgaagtgacaaaattggacctggcataacagcttgaatgatactgtagctggttgacactgatcacaagagccttcaagagtttattttttaaaattgctttaaattcaacattttgatttcatttcatgaataagaagacaaatttcaagaatctcatgcctgtggtataattagtcagtgtgatcaaaggagataattaaaaaggattcttaatatgatatgaaggggatttgaatttttttattgtgaagaatcctttgttattttgcttttttagttggttggtcaatcatcttgttactaactactgtcaattgaaatctttgctctgaggcaggttttctaaatttttatttcattcccttggatttttataattaaccattatattgtcagtcaactcatgctcaaataattttgtccatttaagaattgatagttttattgataatgccatgaaagtagtttgatttgctgtgaataatagtataattttctaaaataggttaatgaagggaatttgaaagtgtgattgaatagtactgttgatacatgaataacttggccctttttgcttttgtcagcaacagaagaaccttgaaggctatgtgggatttgccaatctcccaaatcaagtatacagaaaatcggtgaagagaggttttgaattcacgcttatggtagtgggtaagatatgatttcttactaaaatggaactttggtttaarttttaaacgttagtcaactctgaatagatttaagaaaacactggcacagatatctacagtgatcatatctttgttgtattttctcttatgtgcatacattttaaaatttaactcagtggcataatgggatttatgtcttgcctcttattttaaggtagaaactacaagttgagaaatggtgggtgatagtgttggagtggaactctagagaagttatcttcaattcatagtgctacaaaagaaaatagcatctggtggttacttactactccaggatagttttgttttctggcttatatgctatagtggagtatcatataagcatttaacttaatgtgctctgaattttgaaaagaaaggtaggatagaggatcataataatgtagttgattacccttggaattcattaattgaatgtaagcactggaatgagtaaaatatgactctcctggttctctaattcagtctgagttttcttttgtgtgttattccatgaacacattaccctgcctatagtccatttgaaaatactgttaaggataattttgactgtaggttggtagcatcattattaaatatgaagaaacacactgtgtctttcccatctataagattagttatcttcaataacagtcttactcttaaatgactatacagtattttcacctcatataggctgactttagaacctaagttacgaatattgtatagtgtaactttgttgtatttctgttatttaagaaggtgaattgcagggtagtggattagctatccttaacaaagaaagttgagttgatgcttgactttttaggtagtatacatttttgttaactatgtttcaacatctagtatttttattttggtgctgaattaggttaattgaactagctgtgaaatactcctttattgggaggtagaatattttatctactgactgcaatattttacctgttggtcagtttttggctctttggaagttgtatacatcatcagagttcacagttaaaacaggtacagaatatgcaaatttgatactttatagcattggttaccttgtctatgtatctcttgttgagtagaagtatggtatatctagcttgcaaactgctgctgtggagtagagatgggtctagatagagggataaaataatgcagagcataccttttcttcggtaggttggtaacatcatcattatatgaagaaacactgtatcttacctttacatatgtaatattaataatctcaagtgacaaactgtagacaaatacaattttttcacttacgggaaaacctcctaggtccattaggagaactgtaacaattaaaaaaatttcctttgactttagaatttttgtttaaagaattactttttaaactatacttagtaggataatgtctggtgatcaaggccagagagttgatttaaaatctctgtggcatttttccaaatgaaaaaaatcaaataatcatctgattttgatttttagaggaaatattcagtctctagatgtatattacttattagcttttctaattaatccctttgtgaaatgcagcttttcttttttctcttcctaatgataagacttcaactgaggccaaagaaaaataggtgttaatatccttactttcaagtgttaatatccttattctgttttcccactgagccttgaacattgtttaattaactacatttgaatagatatattgagtgcaggtattaaatattttcatctatataggtgtagtgccttatacatagtcacttactaagtatctaatcacttagtatctaatatgttgatttatttttcagattttaggctgactctaacagcatcatttgcaaatcatagaaagctgaaaccaaccttgctttaatattcttgacttaaaaactttcagctattccttatgagctaaatcctcatttttgggatctaaactcagaataaatttggctcccacattacgacagttcatttacaacttacacattgatatcaactgagaatctgtaacagattttttttttattaaactctttgtactttgttggaaaacctttaataatcttgcttcataagcaatgtttattgagtacttgcttgagtgacttatttgtatcaaagaagcatgctgtgtattcccatattttctgtcttaaaggagcttctgatttatatgacaagataaaccacatagaaatatgagtcagtagaatcatacaaaagttaagagccatagaagtttaagggtataggacagtttgcctcagttggagattattattgccttcttttgaaaagggaggcattaggacaaatttttgaaggatagaattggggccaagattgaaggagcagtcctgttggsggaaataatagccatcatttacataacttttttatgtgccaggtaatgttttcagtactttatgggcattatctgctaacttacgattcttacaacagccctatgaagtaggtattgttatcccattttggagctgaagaaactgaggcatagcgagattaggttacttgcccatggttacattgctaggagatggcagaaccaaacccagtctactgctcagttagtctgggatgttcttaaccaccatgcagaggctaatctggggatactgggtatagtgcagtgtttataagagtacatccaatatgccttgaacttagatgaattcagtgaaagagagaatgaatgagaatgagaactagagaacttaaatagtacaagtaatttttcctgttattccactggaatgagcatctggcctagagtgggtgtgaagtgggagaggtgcatttgctattctcctagtcattattagcttccacatagtttgatagtgtgaactcctcactttgctgaatgttatagtctagggacaacagggcacctaagtacaaattggtcactttttatgtgttcaaagaaacagttacctattttagtggaggaggaagataggttgttagcttgtatgtaattgtgctttatggatgatataaggaatttttcaagatttttttcacagcacactgactttaggatctgacccctaaggtgtaactttacaattaaaattaagctggaaaggtagactagccaggattttggagaccctgattgacaatttgatggggagattagaattcttgattttgaatctttaaaaatttaggcatatcaaataatgaagacatgtagatctctattcagtgaagttgtctaacctgtttggcttggaacttgactatcattagtgtgctccctaattagacttaactgtgatagagaataaatttttaattgtaatatcctgtttttactagaattcttcaaggaggcagaactcagaaaactgtagtttgctttatttaacttgaaatagtttttaaaacaggtagtattaaacctattattctgaatcctaggaagatagaatccaaaattcagtcatttctgtaatcttgaactttgcaaaatttttgtgataacagaattttaaacatttaatgatatgtcaataatgtatttgacctatgccacatgtgtttagtggcagattggcacttctatttttttttccagtgggagagagcttagaatatgttggtttggccattttttgggattcagagtttatcctaatttttttttggtatatgccttatcagagaaagtttaggagttacttagttagtgataggatatacgatgactatcctagttgtcattttcctccactgcctgttgatgtttgaattgataaaataacatctatatcagtttatcaggttatttgaaaaaattgaaagataatattggctcaaaattttgtatctaggctgttgagcattttgtggtatttttaagatatgttaattccgtgaaatgttttgagttatgattttaagatttttccttgagctctgtatttttattttgcttttattaatagaagtaacttaactgataatgacttcacaacattggggatatactaaaaaccattgaattatacactttaaaatggtgaattttatcttagaaaaagtaattcaaaaagaaagtttagaagaaaaaaatcacataattccacatgtccactattttaattttgtacattccttctagctgttaaatctgaatattctttaaagcacttaaaaaataaagttaatatatttcattgcagaaattgggaaatgcagaaaagcaaaacgaaaataaatattgtcatctgtcacctattgataataactcttaagtataggaacatttagtattcttatgtgtatctgtaatgttctatgattgccttttaaatgtgtagttaaattgtgattatcttgtgatatcgtacgttctttcataacctatctattggtcaaattgtagactttaatggcctgtataggttagatatatcattcttggtcatattgtcaggatagttaaaattgctagctagtattaatactataataacatcgttatagttatacctttgcttcaatttttatttattttcttagaataataaagctttggaagtttgaattgctgttaagattgatgcattgatttaagggttttgatacataataccaaattgctctaaaacaagttgtgtaccattttgtatgctcatcaagtgttgacagcactgtttttcctgaatactgccaacattggatattaatctgattcctaaaacgtggtatcttattttcatctgtattttattgttgctagttattttatttatttattttttgagatggagtcttgctctgttgtccaggctggagtgcagtggtgcagtgttggtccactgcaacctccacctcccaggttcaggcagttctcctgcttcagcctccctgggactacaggtgtgcaccaccacccccagctaattgtgtatttttagtagagatagggtttcaccatgttggccaggctggtcttgaacacctatattgacctcaggtgatccacttgcctcggcctcccaaagtactgggattacaggtgtgagccaccacacctggccgtcgcaagttattgtttatttatctttgatattcttttataaatggtgtgttccagtttatttttaaaaactttttttttcttaagtttaggtaggtaggtactctgagggcattattattattttgttgttggtaggcattgacatttttttccagaattttttgtgtgttgtgttttctattagcttgatttttatattatccaaacttccttccttccttccttccttccttccttccttccttccttccttccttccttccttccctccctccctccctccctccctccctccctccctccctccctccctccctccctccctccctacagggtcttgctttgtcacccaggctggagtgtagtgtcacactcttggctcactgcagtctctgcctcctgggttcaagtcatcctctcccctcagcctcccaagtagctgggactacaattgtgtgccaccgtgcccagctaattttttgtttttgtattttttttgtagaggtgatgtttcaccatgttgcccgtggctaatcttgaactcctgggctcaagcgatccatccgccttggcctcccaaagtgctaggattacaggtgtgagccattatgcccgacctcagtctttttctttgtggtttacttaatgtcttcttgcttgattcaaggttattagaagttttactacatattaaatataaagactaaatgactaattaaagactaattttttattttgaaatcttaaatccgtatggttttttgatytaagttgtgaggcaggaatctgatgtttattttttaaatggttgagtagccctaccaaaaccgtttgttacaagcttaatttttaaaagtgtatatgcttggtttgttttctttcttaccctttggtttagttcattggtcttcctatataaatactacattcttggagttataaatttccagcaattatgttgttgatttatgtaggaagattaccagagtttatgttaatttagggagataggcaaacagtaagtcaaatgattacaaactgctattttctagaaagaaataaacatggtgagacttatttggagtcatcaaggaggacctgcctttttgaaaaggatattttttcatgctaattcctgaattacatgacagttaggaaatactaaaaagagaaaaaaaggaaaataaagacttagcagcaagagataataatcattaatatatgctgtgtttatcttccatattttactttgaccactgygtaatgtttccagctgtggctatctgatattttaccattgcttcatcatttgacatttgaatgatttgttttgtttaatctcataataatgctgcaataaaaattttacagaatggaaattttggtcaacattttaacgataatgcttaatggctatatgtgtattctaatctgagatggaatatgctataatttttgtaatddtatgttatgttatgttatgttatgttatgttatgttatgttatttttgagacagagtcttgctctgttgaccaggctggagtacagtgcgctatctcggctcactgcaacctccacctcccaggttcaagcaattctctgcctcagcctccccagtagctgggattataggcgcctgccaccatcacgctcagctaatttttgtatttttagtagagatggggtttcaccatcttggccaggctggtcttgaactcctgaccttgtgatccacttgcctcggcctcccaaaatgctgggattacaggcgtgagccattgcgcctgacctgtaatttatttttttactgatggacactaggtttgtttttacccctacccttgttacaaatagcatggcaatgaagatctttaaacacacagagttttgttatatgtatgttggcagacagagggcagtatcattwttatttatttgttaataattcctgaagtaggattattagatcaaagtatttgaacattttgtggctcttggcacatactggcaaattgttcctttcttttctttcccttttcctttttctttttttaccttccctttttccccttcccccttcctccttcccccttcccccatccttcctcctccctccccctcctcctcccccttccccctcccccctttcccctccccccttcccccctttcccctccccttccccttccccttcccttttcttcttttctttttgaaacaaggtcttgttctggtgcccaagctggagcccagtggtataatcagagctccctgcagccttgagcccctggactcaagtgatcgtcccacctcagcctcccaagtacctgggactacaggcacacaccactatgcccagctaattaaaaaaataaaaataaaacaaaatttgttttgtagagatggggtctcactgtgttgcccaggctaaccttgaactcctggcctaaagcagtcctctctccttggcttcctagagtgctgggattacaggtgtgagtcatcatgcctggccagcaaaattgttttttaaaagtttatgctactaaagattatatattaagaaaaaaggaaattttttttttctgaatttgaagagatttatggtgtatttgaaggttaggctattcattccatggatgttatgactgttttagatgcttgagagggattttaaaggtacatgaatacactataatagtagaggaggaaaacagtatacacataactataccatgaatcataatgtgttaagtggcataagaaatgtgtaaaccaaatgttatggaagtttagagaaaggagactttacagctaaaaagcatgccattatcttaatcatttactaattcttgagaaaaaatggtactttttttcagtaattcgtatattcatgttttgtttgcttaattcttaatctgaattaatggcttaaatccagtgtcttaatcatggaacagtgtagttaggaaaaatacttggaaaatcagtcttacagattgcagtctattagccagatgtagyggtgtgcacctgtaatcctagctactcaggaggctgaggcaggagaattgcttgaacccgggaggcaggggttgcagtgagccgagatcgtgccactacacttcagcttgggcgacagagtgagtgagattctgtctcaaacgtaaaaaaaaaaatgtggttctgtaacaagagcactatctggattgacatatgtaagaaatgtaatcttgataatatcccagtttcatttagcagtcttttaaaaagtcatcagtgtgattttaaaaatataagcaagtcattgaattatgattcttaatctgtttttgcttctcatacatatactatcctaatatggtctttgaaaataatacaagaaactccagtgtcgaaaaacacagctatcctttcttttgacagaccgagaggcctaagataaacttcatagtatataggctgaattagttaaggatggtcatgtttgtcagacctagagaaactgttctcttggtattgaatacactcaagattgattggataggtggactgaagtaaaaatggtatcacatttgttaattttaattagctagatgttgggacagaaatatgaaggccgcatagtctgtcagtattttaaaagaactcagtactgaacggaaggcaaggacatgaagggagcacatgttagtgtaacttctttacagatagaaatgtaattctcacatagaagactcatttagtatgtagttttcatcttggcaaggaagactgctctttctttctccataatgggtaatttctaaatctttcctagtctaggtcatggaggccaaatactattgtgggtcaggtgggtccatcgttttcttaggtgactgtatcacataagtctgaaatgtaattttaaatatgagataataatatcaccttctgcttagctatgactacagtctagcaccaaaggaggtcagaatttccccctttatatttagtccatctttctgttgaaagcatttgtagattgagtgttttttgtattatgaatcgggtttagtctctcccaaggcaggaagttttcaagtattacattttttaatacacagcaggtggattttgtctgaaagatagttttatgccaggatattgtacttgtttcactattgaactacagaaccttagaattattttaaagattggaaaggtataacctgtctcccatgaaagacctttgtagtggtaaatttgccaaccttgttaattttactcaaactttgtttttgaaaaaaaaaaaaccctcattttaagtaataattttcatgtatttatatctaggtcttggggttttttggtctgttttactatataggagtatatagccatttaaagcagtggctaaggtactgaaggctgtggatcaaatttttagcagggaaggggaatgctgaatgggttcactgacttgccaaactttctgaaatataattgagatttttatcatgtctttatattctggagacagattgcatgtttagaatctcaaaaaggtcatctacctaaaatactgaaaattataggtacaaagtattttatataattagaagtgtacgtcattatttactgcacatgattactgtgctgaaaataatgtgttaattttaaattttgaaacaattctaaacaaaagttacaagtacagtacataacttttttcctaggatatttgagatggatgcttctcttttgtccccctaaatactttagtatatctytcttcctcaaggatattctgctatatagccataatataccatcaaaatcagaaagtaacaagtgtatgttatacacacacagacacacacatttatatatatatgtgtgtgtgtatgtatgtattgaaaaatataagtgcacacttaaatctccaatttcattccatcactgtaggggtcctaattttcatctctcccatatttgtattgtcctctgatggtgaaaataccattatcttccatatgtgtacttatttgatcaatccccctgtaattaatccatcacctccttcaggttcttccctttcttctctgaaaaatattagggaagaaccagagggaggtaatggattagttaattgcagggggattagtgtaattaagggggaggcagtggccctgcttacctctcttgtgctgtgatgtcttatgcaaggccattcttctcatgtggatgccccctcatcctatttaactcagacatctcatgctagtccattcgtatgctctattagaaacttttcctcattcygtaggctctaataccctaataccctgttctgggccactgtggatttctctccagcatggacaccyacctctgtcagtctcacgtaatgacttttggactgaatttttaggaagaaatatggaaaagatagagctgaaataattttgaagtgttcaaaagccagtatttgactgtattatagaattaattggtatgtgaatagaatagttttttcgatgcctaaaaatgtagaaaaattagtaaaattgttattttggactgccatagaaaaaaatggtggagataaaaagctctggaaaaatttagctgggaaattaaaattatctgcatatgcctacaagtgttgcagagttataatatttacatatattttgataaagtagcatgtcccccaaatttactaacagttgaaacaaataggctgatatttagaaggaagaaagttttagactttggggcttctgtttcttgtactgcccagaaccctaagtaagcagatgataaatacaaggtaattatgcatatcaaagaatcaaatgtgaagatttgattgtgaagagttcattcttaactcaagtttttaatgatcaaaggctataaattgtttattatgttacagatggaaataattacagcaataacataaaggatgagctctttcatagcatgcttgtcctggttcagagggtaaattttaattgaatgattagtaattaagtttatgtacatcagcagtgtaagtgctaagaattactgatgaagcggatgacatgaaaatgaaaatgattacttctaccctcaaaggaatttccagggaaatgcacactactaattacatttagttgaataaaggttatagtaatgtacatttaaagtgccatgtagtcaggagtttttatttagatttatgtggtaactttattagtctgataggatcgattagaatcttgaaactagtaactcactattgtgtttaaatttggaatttacaatttattttggcaattttgtaaaattttattcatgtttttgacttatgtttttgtcacaccatgaaaataagccttctgtatttaactttatatctactttgtaaaagtgcagcagctgttacactgaaaagaatatcatacttagtccagtttaaaacttcaatttctgtcacagacaagctgtatgaccctggacagatcactttgaatctcactttccttttcacaacaaatatttacctagtctttttttttgagacggagtctcactctgttgcccaggctagagtgcaatggcgtgatctcggctcactgcaacctccgttcccctgggttcaagcagtcttctcctgcctcagcctcccgagtagctgggactacaggcgtgcaccaccacaccaggctaatttttgtatttttagtaaagacaggatttcaccatgttggccaggctgatttccaactcctgactacaagtgatccacccaccttagctgggattacaggtatgagccattgctccaaaccttaccttgtcttttctaatccaagcattgtgttgtgattacaaaaagtaaacgaaggccaggctcattgatgtgtgtaatcccagcactttggaaggcccaggtaggaggattgcttgagcctaggggttcgagacgaccctgggcaacagagtgagaccccatttctaaaaaaatataaaaaataaaaataaaagagctgtggtagggttccttaagaacttgtgggtgtaggatggtggtagagtggagatacttacacaggaatgctgtgtactgtgagtgaccacccctgcctcacagagggcttgagataattgtgtatatgagtgtactacatatatatattatatatgtaaaatacctagtacatctgtaaattgaataaatgttaattttaaacatatttttattcgtgcattttcatgacttagttttaagatccaaaacgaggaatgaagaaaagggaaagcagggatggtagacaatgatatgcarttaataagctaaatatttgattaatccttactttgtacttctgttttggttgaactcttttgattataaacattcggggcaaatgtgtgctctttgtaattcagtatagattgctgggcaaagctgttttctggtgagagtcagatttaaaagatggttgagaatttattcttttccttcttaaaacatggtttagctgagtagcttagattcttaaaaacacaatatgactttttacctgtctattctgtgcaggtaaatatcgtgctcaagttttttatgtgatatgactatttagtctgaagggtgcacttgctttatggttgctgaatattaatgctaccccttgcaaacctttcgagtatcttgttttccctggactgtgtcaggtatttaatgttagtgataggaagactcttaggaattgattttttttaaagttaataaactttaaaaaaagttttactttgagattttggacctgattttatatatgtggatgtttgcctttgttgttgaatcaacatgaattatatatttgtttgaaatgtggttggatatttagataactcctgtcttttttttgatataacagatattcagatatatggcttgaaattttcttcctataaaaactaggacttgttacaaaatggtttttgattagaaaagtaatatgaaggaagtatatggcattttaagagagaggacatcaccattgttaaattttgttatttttctgcatcttaggcatagctgtaataccatatttattttgtatactttcttcatctaatgctgtggcaagcatttctctatgtcagatttttaaaagctaattttcaatggctgaataatatttttataggtgtatcataatacgcttagcctgcctcccattgttggacctggaaggtctccctctgccaccacacacacactttttttattgttaaaatattattgcagtgtttttctctgtgtgtttcattcctagaagtaaatggcatggtaaaggatgttaactgaaaatgtcgtaccaactaatacagtttctataggtgtgtgaatgctcatatgtgtctcatccttgccaatattgagtggaaatctcttttattttcctggagaagttggttctttagcacgagggaagcatttgagagtgtcttcaggatggctcaactttgcagtgtcttcaataaataacttcccataacttcccactctgtaatttgcccacctgtattaccccacccycaagcctcagactttaggaaatggcatcaggcctgtatctggagagttcagagttctgtgaggtagagcattccttccaatgggacctagaattcctagagttgcaaaattctactgattagacccaggaggtctcaggagtccagagttgcttggagcttggctcagaattccaagggggcccataactccatgaggcccagagttcctggcttgggaacactgggaggcctgggatactgtggcttagactcaagcagaaaggtgaacacagatctttattagcagataccaaatttgacatttaaaggagatttctgagcagctgcagacctcgccaagaccrtgcagattccactgactattcccatgccagtgctccagctgctcaggcttgaaggtatgtgaaataatgtcactacattagagcagtgtctctgcacacttacgggagtctgcagctgtgacacatagaagttggccgtgtccagattggtggctccgaagtgggcagccttgtgcacacagtcgtgcagtgtgaagctcacctgtcgacgcactgtagccagcatgctgcagaggtaacattcccgaagggcagctcgagcccactgctccagggattcctgcgattcttgaactatgggaccactcttggatttcaggaacctctggcttcaagggccccagcatccatcaggggcaatgccatggctgaagccatcagggcccccgggtaactggaacacaggcacaggaatagtcagtggagtctgcattgtcttggtgaggtccacagctgctcggaaatctcttttaaatgtcaaatttggtatttgctaatttggtattagaggttttacattttattttacttgcctttgattatttgaaatttttaaaaaagtactgttctttatttggaaattttgtacttgcaacttttttaatgtcaaaagtcttctttttgaaactttttttgcctagctttttattaagtatagtcacaccactaatgacaatttcattgttatatttcttgtgaatgttgtaacttaaaaataaatgagtacagtactcttttatttttaaagaaatatagtgagatataattcacataatcatggtatgattcaaatacttcatccctggtccttaggggatacgttttggtatatgagatttataaaaagtaagaacttaaaagaatctataggttatctaattcaaagagttaaaaactacccacttctgctttgaaagctacttcttagaaccactgtatagaacatgctacctgatgaagaataaatcaacaccttgcttcccgtcttctatccattagatatccaggtaaaataatatctgttttcctgatatttctcctttacttacactccagcatgccacgtggccagctgtaagttgccctctacttttgtagagccctttgctgtgtttctgcaaaatctactttttctgattcrtgtaactcaaaactagctctattttcttccaaattaaaactcttattttcttaattaatgctggcccaaaatagaaattagagggaaagtcttattccaggatctgaaagactaatagtattcacaagaatacttgattttttttttgagatggagtctcgctctgtcgcccaggctggagtacagtggtgtgatctcggctcactgcaagctccgcctcccgggttcacgccattctcctgcctcagcctcccgagtagctgggaccacaggcgcccaccaccacgcccagctaattttttggtttttttttagtagagacggggtttcagcatgttagccaggatggtcttgatctcctgacctcgtgatccacccatttttaaggaggaatgtgtattgaatgatcaattagaatttcaggtaatgggaagaatttagaggagcattgagggacagctcatagactgtatttaaaccgtcaatttcaactgttttcagtttagcaaaagaacttacagaaatttggtatatatcttatgaaactttgcagaccctaacctaacctaggtcaggcagtatcttttactacaaaattgggataatcattttctaaataatcatgaagaaaatgttctgagtaggcagtaaggatttctctggtaacatgatgatttaaaaatgtaattgtccacttgaactgggttgtataaagaatgcttctatttctgagtatagcaagaaagatcctaacatacctcttagcgcctcccagcctcagacgtgtagcaagtgaaagctgtttgaattggcaaatgaggtaattattgagtagctggttggaatgtttgctactagctatccagcagaattgttagttcttagtactggtgtaattacagtaattagaataagtaaacttcttttaagataattgcagggccaggttatatagagctygtttagcttgccttttagtattagcatgtacatcagtgtgtatgttaaaggataccctaatagattttgtggaaatggaattgtcttatagtaaattccagatcaacatatgtatggaatgtatctaatgtagtctagaccagtggctcccagtttttttggcaccagggactggtttcgtggaagacaatttttctgccagggtgtgtgtgtgtgggaggggagcaggatggtttcgggatgaaactgatcatcaggcattatattcttataaggaggacgcaacctagatccctcacatgtgcagtgtgcaatagggcttgcattcctttgagaatctgatgctgccgctggtctgacaggaggcggagctctggcagtagtgttcactaccactcacctcctgctgtgtggcctggttcctaacaggccrcggactgtgggttggggatgcctggtctagattgttcttcacagattaaatctttaccagattaagtttattaaaaagtaaaacaaagaatagcgccctcccttggcaaaacatcttggtgtggtatcttttcttcattttacagccagatgtaaagaaaaaataaacctctacttttaaatttcccatccagtacttaatttctcaccatttggcttctctccttaacacaaaactacttttattaaagatcagtaaaaggccttctggttgtctttttctttaacttatttggcattactgaccattttttccttgaaactcttcctcactttttgtgatattgcctcctggtttacctggttgtgttgaagcctgctttattaggatcctttcctgtggggccatctttaaatgttaatgtaatctggcatattgccctatgtcatccttatttactagaatttcttaattttctttttagggacaggacaacatgaacataagaatttcttaatttcatctacctttcaaatcatttgggaagcttcttcaaagtattcttggaaacacttgcctagatattctgggctttgggtctaggatggaatatgatcatctrttttgaaatacctcctgagatgacactaatatgtattttggttaagaactatagtttgttgctgtctcacctcttaataggtttcatttgaggtgctttttaaaatgtcaagccctgtgcatttaattaataaagtaggtatcttgatcaaggtcatatacttgtaggtgattgaactaggatttgaatttgaacaaaattgatttcaaaacccaggagaaaaatgaaggaaggagttagaggaacaaggtagaaaagctccacagtgtgatcaccagctcctctcaggctttcctcttgcctctactctaacatggtaaaacattctgaaaggacttaaagattctgtttctaaaaatcctttgctttcttttctatacaattgctataaaatggtaaaagtggctccttgaatctacagatatcccagaaagttgaaatgcttattgaaatgatactccatctttcaaagcctcattgaaatgtgacctcctttccaggctggtgtgatttctcagttttctgaaattctgtcgctttggggtatctcattcatgattttgataaaattctgccttgtttgtacattgtttgcatatcttacctcttgtagcatactaagatttttaagatcaaggactacatcttatctttgcattcctcgttcatttatttgataaaaatttaatgatcacttataaaatgtcaggtactactttagtctcagaaaatctagagattaataagaaatgtatatgaagttgagatgctgagtaaaacaaagataagcgagcatctttaaagcaggacttctcagattcttttattataaatactgtgggatcccaatcccaaagacctgaagaaacctgacgttagctattataaacaaatattattgtgactttcttcaaaaccttataaacaaataggtgatgaatgttttatttttaggcttgaaatttaacattcttgagtagtgatagaatatgtggctttcatggacaagtcctcaaagataagaaggacatgggttattttaacatgcttattaggttgaagtacatgtgttgtattactgactctagttactcttgtttcttaattttcatagagtaacaccttaaattgtaaatattatgtttygttttaataaggacaaaaaaatttaaaatccagttatttccccttaaactgcagtraaatgagggaatgataatgacattgttgcaaaacatgtataatgcatttcaaagtcaraataaatgtaaaataggcattaatttggaacattcagaaatttatttggatttattaaaatattagtttgaagaaataygaaatgttacagatattctttttatcttgagtaatttttttcttaagccagtatatatattattctgaactctattcttaaatgttttctaaataatgcagaagtacacttgatttgggttgtttccacagatcttgtgtttaagtagagtttgatttgataggactgattatagttctctattgttttgcattaatgatactacttccttccctttagtaaagccaatgaacaaggatcaattgtagttataagtcactttgagattattagacaaggctgctatattttgtcttgtaattataggccacttgacattttggtatggaagtaaatattactctactaaatgtgagtagaaattaatattaatgttcaaactcaggcatagcctcactgctttcaacattcctttttacttattttgaggccagtaccctttagtgtcaataaattgccaaccttactcttctactttacccccctgcatccctgtttcaaatgtttattcccttcttaaggctrtctacttcacctttgacccttattcttagtagttgcactagggtcctttctttttctgtgagaaaatgtgaatagtaataaaatacatttcattgcaactacctattactgatattcaggtgtccactgtgccaaggtatgattctaatgagatcacttattcctcacaccaactctgtgttgttgtaggtactgcttttatctgcatttcataggtgagggcactgacacacagaagtatggtttgcccaaggtcacaagaaaartttattgatggaactgagataagagatttcaaggaaattttaagctctaatggactactataacctttgcccctagacttttccaaagttacacaactactttcttacaattattggtacttttgaaaaaaaaaaatgagataacttggattaagggtatgtgatacttaaggaaacacagaaaaatttggaatacacttaatttacaccttcagggtacttcttaggaaaaatttccagggaagaataatagtattaccaaactatttttgtatttgtcaggtgctatattttactctgctaccaagtaaaaggactgctcactcattacaaaatagcttgtttttagagctcccagtcacaatgatttgagtaaggtgactttgcttatgggaaataaactattttatcaggcttatttgaatgacattttggtaacctctgtgtcacgataatagaatcattaagacaatacaataagctacaaatacctcatttatatgaggtacttgacttgagtcaatacaataacctacaaatacctcatttgtatgaggtactcgattgagtactttaggagaatattcactgaatcagtgttattcttgaaaggacgtagatctattattgtatcttgtaaaatgttcttttttccatctttctcagcctgctaaagaggttatgatttagtttcaggacagatgtggaatttgatactaggggtatcaaattaaagatttgacaagcctttaatgacaagattaaaggctgttgaacttagtttctctcttcttcctgttctaaatttttaattgctttatcctttacttttccatttgaagctcattgtggttagtgcagtaaaagcagtggccctggtgctcaagcatgtaatcccagccctttgggaggccgaggtgggaagattgcttgaatccaggcgtttgagaccagcctgggcaacatagtgagacctcatctcttaaaaaaatatttgctggatgtggtggcatgcacctgtagtctcagctactcgggaggctgaggtgggaggatcacttgagcccagcaggcagaaattgcagtaagccatgattgtgcctctcacttaaacctgcacgacagagtgagactctcctcggggctgggcgggggaagtgggtcaggacatagaggtcaagaagcatgttcctttcgcctgctcagagtctgggaagtatagtatgattaaggacatgagatttgccattcagattgagctgtagctctgctacttggtagaggtatttgtcattggcaagttactttcagaggtttcatttacttagctgtaaaattgtttaaagaatcttatgtagagttttgtaattattgaagtcattgaatgcatgtaaagtgcctagctcaatgtctttcttatagttattgaataaaaatattaagtgttattgttaatgaagatactggtaaaatatcccatgtcagatatggtccaacctggttaaccagattggaaggtagttgggaattttggcacagagtctttaatggataaatgagagtgggtatttagaaaggcagtagaacatactgcctggtgtcaaatactgattactgcttattaactctttggcactagtaagttatttcacttttgtttctgttttttcaccttaaaatggtattgataatgatgcagattgagtatccctaatccaaaaatctgaaatctcagatactccaaagtttgaaactttgagtgctgacgtgatgctcaaaggaaatgctcattgaaccagtttttggattttggattttcagattagggatgctgaactgatgagcaatgcaaatattctaaaatttgaaaaagccccaaatccaacacgcttctggtcccaagcattttggataagtgatacacaacctgtagcatctatctcatggtattataaaggttaactaagtcaatgcttgtaaaatactggcacacagaagaatttataacttactggctgtcactgtcattatttttgatgcatagtggtatcagtgctagaggatttggggattcaaattttgaaaaatgccccccaggggacatctctcaacgtctggaagcatttttggttgccacagctggggaggagggatgctaactggcttctaatgggtaaaggccagggatgctgccaagcatccttcaatgaacaaggcactcctcacaataaagaattatccaacccaaaatgtcagtagtgccaagattgagaattcctgtagtacagctgtctggagctgtagttgccagcatctgcagcaacctgtgcctgatgcctgcctctmatttactctgtagtctcttactggactcaataatcatttttctcttaacttttatcccagtactcccaatcactatatttgcaggtagcctcttctcaggcattcttgacttctttgtagtataacatattatcaacccctttaaatattaaaagttaaaattaaatattatataatttatggttcttgtagaaaaactgatatacaaagaagaaaaatttaaatgtttcataacctttcccatctagaaataaacactgttacaaagttggtatattcacttttattattaccctccccttggcttcccaaagaaagaaaagcttataaaatatacattttattttttaaaaactaaattctaaagatatttagtaaaaagcaagtttccttttttctctcacctgcatttccagtcctgtctctagaaataagcattaaattggtgcaagtcttttggcatttttttatacttttatatacaccaggcattcctaygtcaattttttttgtgtgtgtaaacagtaccatgctataagtactattctgtgaatgtgttttccctatcactgaatatactgtgtgtgtatatacactgaatattcctgtcagtatattcttagcaattatgtggtattctgtaatatctttatcatgatttatacagtcagctattaatgaagatggatgttcgtagttacaaacagtgcttaggttccttggatttctaggcacacatataaatgcttctgtaatgtacatttctgaaagtgaaatcctgggtcaaaaggcatgtagatttaaattttgatagattaccaaattattcttcagaaaagctgtagcagtttacagtttcaccaagaaccacccctgatggttgacttactttctttaggcttattttaagcatgagtttttctccaaatactttagtcagatctcttagatttttatgtgtaatactcattttgtttgtatttgagtaattttcacataggaagagttaaggagagatatctaagtaggtggatggattgtgttattttttattaatttttaatttcactacagagaattcagagaatatgatctgtaggttccagcattgatttatttttctgtgtagccttacataggattagcttatttaagtattccataggtttcaaaaatgtgtttattctctgggtagaaatttgtgtatatatatttgacaattaagcatattatttaaatcatttttattttttcagcgcttgatttatccatatccaaaagacctattagtcttttaatgtggaacttgctaacttsctgttgtttccaagtttttgccttaagtatttttaacattttgttatttatattcttctgtcatatcaaacttccatgtgtttctaatttccttaaatgaatcacagaaataatacaactacttattgagcacttaatgtgtaccaggcactgtgcttagatttcacatatattacctaatttagtcctcatagttcatactcttatactaatttgatatgtaagaaaacagaaaatgcaagtatcttgctcactgtaattatagaattataataatggaattatacagtatgtattctttttagattggcttctttcgctcaccagcgtacattggtctctgtcttttcatggtttgggagctgatttctttttggtgctgagtgatattccattttctggatataccacagtgtatttatccattcaactactgaaggacattgtggttgcttccacgtcttggcaattataaataaagctgctgcaaatacctgtgtgtaagactttgtttttaacttagctgggtaaacatcaagaagggcaattgctggatcattgccttgtgtcctcactgctcttaaagatcagatttgttcagctttttacttcttagaatggagtggcracttccaagctccttatgtatggaaccagaaaaagcagactgagttytcaactactttttggtacccattttttctgcctccttaccctgaatgagactgggctctttgaggatcatttcccctgtggcatatagctcaagggggagcttttgtttcaccttatgagcctcaaggtggggagatggtcttggttactttccttatttctcatcgaggtttgtgttaaagctttctgtttctttgggatcttccaatttataaggaaatagaaatcactttagttcagaataaattcttctaaaagttaaatataaagttctcaattataggaaaaaataattaaggtctctttgatttggcttttctaattgaattcgattctaggggaagaagtgttttgattttcctccttccttgattctaagataagatctactctgaaacatataatcagatttgatttgagggaggtaaatagtacagtcaattacattttgattatgagacatttgtttttagaaatattgggggggcaaaattgtgtcttagaattgaggaaattgaacacttatcaatctgttaagaaagatttgctttgcccagagccaacttaaaaagaaaactacaactaacagaaataactcaagaataaatgtggagttgagaactagagaaacacattacacaggagcaatgttgaattggaatcagaaattatttttttcttggccaaatgataccctttatttgcagtgtttactttgatggagatcacccagttagtgtagctatggttcacattgtaattggtcttaaaaaaaaaggaaacctaatcatttatctttaaattgcagttttcccacacatttgataagtttttaaactttcataaccatgggtaaagtttcttgaaatacaaaacagcttggttttaatgccacttgggaattgaattagaaagctttggtccataatttcagtgttaagtagtctaggaattgatggaagttaatttattatttatatatcccctgatatgttaaatatctcatagctgagttcagggtatacagcgtattgcttcacatagtcaatgttaagaatttaaaagataaagaaaaaatccaatgggaaaaagtattatcttaactgaaagtataattaggtatttgctaatttttaaagagtattaaaaaagcagaaaccatttagaaatttgatagtagatagtagtatgaggtgtacatactgtttagaataaagggagaaaccttcatcactgtttccaaaaaggaaagttactcaaaaaaaggggggtggggtggtggcaaatagtctagtccttaactaggaaaaccatgaaccacttttatttctttttttttgggacagagtcttgctctgtcaccctggctggagtgcagtggtgtcatctcagctcactgcagcctcttcctcctggttcaggcagttctcttgcttcagcctcctgagtagatgggattaccaggcatgtgccaccgggacagggtaatgtttttgtatttttaatagagacagggttttgccatgttgcccaggcctgtcttgaactcctgagctgaagtgatccctccgcctcggcctcccaaaattctgagattacaggcattagccaccacgcccaacccccacttttatttctgattttagtaatttgagtctctctcttttattctcaatctagtttatggtttgtcagttttgtttattcttttgaagaaccaacaattggttttgctgatttctgttctttttttgagacagagtctagctctgtcgccaggctggcgtgcagtagtgcgatcttggctcactgcaacctccgcctcccagattcaagcaattctcctgcctaagcctcctgagtagctgggattacaggcatgccctgccacgcccaactaatttttgtatttttagtagagacgtggtttcacattgttggccaggattatctcaatctcctgacctcatgatctgcccacctcagcttcccaaagtgctgggattacaggcatgagccaccgcacctggccgatttctattcttttggttttctttttcttttttttttttttttgagacagagtttcgctcttgttgcccaggctggagtgccaatgcacgatctcggctcactgcaacctccgcctcctgggttcaagcgattctcctgcctcagcctcccaagtagctgagattacaggcatgcgccaccacacccagctaattttgtatttttagtagagacggggttttaccatgttggtcaggctggtcttgaactcctgacctcaggtgatctaccctcctcagcctcccaaaatgctgggattacaggcgtgagccaccacaccctgccgtttctattcttaaaatctcttttatttatctccgctctaatctttgttttttcttgtttttgctagctttgagtttagtttgctcttctttttctagttccttatggtgtaaacataggttgtttttttaaaatcttcatttttatataagtgtttacaactataaatttccttctcagcactgctttttctgtattccgtaagtttcggcatgttgggtttttatttttattttgtctcagggtgtattctaatttcccttgtgatttctttgattcattggttgataagaatatgttgttagatttccaaatatttgtcagttttcctagtttccctccattactgatttttagttttgttttattataatgggaaaaaatgctttgtttgatttcacttctttaaaatttattaagacttgtttcttttagtcattcctgaaaaatgttttacatgtccttgagaaaagtgtgtagactgctgttgttggatgcagtgttttgtctatgtctgttagcttcagttgatttacagttttcttcatatcctgtatttccttgtttattttccgtctagttgttccgtccgttattgaaactggagtattgaagtctccaactattattatagaactgtctgtttctcccattaattctaccaatctttgcgttacataatttaaagttctgatgtttggtgtatgtttttaattgttacatcatcttggcaaagtgacccatttatcaacatttgaagtcctttgtctttgatgatagtttttgacttgagactattttgtctgatattagtgtggcttctctacctttctggttactatttgcatgaagtatctttttccaaccttttactttgaacctatgtgttttcttagatctacaatgtgtcttttacagatacgcagttgggtcatgtcattttatctattatgacattctgtgcctttaattgggagagtttaatcaatttacatataaatacttataaggaagaactaacttgccattttgttttctgtatgtcttttagctgttttgtccttcatttcttccattactgcctttgtttgtgtytacttgattttttgtagtgacacaatttgattcccttctctttttttttttggtatattttatagaaattttctttggttattatagggataatatataatatcctaaagttattacagtctcaattttttataccaatctaacttaaatcacattgaacaactacacgtccactgctctgtccctcttttatgttattgatgtcgtaaattacattattatacattatgtacctattaacacagattcatgattttttaatgcattcgcctttaaaaactcatagaaaatataaggtgaacttgcaaaccaaaattataataatactggtttttatatttgcccttgcatttacctttacgggatctttatatctttatattgctttgagttactgtctagagtccttctatttcaacytgaaggactaccttcagtatttcttgtagtacatgtgtagtgataatgaacctccctcaggttttgtttactggggaatgtctttatttctaccttgtttttaatggtcagttttgccagatacagaagttgcatttgacatttattttcttgtagcactttaaatgtatcattgcactgccttcaggcctccaaggtttctgccaaaaagttggcttatagtcttatttgaggattctgtctatgcagtgagttgcttctcttttgccactttcaagattctgtcttggcttttgacagtttgattgtaatcgtgttggtattggttgtgagtttttcttatttggagtttgttgagatccttggatttgtagattcatcagttacatcacctttgggaagttttttccttcatgtaatctctgttcatttctcttcctctgaaacatccattgagtatatattggtccaattgatttatttcataatctcttgggctctgtttaattttcttctttcttttttctttctgctcagatttgataatttctgttgtcttcagatttgctgagttttttcttttgcctactcagttctgctattgaacctatatagtgaaattttcaattattgtatttttcagctctacagtttgtttttataatttctctttattgatattctcattttgctcattattttcctgatttcccttcacttttttctttagctctttgggcatagttcagacagctgctttaaagtctgtctaataaatctaatatctgtatttcttcaggaatggtttctggaaatttttgttccttggaatgggctatgttttcctataccttgttgcatgccttgtgatgttttttgaaaactgagtatttgaaagagtcacctctcttcagttgcacactggctgtgtactactggggcatttctctgctgattagttgagcatgcccttaacgtagtgatcaccctaaggtgaaagcttaaggtcttcttttctgagcatttgtgttgcctaggcctgtgggtcgctttctcaattcctcctgtatgcatggctgcttttgaatgtcttaatttcccaaagagtctcacctggatactcagatggtctattgtatctacccactgtaatcttatgccccaaacatctattgtgtccccttgcagctttcataaatggtgcccattgcttctctcacccaatgaggtcccagttaggcaaaacaggaatcagttcttctggcagaccagagaggttaaaatgttacaagttaggtctgcactcttgccgctcatttgaagggaatgaattgggaattggtttgctgcctccttgagacccagataaactgcagaaggggtggracaagatcacagaaaaatgtcacaaaagttttgyatattttttttcttaattgggcatttgcttcattctgtagacctttgtttttcacaggtcctgtaaggttaattcaactaatttctggttgtttttggtgtttctgtgagggaatgaggctttgagctttttagtttgccgttttgctgatgccactcaataatactttttaaattatgaaaatagcagaatcatattgaaggaagtttacagcacccagaagtataacaaactaagaaaaatcatccgtattgtactatccacagagtagccactatttacattttggtgtgttacctttcagacttctatttttcttcctctstcttttccctttgtcctctgtcatcttgttcccccactcctcaccacaaataaaaaggggtaaaaaactaaaaaaaacctctaaacacaatttattgagtacagtgttaattttttaattagcatacttttgtttttaatttcccaaaacattattgtatatactaaaattatcatttatatttccaaaaagaaatattgtagatatttctgataacatccaaatgcttgggttttattctaatctttctgctttcaaggtataagagttaagaaagaatcgagtgtggccaacccatgttactttcctgtgacttagacatttttgcatttttacatctagtaaaaattggcacgctctcagtcaaaggggtaagcccagaccacgtggaaaggatcttacctcttttgagagctaatataaaaagaattcctcctagacataaaaatattgtgacatcagttacttaggctaagcatgcctattattctaagtgaattattaacaataaatactttaactctgtgccgtgttgtcataatatggtttataatttattttaaccttaggttatatataccttgaagccatttatattttcatatacttgtaatagttactatatactagactatgtatgttagactagacatggagagtcaaaaaagagtacgtgatcagagtacaaatcatgccctagcttcccttcatgtctacctcctacctcgagtagaagcaatataaaaagtaattacctaagattttttggattctggtttgggagaagcacccttatatttaggctgatgggtggctgaattagaaagtatgttttgtgatttagaattttatacggagatrttcattgtgattaattctttgtattagcagatttttgctttttatagttgcatgatttcttgttttgatcattcattattgtctattagtaaagaaaaactttatttcactcaagcagcgacatataatccaacttggattttttaataatgacatttttctttgggaataacattactgttaaaaatgtagattattagatacattacttttaatgaatataagtggtataattagaagactgaaaagaatccctggaaacatgagtctgatttgatagctaagcaactgaggacaagatacttattctctgtagcatattttctaatgtcatttcattgtctcaccaagaagtacttgcataaggcaagtttgattatagcatctgttgaatatttaagattgcgtaaagtgggtgagtttaacagatattttcccttatttcttttaggtgaatctggattgggaaagtcgacattaatcaactcattattcctcacagatttgtattctccagagtatccaggtccttctcatagaattaaaaagactgtacaggtatggatattagtattgttaattgataagctggaataatattaatacacacaaagcacatgttgtaacttttattaggcttccttagaggtaagatgcaaatttgtccttagccagtgtatgatggtaaatatgacttcataaaatttwaaaaaaaaagtacagttcatcagaagaattatcttggctagaacttcccaaatttgtctagaggactctcctagagatgacactgtgacatagtaaccaattcccctggagttgtgctatctagtatggtagtcatttgccacatgtttaaataaattaaaattagttaaattaaaaatgcaatttctcatttgctccagatacatttcaagtgctcaacagcccatgtggcaagtggctgccattttttgcagcacgtatatgaagattttcatcattgcagaaaattgcattagatggtgtagagaaaacgtgatttatagaaaagctattgtgatttaaatatagtgttctatattagtcagtgggataataccatatcatagttgaatggcaatagcgattctgtaagactcccaaggtatatgtgatctgatttactagttctcagtctttgctatgcattccaatcctcggtatcctgttaaatttagttcttctagtaggtctgagatgggctgcaatttctacatttctaacaagatcacaggtgatgctgatgctgctggatggtagatcacactttatagagcaaggggctagattctagatatgyactttttattaaatagtacagcagcctgtagccacatgtggctattaatctttgaaatgtaggtggtctgaattgtgatgttctgcaaatataaaatataccacagatgtctaagactgagcatggaaaaaaaaatctcaataattttttatattgattgtatactgcagtgataatattttggatgtatcaggttaaataaaattgattgatttcacctttttcctattttaaaagtggctactaagaaaattataaattatatgattgatatggtatttttgtttgtcagcactgctctaaactgttgattaaaaatattgttggtgagctctgcttatgtgatatrtaggacatgagcagagaggaggcaagtgaacagttctggctggagttggcttcattcaggcagtgatgcttttagctggatttgaagaagtggtagtgatcatcccagtgcacaggatggagggacagtctgtatattctgggcagtaactcatatatcaaactataagatgcagtttagtaactagatcccaaaggagtaattttgtgaagtgaatttcttatttctccttctcaatgtttctattttaggattttttttttttttggtaacctttatagggcttgagatttaaaattacctgcaaaattatgctctaaaaacttgttcctacatgcttatttattttgtgataaatattggaaattttaatcctaagcaagaaaatgaactttgaactttcttaatttgggtatctattaggaataccttaatttaggtatttatgaatttagatatgcaagataaaactaaccactacccaaattaatgtacagttcatttccagaaccctagtttcttctgtgtgctcactgtcattcagtattacamcccccaaagatacacaccttaactgactgctttctccatagataaatttgcctgttcttgaatgttacatacatatacttttttatatctgttttctttcagtgaagattacgtctgtattatttactcatgttgggtgtagttctttttcatcgtcatcgtatgctactccattgtgtgaatgtatcagtatatcatttattgtttattttagataagcctttgggtttcagttttttactaataggaacattcttgtgtatgtcttggtggacttaggcactcattgctgttgtgtgtgcataaagatataaaggtatttgagtctattttctttgatttctagtgaggttgaacatgtcttttgtactcattaactgttatttcatgaaagtgttttgataatattttctgtcattttattcctgatttataggagttttaaaaatctaactaataatcccctacattttagatattgcagacattttctccccaggcaagcatctgttaaagatgtgacatgccctcaatttattagaattcttacattggcctagcttcaaaataaattgtctaaacccattttaccttcctttaaaataacacttcaaaaatatcctcttctgttgtgaatatcttcccagaaactctctttatcttgaaaacaaaggggtaatggaggtaagaatatctctaggaggatttttaagacagaagcctgtgcaccactgttaaatatcttttctttaccaaaaggaagacctgtaacatttgagaaccagattgatccttactagaatcctgtagaagtcctctttcctgattgaaccatggaggtgtattcttttatatactggaaaccagttgaagatcatctaaactcttttgcccacttactcaggaaagaacatgccatattacagacagggtcagagtcattcaagaagcctgaatgtagttagaaaatgagaatgtaatctttttgatagttggctggctccttaccaagcccagtagtctagcagatgatctgcccttggaagctaataaactctcacagtagaggggagtggtcaccagtattgtatctcagtccagacatattagactggtaaacatacaatcctgagtttcagaagacaaacgtttatgaaaatggggagaaaaactgtctcctattatgtggctgaataaggagcaagatattaataaagaccatgatctcatattctcatccctgggcattatctatttataagagacttgtatcttaaaggagatattcattcacattcacagtcttggaaggaatgggaagctgtgtacactgaacagagagctgatttttagcctcctgtgtgtaaaatagcagttctgattcaagtgaagttttcagtattgatagaagctcattaagattaattcttaacctcttatcttggacctcaggaccctgagttatatctgtgcatttccagatgcgagctgacaccagtcctggaattctttataccagtgcttctcaaacttgagcgcacatcacaatcacctggaaggcttgtcgaaacacagattgctgagtccctttcttcatggtttgctatatagcaggtttgaggcagggcccaactaatttgtatttctatttagttctcagaatgtattactgccagtctgggtactacattttgagaacaactgctctgctgcaaactggttttatcctgtgtctgtcagggtgaaaggaggagagggaagtgttttaccttagttctttcagaatgtttcaagtggaatgaaatggtaccatgttacctccattttttacttatatatatatttttccaaaagattgatgaaaatgaagtgaaaaaaattgaacatttgagctctacttcatgtttcagtatcaaatatagatacccagattaacaaaattttttggaaaaatattgcttacaatgttgtatgtatgttaacagttaaccgttattttataattttgtaccatttgaaaatttttatatttatttatttatttttgagatggagccctgctctttcacccagctggagtatagtggcgcgatctcggttcactacaacctccacctccaaagttcaagtgtttctcctgcctcagcctcctgagtacctgggattataggcgtgtgccaccacgcctggctaatttttgtatttttagtagagatggggttttgccttgttggccaggctggtctcgaactcctgacctcacgtgatccgcccgcctcggcctcccaaagtgccgggattacaggcgtgagccaccacgcctggcctgcatttgaaaatttttaaatcatacttcatgtcactgaaagggtatcatctgtcttttcttgggaagaaattatcctttcttctgagattgaagtccattttaattttctcttaatgtattaagataattcttttgtgcaatgacactgttagattttttaaagttcttagttggaaactacgctgctcccctttgaaactttttattggtccatgaagtgttttttttttttctttccgagatggagtcttgctctgttgcccaggctggagtgcagtggtgtgatctcaagcttactgcaacctctgcttcctgggctcaagcaattctcctgccttagcctcccgggtagctgggattacaggcgcgtactacacctggctaatttttgtatttttagtagagatggggtttcaccatgttggccaggctggtctcgaactcccgacctcaactgatccttccacctcagcctccgaaagcgctgggattacaggtgtgagccaccgcacccagctggtccctgaagttttgtaaatcaaactctgtagatgaagtgggtgcaaaattttgaaagtgagaaaaggtgaaagcagtatgtacttctctggggtaacatacttgatagactccttgaaaaattttcacagagccctatcaggagagtctcctgttgacarctggtccagttttgatagtttttgagccattcacataacatatttgaatgcttgtcttaaactaagttttggggctacaatgatgatagacaaaaagttctcaaagatctcacaattgtgggaaaaatatggacaaacaattatgacttagtgagaaagatgcttttgtaaggtgctgtagaggtgaccttggcaaggtaaattttaatgaagtggtagcaagatggcagtgggttgagaagtgagtggtgagtcagtgaagatgggtgatggctattaaggaagggatgaaaagggatacctaggagtgagtatagaggactcagagagtggtttgatgatttccaaaagagacctgagaatggttatatcctgtggcaagtcattctctaagaaatgagagattgacgatagaggggaaatagtgtaaacggttgtcaagatgaatctaaaatggaaattaatcagttccctagaacatattgagaaattagctttaggaaaaagatatatttcacacacactgtaccatggaaggtacagtgctgattcagacagactgggaatggtctcatttttaagtggagatatgaggtacttcactgagcattgtgacagacatgggcttgggaagagcctactgggaaatgggagaggcatgagactaaggagcacataagaggaatattagcagggaaattcttgttgaggttgaaagtcatgaattttatggtataggaatagaaagatgggttaatccagagtgggatttgagttggaaagggaaagaaataaaggttttgggaaggaggttgctaatagaaaatgagaggggcaagggatttgaggtctcagygtaaggagacagggatatgagaggtagagaggttcagaatagaaggccaagttagagttttgggatcaactttcttartaaagtagttctgggtcttgatgagaaggaggtattctttaagcataactgttttactattggtcacttcctctttcattttcttgtggaacacgatgaaacatgtaagatgatatttgtcttttgagccagtaaataagcaaaatagatagtttttgtgtttgagctaagtggagtatctcaggccattccaatgtcttcagagttttggctgtaatgctacctcttgagcaagtgaaggtagaggtaggctcttgacagaaaattttaaccctctcttcaaaatgttatgttcttaattaaataacattttttatttaccttaataagtggcatgtaaacattaagttaggttagtttatatgacactgtataataaacattgtttgactttttttcctcagatggtaaaactgaaaactcagtatactggaactcttgtatactgtatacactcagtattagaaaatgagtaccttggatttctggaatctcagatgccaaaagaggtctcaatagatgaattatacatagatgatacatggacgatagctttagttttatttatttttcagggaaaaacagttgaaaatgcccttgattcattcttttggtattaaatgatgcagctaatcttagagaaccctgagtgatgccataaagatgttgatgtgacctgcttaaggaaagtgcgtgggaaagtggccatttggaatagatttgttagaaaagtttgaaattcttggacttcaactaatttgttttccatggatcccatgaggatacttgtaaaagcagatgataggatacagtcggatcctgtgartggcactagtttagttgtgttttctggatctcttccatatgtcgctgacttctttgtatttgaccgtgtatggatacacagaattttgtaggccagagaagaaaagaagctttataaacattccttaaagtgtgtaaaatacaaatcttcatttgtcttagcaagtcaataagtaattaagttgttgaactgattttttttaaaaaacagggaaatatcttaaaatttaagctgttaagttaaaatgtgtaattggtatacagcatattactgaaggtagaatgggcttcgtttggtaataaaggaaccagaaatagtttgaagtaaaattgggagatgattcatgtagatttactatattgttgtatcactttctagtgtgtagtactatgttatttaaaagagtaagtaggtaaaggagtggtatgattactttggatatttctgcttcagccacagttaccatgaataaatgatctgtctttataaaggagatggaagtgaattcaagatattgagatgttagatttgactgggttgtcctttggctagaagatcaccagataaaatgtaaacctcctaaactagatgagatgataccattaaacattttttttggcccagcactttgggaggctgaaatgggaagatcgcttgaacccaggagtgaggctgcagtaagctataatctgccatgcactccagcctgagcaacagagtgagaccctgactaaaaaaaaaaaaaaaaaaaaatgtttttcctttggttctcatgatctcacactgatgaatctgattgttttctctgagttattttgcctctctcatgttattagggtaacctgataatagacatgttatcttagttgtgtggtatgtgacagtgatctcctaaatgatgtgcatcaatcattgatactgaggatgatcagaaaatattacaactgttattgatgtttacttttttaatctacagattaatgataatgcatattaatacttaatattcagattgccaatagtatatatttggtggataaatatcttttggatctgcaaaattttcacttgatagtttatatcaggatcaaagcagtttaaagaacattaaaagataagaatttggcatctcatttctctaaaagataagtcatgtgtgtccacatctcaggcaatttttttcagttttaataagttttattcctcataataaaatttttttaacagaaaactcttgattgctgtagacctctgctgtgtattcggtagtcactagccatatgtggctatttaagttaattcaaattaaataaaattaaatatcagctcctcatttgcagtagtcagatttcaaggactaagtagccacatggacaagtggaaggtggtgttcagttgctgctcataatagttgataccctaggatttggagatgcagtgtggatacacaacaattccatcatctcagaaagtgttattggatagtgtggctacagacttttcttgctcagcaatcttagtctccgcatgttagtctcttcatgcatcaggtagcatctataaaacatgccaaaaggaagtaggctatctctaaaagtgtcccaaactttttgtcttgtaaattagcttatcagcatacttggagcctctagccttaataaggacttgttatccttattaaatgtgttatcaggagaaagcctgtctttttctggaggaattattcccttttcatttgaatccgtgtttgctttatcttgggttcctgaaaactgatattttgcatttaacagcagcatatgcccaggatgaatgataatacatcttctgatacagagcttgagattacagaatgtcttaaattgttccaggaactgttgttatcatttaagtccaataatcagttagtaaggtttcaccctaccagaatacacttttttttaaaataaaaactgtctggacttttgctgattacattgtccagaatgtggagtatcacatttgagaaaaggattggatcctagccataacataaatacaagggtaatacatccatgctgagaaagattaaggaatgatagtaagtttatttgagtgagtggttggggccaaacttgatagagaatagtccaggaagacatttactgtaaatggtagattagatgttcttctctgattaattacatttgaactctgtgaattattaaatcactcaaactgcttatttgtattattagatgcacatttaagttatataagtattacatgtctttagtggtgatcactattttatcagttcctctgtctgtctttataccaagtatgagtcataaacccagtatgaatttgccaagagattggcagactatttgtatatatgcttttctttcaaataatctggatttccaatgcccgctatcatcaattctaaaggtaatgtggtagtaggtagatttagtttgctaacagtttcccagttggttttgataaactcgaacgtccctaccatcaccccttgtaggaaatcactgatgtaatgtatgatattaacatctgcaccaattactcttacaggtggaacaatccaaagttttaatcaaagaaggtggtgttcagttgctgctcacaatagttgataccccaggatttggagatgcagtggataatagtaattggtaagaagggtttgtcctcacaactttgcagtgcatttggggtactggggtggttaaactttttcttcttaacattttaaaacttctcatcttagcaaaggtcaccaaacttcaagcaacatgacttgggtttgtataccaactttgccacttatctgacaaagttgtttaacttctttgaacccatttacttttctataaaatggagataatacctatcataaaattgtttttaagacatattctaaaataacataggtraatagaagaattctcattattgtaagaaatttaaaactgttcactttaattttatccatttgtataaattctatctcaatcctaatttaaacctgatatttagactttcagtttttctgtaagtcctaagtgaagaaaacaactatgaaattttagtctgaagtaattatcttagtattttataaataatacttttatttttgtttgaattcacattgtttttgaggtaattttctgtcaactcttaaaactcccaagttcaccatgaagtttttttattatttaaagtaatctctcatttgaaattttaaactgcatataattgttttcatattatgaagtgtgttattaatacacttattagtgcaaataatatgctaatatttagctgtgtttygacagtaaatagtttattttctttcatttggaaagttttgaataatgaatatttattcaacataatttatatttttgartatatagaataacttgacatatcttctactggtaaattcattttgcccatttgaaaatactgattattgtcctttaacagtcatcagttaattcatatgtagaattgcagcttgttttgtttatttgcgttctatagctggcagcctgttatcgactacattgatagtaaatttgaggactacctaaatgcagaatcacgagtgaacagacgtcagatgcctgataacagggtgcagtgttgtttatacttcattgctccttcaggacatgggtcagtaccttgatacttctgattccttttttgttgttgttgcttactgttacctttatgtgcatactttagtaatctttaagtttgtgaagtacacacaactatagccattatgaagtactaaatttcatgtagaaatgtcttagttgaaaagccattttaagtcctatataagcyarcagtgattttactccttagttcttcattcataaggattttccctgcttcatgaaataaacagtgttgccaccatggtttgaggtctcaatgtggcaaatttagctttcatgttgaccactctgctactaatagaaataccaaataaagagaagcagccataccagttagacatattcaaaataaatccaaagatgctatttattataagtttcatagaaatgattatcaaaaacacttgcatgccartgttttcttgtgccatttctttctacaataaatctatttggcttctgtttcaccttagctgtcatagacgtgttgttcaggtatcatattgtcagtactaatcttttgtttattaggacttaagacctaagaatctagacattaatctaatctgattgttctgtttgttatagttagcctgtactccctttttttgttttttgtacttctgctgtcattttgagtacatatatgtgtyattgacaactgcagaattttccarttattcttcctcagtcttttcctttgggtaagtaactcagtatatataattcagccacctgatgattataactccaccatctctccaccaaaagaactgtagtagcatcaggctaaatagcattaagttatctaacactcacattacagtagtgtaaaccaattccttcaagtatacctttctcttctatttttggcttcttgctctcttttacttttttatagataggtcaatgcccattatcactctagatggataagggagccttaattatatacttatatgtttgcactgccagattgtagtggagtaaagatgtttcttcttttatgtctaatattcttttacagtactctcagtttacatgtttaaatcactaaactgactctgacttaaaaggctcaaaaaaagtaatctcaaaaatacaacatattatataaccttttatgagtatttgtgtagctacttgaatttgtatttttaagtcattctcgtttaacttgtcagggctttttcctttaagccagcagagtgaaatcttaacctgcatttaagtcaataaaacttgtcagcttataaccaattttattattttagatcttctggactctctccaagtttagtaattctcatgaagtcacattccttccatccccttggggaaaattttatttcctaaaattgcatgggaaatgagagcttttttaaaagaacaaatttttatattcaaatgatatgtagtggctttgtgccatttcttatttgtcacaaggggtaagatgtttaaaattgctatttcttatatataaaaatgtacctttgaacaatttctcagtttatttttagaaatggagcaaagttttgccctttggtacatgatattgtggattaagtgaaggaatatgacacagaattttatgtatagagttccagatatcctgctcactacagactgaaattccatgcagtctaatagatgaatcagagcgtttccgtcttgtctgggtagtccctgggttccctttttggagggatttgtttttagataattataaattggtccaacagtgtactttcagtgcctcctacctccctctaccaagtatgaactgcatgcatggctaatgtatgatttcagctattattgcttcatttgcattgttcagtattttgtaattgttattaaaataaaaaactgacttggaacatgaattttaaaatggtgttttatccttctagtattgattaccacttttagaaaaattggtgtcatccagtgagttttatacagaaggattttttctcttatacatacatacatacatacatacaaaaaaaatttgtcatttgccctgtggttgttcattatgctgtagactttgaggttaaatagtcttttctctctagtatgggtttatcttctagaaacgataaaggattttctgttgcttaaaaacaagatttaaaaactaaatttgttgatgaaaagaccagccaatataaaactaaatggacagaggaaaaaattcaaccagaatgtaatatacatgtgaactaaatgttttctgttgctgacrttttgtaggcttctgaaatttaatgggacttttacaaggtttaccttttttcctaaagtttaatttttaaactgacttaaatgttytttgaccctttggttatatttaagaagttgacttccctaatttccttgtyatgtttatttttaaatatctttctttctaraagttgggatattataataaatactcagcaagtattgttttgcatttaaatataaaatcttgttatttggattttaatastttatattaaatgccyttaagatttattaaaattttggattaactgaactctgcttttttgtcactggattgataagcaggcttatatctgacataacagcttaataaggtagtggcagtttaaatttgtcatgaatatgaattgaaaaaccataacaatttagaaatctgagattgaatatttcatggcatttatatttagtgttttatataatgattaatgaaaagaagcaaaacttaaaattttttttcaaaaatggataggttcaggccagatgcaatggcttacgcctgtaatcccagcactttggggaccaaggcaggaggaccattgcttgaggccacagactaggcaacatagtgagatcccatctctacaaaaaattaaaaagttagttgaggctgggcgcagtggctcacacctgtaattctagcactttgagaggctgaggcaggtggatcacctgaggtcaggagttcaagaccagcctggccaacatggtgaaacctcgtctctactaaaaatacaaaaattagccaggcttggtggtggatgcctgtaatcccagctactcaggaggctgaggcaggagaattgcttgaacccgggaggcggagattgcagtgagccaagattgtgccactgcactccagactgagcaataagagtgaaactaaaaaaagaaaaaaaaattagctgggcctgggggtgcactctgtagtcctagctacccaggagtcaaagtggaagaattggaggctatggtgagctatgactacaccactgcactccagcctgggtgacagagcaagaccctgtcaaaaaaataaataaataaaaatggataggttcttttagttaacactagtgaggcaagaacacagtttacagataatataaacagggttattccatctacacacacttttttcgttgtgctccctattctctgaatgccagtgtcaattttcaggggatttaagacaaggagaattagaataggaggcagctrtcttaattctccatgtttgctttctccccctcactgtctctgtctttctgcctgtcagccttactactacagtaaagtatatacagtaatctttgttagtaaaaaggactggactatcttattagtcttagggccctaatccccccagttttaatatatatgtttctctttctttattttaaaatgtcagtcaattcaattattagtatgtcaataaaattattaacagaatgagacctttatttcatttttctcatgtttttataaaagttaaagaataccactttagaatggtagtcctttgcaaaatatttctagtatcttcatttattcttgtgaaacattcaattttagtccacaatatattccagatttgaggacttcggttctcatttagaattactaaaggacataacgaaaatcacagcagcttactttttttgtcaacaaatatttgggcaccttcttgagtgttagataccacgctgggtgctgaggatacagataaattgagataaggccctcgctgtagagggtatttcagtgagaagatgggagaaacaaatacagatgctcctcaacttgggacagggttacctgttgaagttgaagatacgtttaatagcgtagcctacatttgggcaaaatcatctaacataaaacctattttgtaataatgtgttgaatatctcatgtaatttattgaatactgtactgaaagtaaaaagcagaatggttgtatggtttctattctatgcgtattgcttgcacactatcagaaagttgaaaaattgttaagtggaaccatagttagtgaggacccatctgtatgcaggcaggcagttatggtacagcacactaagtgttgtcagcacatagaaatatgcctagtctcaaggttagagaaggattcccagtggaaattggatcataagccagtgtcctaaaggatgaataggaattagccaggccaaggagaaggaggatgagaatggaggagggtgttccagctaaggtagtagcctgtggccagatgtcaaagtatgatgctttcaaggaattgtaagaaattcagaaaggctggcacattggaagtaggaggcgaaagaaaggccaggaatgctaagagatgaggttagcttgagaatctatgtcttcacaagctttgtgggccattctagttaaggcatctggcctttagtaagatttttggtyaggtcataactccataagatttggatttagaaagaccactctgacttcagtatggatgattcatgttatagttattcattccaaaggacttggtggcctagactaaagtaatggaaatggagatatacatacatcatgcatacacacatctatacacatactatatataggaataggattagaggaggggaggaatcctaggtttcacacttgagtaatggggaagattgtaatgccattcactgagataggaagcgtagaagagggaaaatgggggttcagrtgagcttttgattttaaggagcccatggaacacccaggtagcatatccaytgggtaaacacaaacctggaacttaacagtgagatatgagctgtctatgaagatttggaagtcagttgaccaattgaagataattgaaatctattgtagtcataataattgtactgaatgtagagtaagaagagaaagcctggtagggaattctaaagaatgtacttcttaagggactagcttactaagaggatcctgaaaagtatcctaaggaagaagagcttgtgagagaataagtaatggtaagcaccatgatagaagtatttagtcaccttcttgaaagtacagaggcaaactggaggcagcagccagattgtaatgaataaaagggatgttgaagattatcttgtgagcatcttgtcagagaaagatagttggtagcaagaactgaatgtggagttggaagaggactaccatttttcatttttaaaaaatcctccagcctgggcaacctggcgagacattgtgtctacaaaaaatacaaaaattaggcaggcatggtggtgtgcacctgtagtcccagctactcaggaggctgagatgggaggatctgagcctgggaggtgggttgcagtgagctgagattacaccactgcactccacccagggcaacagagtgagaccctgtcttaaaaaattaaataaaaaaaaaaaaattaaaaaccttgtaaattttgagtaataaatatagagataattctaggaaattctattaggagcctttctggtttttccaattcctctttagggccaaaaccctgtgaccagggttcaagggcaggagtcaaagccttagccactccaatgcttcttgaagtcctgttctacctaacttttgctggcctaatacatcttcagagtgtttctgataagtaagtaaagtagttacattgtatttaactagcattggggatgtgaagaatcttgttctcccaaactgakcaattcagtcaaattaaatactgtgtatttcagacttaaaccattggatattgagtttatgaagcgtttgcatgaaaaagtgaatatcatcccacttattgccaaagcagacacactcacaccagaggaatgccaacagtttaaaaaacaggtgagcaggatgtgttaacccaggtttcttataccrttctcataatttgcagtttttactatttttagtataatgtgttgcaatccattcctcttactgctttactatattgtcatttatactgtattagaaataactcttcaatcttctgcctttgtcagtttttaaatatggctgttttaagtgttctstaataacacccccacacagacaatttctccccatactctttagaattattttcttttttcttttytcttttcttttctttttttttcttttcttttttttttttttttttttgaattattttcttagaatgaattcccaggaagtggattattctttcaaaggctatgattgtttttatgggtctttatctccccactccccattttgtcatggtgctttcccaataaaacaaatttgtacatctgtttcactgtgactttgccagcattgttatttttattttgaaaacttttttggaatgaagtggtaaccaatcatttctttgtcttttccttttattttcccgaaaggctgaacattttaaaaacaaagtcatttttttccccctttttgtaaacatctgctcaaatcctttgtctttttgaccagtagtacttggtattacccgtatttattgatatgggttctttttattctggatatttagttctctctcattttcacaatattttttctgttttctcttttgctgcttatttttgttttcagtgcactaattttgttttcagtgcactttacgggatatttatagtttaagttattgttcaaacctatgaccctaagattaagagtctcatgctgtatgactgagctagctggaaggccactaaactgtttttctagactcacgtctagttgtctcaataatattgagttacacagtcacacatatttctaatttaattgtgtttggttcgttatatattacattttatgaaatgtaaggtcaattctggaacctttctctattccagtagtccaaaggccagtagtatattgtttaaaccacagcagctttatataatatttaaaagtagattgtaattatctctattgtccatatagtcctattgtaacaaaatactttgtttttcacctttttcaatatgaatttcagaataccttgaaacctgttataaaaagcctgttaaaatttgctttgaagttgtgctaaattcatactaattttcagaaagttttagtacattgtttttactgtatctagtatttttgtgttttacacttacccattcccatttttgttttgtaatgtgctatttctaagtttcaaacactatcatataatacatttctttttgtttattatgtgtttcgatttggatttttactgataaaggtaaaaaagatgaatatgaagtgacctcttctttcaaattggtcacatcctggtggttgtactcaggtcattttaatatacaacctctgactaaaaccattgcttttagagctagctactattactcatttttctcgtcatcatgtatttgtcaattccttgtttattctttttttttttttaaatataggtacgtaccctaattgtaaaagaagtgtggtcctattttttttcagtgacaattttacttctgtttacttctgtctactatagtaaccatgtaacacaatttgttcagggtccttttatagctgctgggaacctttgccaagaaagttgcaccaaaatataagtatagacagggaagctaggtttaggtatattagccattggtttgttatgggttcaaataaggataggtagttgaaaattatttgratgtctgtattctgtttagaattggagtgattttgaacatgataatttaatttgaactaggtcatttctgatgttaataataagttgtcttctctaggtttctgcattctccttattaattcttgagcttcttaatttctaggatgtgttttctccctgtgtccttccctaatcttacacctgttgctcctcaatttgtgtgtatgcacatgtacatgtaaggatttttctgatgaatgttcagggagcagtgctgtacttagttttaccttacttttgccagattctactaaaaattttacgtgagtttagccctgtttattcaactaaataagatacttgggaatttatatctaaaggaagaatctcagtcattgtaaataaatgacctwaagtcattattgtggaaatcaatcagagaaatccctttctggagttttacatcctttttggaactcttttggtatgacagctatatgactttaacacttcggaagtaattggatttggtgtttatatatcaacttcatagttaaaaaaaaaaaaaagactagcgtagtactttaattttagattacaactttgcatcattaaaaaacagtaaaggatctggaaccaaggacccatataggaatcgaagaggcatgtaatgaacataagactaatatactaattatgtatggtgctcttttgctgactacttcttccattttagataatgaaagaaatccaagaacataaaattaaaatatacgaatttccagaaacagatgatgaagaagaaaataaacttgttaaaaagataaaggtaggttcatccctgtacacacrctaaagtaatctgaggccttaaaaacatactacagcgtccacaggaaagatcaaaagtatcagtgttttaagtagttggcttacaaaatacctagggagatttaatgttgaattcaactttatagttaactttgaagattagctagtatatataataaggaattgtataaactactgaggtgaataacacaattcttatttcaaagtgtttttaattaactggctttcatattatgtaatttttttctcttaaaaaacaagtgatgagaaaggagagaattcgttctgttatgttttaattgccagacaaaaatgtatttattttgtctctataaaagccaaccaaaattacagctagataggaggagtaagttctagcgttctgtagcattgtagggtggctgtagttaacagtaatttagtctatattttcagatagctagaagaggattatgaatgttcccaatacagaaaaataagtttgaattgataaatatgctaattaccctaattcaatcattacatatttgtataaagttatcagaataccatactgtaccccacaaatgtgtacaattatgtttcaattaaaaacaataaaaaccaaccaaaaattcacatcaacatattttctgtattttatcatggttttctatgtactttggccctaaaaatggtatactgaataatggcattatgtaggcaaatatcttggaataatgaaattcttatacattgcctgtgaagaatttctgcagttgtaaatagctgcttaggtatttctgggagccacagaattgtgaagggctgaacatggatgaacacaaatccagtcaccaggatttgaatttccaaagttagagcttaacaaatatactattacctggtttaggtactgttatagttggtttgtgatcaagtaggcaagctagtcattagccccccgctttttttcccccaaatgccaatatagtttttaccttttatccccccccaggtatgggacaactttctgtagtgatttttagtaaataatttgaccagtatatgcttgaatattcttaacattaaagagaaaatttaattttatttattgtttaccttggtggcaataccatgtgatggcagtttactaaatatttgttaaatggcctataaaaactaatgcagaaactatcgaaagtaaattttttttttttttggctaacctgttgagtaatgtaactttttttatttttgaatttgtgaggactacagagatgtatttgaacaagaatactttgttttataggaccgtttacctcttgctgtggtaggtagtaatactatcattgaagttaatggcaaaagggtcagaggaaggcagtatccttggggtgttgctgaaggtaagattttcttcagtgaatgactttctaaaatatctcaaaactgattaaaaatttgtatttatagtaartagtacagtatgcacactgtattgatatagtctagattttcaaggataatactgatttcaggttcttgtagtctcaattttctctttaagtacattggtatttttcaaacctgtatcctaccaagtcaggcaagtgtgtgttaagtcctaaagttgtagtataggttgaacattcttaaagagaaaattcaaaatgtgaattgctccaaaataaaacgttttgarcactgacatgctgctcaaaggaagcgctcactggagcattctgaattttggatttttggattaaggatgctcgaccagtaagtatagcacagatattccaaaattccaaaaaaattcaaaacacttctggtcccaagcatttcaaataagagatactcaacttkccccaccctggctggcatcctgcctcatcattaagtctatttctgttttcatatttgaaaacataactaaaattgaggggttctttacctggggcccaaagtttgctcccagggaatctaatgaaccacctggaatcaaacatttggagagaaggccagtcacttttatcggaacgtcagatggtcatggaccctcaagaatgattgaagaaatttgtaagcccagttaaaacatccacagtcttctttcctcagtgcaaaagttgccctttttgatatctcatatttagagtaaaaaaatttcgttaataagagatcctctttactagttttgtaaggagttttttgttttcttttttaacctgctatcttaaattattaagggttaagtaaggagttttaaataccaataaaatcttagttataacaccaagcctcagaagtacttcctcttggcaataggtttattgtattggtttaatctgatacttaatcttctgtattatagtaagctgaaaccaaaattgagatttgattgttttatctgtttgttgctattatttttgaacttcgtttttttttttaagagacaaggtcttgctatgttgcccaactggcctcagaatcctgagctcaaagtgatcctcccacatcatgctcctcccacatcacgtcactataagcacacaccactgcccctggtttattttgaacaattctttaatttttaggatattgtttcaggtaactgtccttattggcaattttcccatcagtgacctgtgtaccttgttcccagctctctctatcatgcccaggcaacttttacttgctgagctggggctttagaacttaccccttaaaaatacgcaccggagaaattgatttgcatctctcttttgtagtttacccctctactcccaagtaatattcctatttgtgatacattctttaaaaataaaagtaaagaacctgaaagttcttggctccctttttcattttggttaccttaagattttttctaaagtgattctcccttcactcacaccactgaattttttaaatgtattatagaataaatatattttttaccaataataagatttcccctttcagaatttcaaagttgtttctggagagttcatttgttaggtttacatatctatttctgaggattaaactacaataaggcaataatagagtacacttctctgtcatgccctcacattgagtgtactatgttagtgttaaatctcaaaaaaattgatctgttttgcatttcctcttcttgtttttacaccccaagttcctgtgaaatattttttgaaaagactaggtttagtggaaatataacatatgcggtctgcttttttcttacagttgaaaatggtgaacattgtgattttacaatcctaagaaatatgttgataaggtaagtgcaagcaatgatggaaatagcataagattttctttccctaagtaagagttggacagatttactttttgccttctataaatgtagctaatttaaatttatatcttcagtctagccatgaagtaaacactacatatagatgattctttctccaaggttttgaagtcatgagcaaaagttgcaaagtaatttgtctagggatacataggaaaattagtctctttatcattatactttgtgtcgagatttaatactgaaataactatggaaagtgaagtagaagaggctcttttttcttaatgtgaaaaccttgtgaaaactatataagagaaggctagtttttgagtccaaagctagaatttgaatgttaaaaggtgcacagcctrgtagctggtgagtagggcacattttatgtactggaacatagtgaataaaaccagtattcctaccaggtgagaaatccctaaattgtgtcttacacacctgctgaaagagaaggaaagcctatgggagcaggacatcgaggccatcctgattagaggaccaggactggtaaagaggatctcttactaatgaattagaaaagcagcagcagagaggaaatcatgaagaaaaagtgtaataggactagagatgttagtagacaaggarcagaaagggcatcaaaatgatcctcagtattttcatgttgagacacattcattcccctccctacctgactccgcatttcccacttttctctcttgcttctctacacctttaccacatactctctttaaccttcagttttagatgtctgtctttagttgatatctattaattttcatacctctacccactttcccaaaacataagaatctcttttgctgtgtaaagaaaggtagttacataaatatggataatagttggaaatcatggaataacaagaggtcattctcaaggtgagaagtgagggggaaaatttaagacagtcaaactgctacctcaagaaatacaatagaggtgagagtgaattttgaaattaaataaatggcatgtaattgatctttattttcaaaggagcaggtgttcttggtaggaactacatgataggwttaattcagcagttgaggttgccaggcctcacttagtggagaagagcaaaagcacgagaaggtcatcttctgggttttgagaatacaacacttcaggctctattatgaaccattcccttcctcttccattcttaaggtgtgacttcaaaagaatacatattaataatataatctgctatgacagtatataagtagagaatgtttaataaatactaatttaccattgcattcctcttgtttttaaatcttctatggtacttgcctagtgcttgacacaatggcattctataactttttcttgtgtattttaaaagtatacaatcaataatttcctacatacctaaaacactgtagaggggaaagctagttactgagccagaggctactttgttgagatggagtctcactttcttgcccaggctggagtgcagtggcacgatcttggctcgctgcagcctccacccaggttcaagtaattctcctgcctcagcttcctgagtagctgggattataggcatgcaccactacacctgrctaatttttgtatttttagtagagacagggtttcaccgtgttggccaggctggtctcaaactcctgacctcaagtaaaccacctgcctcagcctcccacagtgctgggattacgggcttgagccaccacacccacccagcccagaggctactttgaatattcgaaggttcacagcctggcggctagtgagggacctccctagtataagcattacagagcaaattgaccatgcctgcaggaagatttaatacagcagagcagcaagmcttttatgcctaaaaattctaaagttattattaaaaagatgtgtatttaatttagctcatgtctttaagacaaagccatctagtggatatttaataaatacttgaaggaaggaaataaaataccaataccaatattacagatgtctgtaaatcccaaataattgaaatcttgcaggtcaaaggaatagtgattgcttctaagaaagaggcaagttcaaagaagttctcttgctaattaagagaactaacttactccaggcaaaccaaggaagacgatggaaaggaggaaaactatacaaatattttcagggtgtggatatgggtgtttcagaaatcaaatggggaaagaaaacaaaaggagaacagaaagagttacgatatcagcaatgggaaatggaagagacaaattcctgaaactgtggggaaactattgctaattaacaaattattttgagaatggaggagtgggttgaatcataaaatgataaagtatatttaaatggaaataaagactttcataacctgaaaaaatcagaattatgtagtcgtatagaagactttagtgattttagtgaaaagaaaaattattcattatctaaaatattagatgacactaacaaaaataacttaacaattagtaaattcaccttacttttatcttacacattcatgcaaacatttcatgtaagttttcttccttaggacctttaacgatttttcagtgatgcagtgatgatatgtaatatataataaataaaatcaggccaggtgcagtggttcacacctgtaatcccagcattttggcaggcgaaggtgggagaattgcttgagctcaggagttcaagactggcctgggcaacatggtgaaacctcgtccctactaaaaatasaagaaatagtcgggcgtggtggtgcatgcctgtagtcccagctactcaggaggctgaggtgggaggatggtttgagcctgaaaggcagagattgtagtgagctgagatcgtaccactrcattccatccagcctgggcaacagagcgagaccctgtatcaaaaaaaaaaaaaaaaaaaaaacggaaaagaaaaattaaataaacattgttttatattggcataggtatttgttatttttctccacttagagaaactggttccaaaaagtgtttatcatatctcagcttcaatcttgagttatgaattctgttaaaattcctatcatctgctatctgcattgggatgcaaaaggtaatggcatgttccttgtaaaggggatcttacagttgaagagatatgatgtcacctgtgacgtatacttgtaccaaaaatgaatgacaaccaaggaggaaatggtcatggttggaatgctttgatgtcaaggctgggaaaaaggtttccaaagcaattaagtctttgacgagagattgacaaattagcatgaactgttcagtgtcagccgccagatatgccaggagtagggagctgcctgacttgcctgaagtggagtggtagaacttcagaagtaactattgtggctataagagaacgtgaatttattgagggacagagtctgggagatgagatttttggaaaaaccagacttaggactaaggggagtcaactatcagagaattgcatggaaatgtcagtacgaaatgaatcagagtaattgaatatcacattttgttcccaaagggggagattcaagaagctggattgtgaagtaacagtaaaggttctctggttgtaaggaatgataaaaacagtacaacaatacactttttttttctttttaagacggtctcttgctcatgtactcaggatggagtgcaatgcgtgatcttggctcactgcaacctccacttcctgggttcaagcgattctcctgcctcagcctcccaagtagctgggattataggtgcttgccaccacgcccaactgatttttgtatttttagtagagatggggttccaccatgttggccaggctggtctcgaacccctgagctcaggcaatctgcccgccccggcctctcaaagtgttgggattacaggtgtgagccagcgtgcccagccaacaatacacctttgtgtttgtctcccagaagggagttttagtaaagtggtgaagatgaatgatggcagatataggaagtttgagatagaatggatgatgagaagagagaggactgacaatacggtattgccacaccatgtatatccaagaacactacattggtaaaggatatccatagagcagctaaggatatcttcagtgtcttgaattattaaataatgatgacatcatctcatatgtattgtagacttatatatattgattttatatatgatagaaatgctgtaagcaaaaatttgtttaaccgaaataccactttcactagacagtttgaagaaacagaaaattactctaaaatttccttgtttgaaaacaacttgatatgtgatctgaaatttattattatgtattaataaaaactcatatattaccttagtaatattgctaaaaggcagtgtcttttagattttatgagcttcagtagtggccaatctgcactctgttgtctagtatttaaatagataatataaagatgaatactctttcatagaaaggtcatccttcagtaactgtttttggggatttataggtcttaaaatgtcactggaatctaaatttggtgtcaagttagcttattttttgttggtttactttgagtgtaaatgaaaacagatgaatgccaccttccttaacaatagtcttttgttcattttaaatctgaaatttttgttttggtaaaattttgaattcatattaaaactttttaagcttttttccccctagctattaatagaagcaaactcttgctgtttgtttatgacagaacacacatgcaggacttgaaagatgttactaataatgtccactatgagaactacagaagcagaaaacttgcagctgtgacttataatggagttgataacaacaagaataaagggcagctgactaagtaagtatatatttttttctccaaaaaggtattmtttctgtagtcaataatcatattgtttcattttcattaaatttcttctggctactcagtagaaaatttggataatgttctttatgcacagcagcataaatttatattgttatgctttgttaatagtagaagcttttttgaatgaaccattttgatagttttcacttacaaattatgtggaaacaaaggacaggctttaacaaaaggaatatttagatgaatttgttcttggttaccttctctattcctattccagggagtaaattagctggagtttcgttttcttcttttggttgttagagtggtgtaagtgactaccaagtgtgtagctttgccctgttgagcttatatctcaagctgtggtggtttcatgttgggktcgaaaaaagagatgtgtgaggaagctggtaaccatgtctgtgccctactttttaaaaatctgtcattattgaaaatcataattacatcatatgtcacttaacagtggggatacatttctgagaaatgtgtcattgggctattttgtcattttgtaaacatcatagagtatctacacaaacctagatggtagagccttctacacacctaggttatgtggtctagctattccttgcaggctataaacctatacagcatgttactgtactgaatgttatagacagttgtaacataatgtcaagtatttgtgtatctaaacatagaaaaggtgcagtaaaaatacagtgtaaaagattaaaaatggtatatctgtatagggcacttggtttgaatggagtttgcaggactggagattgattgctctggatgagtcagtgagtgtgcagtgagtgaacgtgaagacctaggacattactgtacactactgtggactttatgaacactgtacacttaggctatactaaatttattttttaaatttctcttcaataatcttactttgctgtaactttattttataataacttaaattttaaaaaactttttggttcttttgtagtaacacttagcttaaaacacaaacacattgaacagatgtagaaagatattatctttataatctttataagcttttttctattttaaaagttctttcttttttcatttatacctttttttgttgttgttaaaaacaaagacataaacttacacattagcctaggcctactcagggtcaagatcatcaagatgccactgggcagtaggaatctatgggccaccatcatatatgccatcccttgtttactgaaatgtcattatgcagtacatagctatattgcaaaaccattttaaataatgtgcatttgtagctaggtgttatctacaattagacgataatcctgaaggatcaactatataaatacgaaagacaagttctcaaaatagctatagtattttccatagtggttaacatgccttataatggaatagaaaaatgtcccttcttaaatatttaaaatacaagattctgtttgaggtaagcctcaatatgtgaacaaaaggaaggctttttatctcttttgagcaaaatgtttattgagtaactttggcacaaaaatgtaaggacccatcatagtgaatattgttcataaaatcctaattcactttaaacttatcattaacgatgcactttttaactcattaaaagaaacgcatacacaaagctactgataattttgtatgttaaagtactagtacatattttttgttaaatatatgtacttattcaatatattttttaaaacatttgttaagttgtagataaaaggaattatttatttgttcccatgtctcaaatataaggctttttaaagtagtgctgttggatgcagktaagataattcatggaaaaatagaaaactttacagtatcattaagtttctttctgcatatacaaaattctactgtgtggatacatgagttaaactatatcccaggtgaaaacataattagtagaattctactggaaatatatctcttaaagagaggaatcatgaccatactttgcctatgcaaataaaaaaagaaatgtttgcattgctaaaaagcaaattggcccaggagctagcataatattttattttatgttaataataaataggaattagactgttactacttcattgaataacgcatactgaacctgaaagaaatcgcttagaagttttatctattagttgtatctgacattgtcttgaaaatgttagcaatttcaaaaaatatttttgttaaatttttctttaaaagtcattaacaacttatggtgctttagctgatgtaaggtgcttttcctcatagctcagtacatatccatgaataactgaaaagaaagactaatgtttaaataagtgaagtaggtgtgagtttaggcttcttttaatgttctttttgtattgctctcatgtgactctatagcaacgtattctttgacagtggtagtggggaggggttgagagttgcaagaattttggaatggaaggtgaacctattgaaaatttatagttaaattgatctttggcaatgtatgtttcacaaagtgctaatcacactttggttttagaatataagctaaactttttaaagatgttagacattgaatagtaaaatacattcatgtgccacataatgatgtttcagtcaatgaccgactgcatatacaagatcccataatatcgtgtgtctataccatagagcctaagtgtgtagtaggttatactatctaaggttgtgtaagtacactatgttgttgaaccgatgacaagtgaatttctcagaatgtatccccgttgttaagcagtgcatgactgtgaatcaatttatcttatatttaattttctgaggtagttttgggcacactgtagagtctattgaaacatgaagtaaacattaaaaatacatgtgtagatgtctgaaaatgtgcctttctgttacgtcaatagccctagaacaattctatttcagagggacttaaaacaagaaatagattgtgtggtttaaatctgaagaatagctgaacttgtccagtcagctataatttgtctcaaggttagatctggagaagtggatgctgttcttagcagctatccagtaattacctgtttctgacaaagtatggagccatccaagtacttcttgcatccctgtatggagggtaatgggtggttgaaagccacagaaagggtaacctctcaaatcaaagaaaattcagcaagggtttgtaaaggaaaggggagaagagttggtcatatgcagattgctgatctcttaaaggaagtgtgatccccaataagaggagggccgtctttttttttttttttttctaaacttccttcttgaagttttgtctgcctcctttttccttgatcttccttgtaccctttacttaaaatcacattttattggtgactctttttcagaactgatgtctatcattggtaccaattgtgacaatagataccttgctccaagttggggcacacccttgtctctctttcccttatgttaatttatttttctgttatctatagccttctccatcagtcatcttgggaaaactttataagtgaatgactaaaaatacaagtttcaaaggcagattctcagaattcttgatacatgacagagttttcattgatctaaatagaaataaagacaatttgctgaaaatttcaagttgtttcaaaaaattaaacttagttatatcttttactctttattcaagtgtcctttcatgaaattataatgatagtagttggaagttttgtttatgtttggttttaatactctcacatggcaaaacaaaatgttggcaaccattattactcaaaatttttagaaatttttattgaactttgaaattatttaagtgaaattcctttggaaaattttgcacatagtgacctactaaccactggagcaaaagtatgtaaatctacttgcttaatttgttctttaggaaagaccacacacataatttaaatgaaacatgattgtcttttattatactccaaatgtgggtcatatgtaatgcagcaaagtagaacttgactaggtcatccttatgtggcatggtggctataattctcttattggtcacatgaagggatgtggcttgcaggaattttaaccttataaagacaaccctagaaggagctaaatcattgggggtttagtttcatattccggttatgttgtaatcattttctttttcttgttttactaggctttcttcatttctttgtctgggtttttaatttcactgataggtttataagctttactactatatgggggtgggtaagagtttcctattaaaaagcaggcaggcaataatacaacttaaatggtttttccagccatttaataaaaggttttacttggaaaaaaatagtaaatgtgaagataaaaagtgatctccctacattttctacattataagcacaattttttgtttcgattttctaaaaataaagatgactagaagtgaggtgttaatataaaaattaaaaatttgaaagatcatttttactggtgagagacttcaataattcattttaaatatgcatgaacattttttcacagtatttgagtatatttggtcagattatttttacaagactaaaaaacttacagtatcttaactgttaaataattgcaaatttcttttagaaacacacatttgcaggtttaaaactttcaagactttcagaagataattgcacagcatatttatttttatagtgatttagtgtaatgattatgaacataatttgggaaataaattagctttagcgaattttactgtaaattttttatttagggcacataccttaataatttgtgaaagctatgcatttgcctttaattgcagcttttagcatgctttactttaaatgtgccaaatcactaattttttttcctttaggtatgatacagttgaaggcatgtaaggcaggggattttaaatacttaaattttgaatttaaatgaagatatttttttcttcgagatggactcctgctctgtcagccaggctggagtacagtggcacgatcttggctcactgcaacctctgcctcctgggttcaagcaattctcctgtctcagcctcccaagtagctggaattacaggcgtgtgccaccacgcccggctaatttttgtatttttagtaaagatggagtttcaccatgttggccacgctggtttcaaactcctgactttgtgatctgcccgccttggcctcccaaactgctagcattacaggtgtgaaccaccgtgcccggcttaaaagatttgaaacatcattgcatgttttatccgcagtctcttattttcccccctagagttatttaaataataatttaggtggcaaaaatacttgctctttcccaaggataagataaacattttatagatgagttgtataagtaggaatagatatttctctctgatttctaatttaatatatttacaatcataattgttggaagttgcttaaatacacattcagttacttaaggttagcaatcacaaaattgtttttagattgtttcttttttagagactaaaaaagatttttggggtgttaggggacagtgggaattatagactctttgaaaatctaacaaaagctttggaccctttcaccggaagaatcctggcaaacacaaacacacatttggtatgctgtttcagggcagtcattgacactgtgtgtgctcaagagatcagaggcaactgtattaaaaacacctgccattaatatgaggagtatattattaagaagcatctcaacttttaacaaaaaaagatgatatttacacttgaaaatgtttttcagctgactccacttttaaaatgcaggttcttgttctaagttaatatgtctggttagtttcattttcagaacttttgattcattgtttaattggaaaaatatatgtcaggttagcatgtagaagttttcttttagtgaagaaatatccttgatttaaacaacattttattctaatttacgcaattgcgaaaacagatcatcttaattcatagcattatatcacatctttgttcttgcctttttgttaagaaaaactggtagccaatattctgtcctttttgttttgtttctaacattttctatctagctcttttgcctgcttccctgttagaaaagaaaattgctgtgatggtcagaaatatttagcctaataaggagaaaagtcaccataataagagtgtgtcaaatcagggttaaaatgactagccttaaagttacgggtgaaatccaaggtctggttttcgtttttaagccatgagttaattttttaaaaaaaattagcgtattacagtaaaatttacccatttaaaatataaacctcaatcaatggtcaaagcctgtttttatggaggcaaaacaagcatgctttattaacaaagccaaagaaggacctatctctttagtttgtcccagggtattgaataattttcagagattctcaaagcaaagagcccacttcctgctcctgggctgaaagcactaggtactttggcattctcttgtgtctctgtgtaagtatattagccttaacataaagcccacctgtaaatatatctcagtgtgaaaattttgaacacaattctacaaagagatttgagtccatggacttcaacgtcaacagagtgaacatttttttttttaatttaactatgcttatgtctatttttttggcatttaaaaataattattaacaaaatatttgcttctgattatctctgaagtatgtgtgtgtgttttaaatcactgaacatctttaaaacttaagacagtgaaatatttgagttaagtagaatgaattttcaagagcattgaagttatcataaggggcctagaaatattctgtatgcctaaatagtgctctaggtattgactagtagttgtttccaacgtatcagttcagttaccaaaataaataataatttttgtgttgttagtagctgtcttggaagagattgtaacacttgaaattctggtaaaactaaaaatattctacatatgttaacttcattactcattttctatttttcatggtaaaatgttgtttgaagaacaaaattaaattattttcttctaatgtttcattctgtgaatgtattttgggaatttttttcccattttccttctacagtttatttggtatgtcatccttaggtttgatatgcagtaggtttagagaacatctttgttttttagatttttttcataaataatcaagttttatatatgaaatatggaaagaagttctaggttataaatatattaatagtgacatatagcatctgatttgttttcatcagctgtttcatagttctgtattataatttttattcacagacatttaatgattacccttaatattcgtgacaggagccctctggcacaaatggaagaagaaagaagggagcatgtagctaaaatgaagaagatggagatggagatggagcaggtgtttgagatgaaggtcaaagaaaaagttcaaaaactgaaggactctgaagctgaggtaatcagtctaatatcccatctcttagcagacattgtgttcctttttaagtagtatcttcagtaaaatttatagataatataacctttttatacatattttttcaaaattaataccctagtgtaacaaaacggataaatttctagaagcaagcaccgtgtttataataaaataatacatacttcaatatgcaagtgcttggacgtagtatatkaggtaggacagtgtaatagaatacttataatgaattattagttataatgaacaagtttgagttgtgaaaaataaaattacaaaccattccatacaggtggcataagaacactaaagatgagagtttgggggtggatttatgcacacaaactgtgttaggataataataattgaccatatttatttgtgtatgagtgaaaaagagggaaataacctttattgaactaaagacatgcctggataaattccacacaattaaagaagagaaaattagggaatgtgatatttttgttaacaggttaggccttctttatttataatgtagtgtcaaggtagttcctggtgttacaacattgggcagggtaatgacaaarcatcccagaagacatayctactatcttgaaacccttctagatgttgagttatacatttagtttctattaatcaaaaagaccttggagacatttccttcaataggtggcaagaaagaaaagttggagaaaaagataaactgaacattaaaaatccatagagcagttagtttgatagatgtctgagaatagtagaaaaaaaactatgggtaatcccaaaataacagtggtttcagtatgaagttttcttcacataaatttgttataattaaaaattataaaatagcctgggcatggtggctcatgcctgtaaygccagcactttgggaggctgaggcacacagatcacttgagttcagaagttcgagactagcctggccaacatggtgaaacctcatctctattaaaaatacaaaaattagctggatgtgrtggtgagtgcctgtaatcccagctacttgggaggctgaggctggagaatcgcttgaacctgggaggcggaggttgcactgaactgagatcacgtcactgcactcccgcctgggcgacagatcaagactttgcctcaaaaaacaaacagacaaacaaaaagccctataaaataataaattattttaaaatatgtgagatgaggtccaggtgtggtggctcacatctgtaatcccagcagtttgggaggccaaagaagaaggattgcttgagtccaggagtttgagaccagcctgggcaacatggcaagacccaatccctataaaaaatttttaaaaatagttgggcatgatggcctgcacctatggtcccaactactcaggaggctgagacaggaagattacttgagcctgggagatagaggctgtagtgagccatgattgtgccactgcatcccagcctgggtgacagagctagaccttgtctcaaaattatatacatatatatatatggatgacagtaatataaaatagttttaaaacaatctttaatgataaaatttagtaagatccctgttttatgtggcttcactaatatttgtatctaagtgtatgaagaagagattcagatctctcgttatattcttacagttgatctcattgcttttgtaattaccgcataaaatatggaaaccttttttgactaaaggcataacaaaagtatgctaatccattgagtaaatagaatgcacggaatgagaaagtattaaataatttcgaggaaatgtttttattccacatcatttctcttacattattgggcttttcttgtaatttcttattaaaatctttcactgttgttatatttgttgtgagtttaatttagcaggggtatggaataattcctcctggtttcagacgctgagcactacaggattagcatccctggcactgccactaaatgctaatagcagtgccctcctatcatagggcaaaccaaaatgtgcatacacacacacccctaatcaaaagtcactgtcttagctattgctgttgtattataaatgaataattaaagttcttaacatgacattttggagattaatttatcagcatgttgtaaatatatgcattgagtctctacctcttcagtaattcacatataatctggaaaatctatatccaaaagggggaaaaaaacaggaataatcaagagtctactacattatctccacacttagattccattgagaatctaaaagtagtttaacttatatttgaggcagatgtattttaggacrtgttgctaaaagtaaatattacgaacaagtaattgtgaacctgtagccaaggaacyctttgggaattttaatgattactgtgaatggtgaagacagttttgaagaactattctttgaaggatggaatgttaacatttcaaggacctgtgaagagctctgggccaaggttcccaccagatactctaagccattagagaattaggcatgctcattctagattctttgtcttttatgaaaccacatctagagtgtatttaccaacatccctgtgataatgagtttgcaaatcatcatgtatatgatacatgatatatattgtgtaaatatacgtgtgaatacataaataggtaaagaaacccttttagccttgtttaatacagtctctccttaaatccattatgctggaaatacttgtttggggcacagctagcagcacagtacatcagccacagcaccaagcaactttcatttattgtgttgtctagtgcacaccacagccctacaaggtagatattattgcccatctctcctttatagataagaaggataaattaacttagtatgccagcatttgaacccagttaatttttaagttaagctagataggtccacagtcctgtttttcacaatttcagaatggaaaaaactctgaaaactgcaaaacctaacatgaactaagttttaatcctacatattgtgaatatttatatattttactgaaacaaataaaaagtaatgtgtttgattatacttgttgccccagatagcccaggaggtattttataaatatagtgtatactcctttctaagcggtgttgtcgttttaataactgaaaaatgttgaacttcaaaaggcatctgaccccatgggtttcttaagagtgagattgtgacctgtacctttatctacatgcagttaacacaaaagataattacttatatgtaacaagttaaagaatgatgaacactgtaarcctactacctggcttaaaaaaatagaatgttatcaactcatttgaagatgctgtgtgcctgtcccctattgtatccctctctctcattcccagaggtaactactattccgaattgtgtatatgtgactcttttcatttaaaaaaaataactagagacattttcttatgttcctactttctgacatktcttagtaacttgtttgctgtcatcaggaagatatcacctcagatttgattcatgtttgcttaagtgtgtcttaggtgattttgttttgtaggaattgcatgaaataattgaaataggaataaatctgaagtcacttcgggcttgcaaaaaaaaattgtatgcaaaattatagtaacatatataatatgtatataatatataatacatataatagttatatattaacattatgttaatgttaactcaccagtgtagtaaaatctgtaacagaacataattcctggataactgaaggttttgaatagtccttgggtatttggcatagaaggatttaatctgatttttaaaatttgttgacttttttttttttcagaaatggattgacttgcacctaaatgaaattacttatctaatgatctcttggacttaaagcactttgtttctgcagttacttcgcatgagtgtttactgcctctcagtcagcattctttacagtattaatacacagagaaggaaggaccagctgcattagaatcactgtaacttgttgaaaatccacatttccagacttaacacccagatattctaattcagtacgtctgagtgaggtccaggattctatatttttaacaaacatcccaggtgatttgcatgaagaccaatgtctgagaaccactgcttacaggaatcagagtactttgctggcatctttgagctcttagggtcctaaactacctgctttcttttcacttgtcttagctttctaaacttggaattaggaggcttattcaagtcctggttcttccactttctggctagcaatcttgggcaagtcacttaaattctgcaactgtttcctcatctgtacaatgagaacartgatgtgttcactgcccagcctccaacatatttgtgattaaagaaaaacgagataagatagtaattttccattataaagtactccacactgttaagtttgttgcttttttttttttcctgtttcccaagattattgtcttgggtcactggccttttgggtggcaggtcctaaaggaggaggagtccttgaccagagtacttccaggtagtactctgaatttacaacagggctattcaaatagtgctcatactccttatcattagggtgtctggatgaaacatacctctgcttctgatttcttaaatagttttgttttatatattgtgctatgatttagctccagcggcgccatgagcaaatgaaaaagaatttggaagcacagcacaaagaattggaggaaaaacgtcgtcagttcgaggatgagaaagcaaactgggaagctcaacaacgtattttagaacaacagaactcttcaaggtaactaatagcagattactaagaaatgtgtgtattaatgttttaaagaattgttttcctacttatttaaaaaacattagaataacacttaaaaagtcatcacccattatcatgcattccaaacacaayggtttycatrgataaatatttttatatggrtggatacagtctgtgtccattagcagtattttttcagtacatctttcatgacttaatattcataattatgatttagcaacttcataacattctccccagttaacttaccttcattggatttcttacctcctccccscagttgttggacataagggttgttttcaatttttggcacacaaagggaacattcttcaaaatctattacatatttaggggtatgttttaactgttgaattatgtttttacgataaaattcttaagacaaaatgttagatatttgatttccaatacaactaatcaattactttctcttaatttatacaaaattcaataatatttgtaccttggttttcttttccttaatagtttcacttaaaactgaaaagtggcattcctataaggattatatagtttatcctcattactaaacattttcagatttgacatttgttctactacactaccctactgttaacattttccccaaagaagaggaaaatagatttgtgaaagcaattgcacttcaaaatgcaaatgacagtgggggaaaaagaataccctgtttgctgccagttgatactttttagtttgtgctgtttcatttgggaagaattgttcttgtatattaaaatggagttttgccttatttttttactgcttatcctggagttttgtcaaatatttgattgtctaagaaaatgctattatagattaacattgtcttagctgtttacttctaaatcttttaatttttttcagtgaaaaagtagtatctgaaaatcccaacattgttgtaattgggttagctgttgttatcatgttgtctatcatgtttataaaatggttactcatcttgcttattttccttttatcctttagaaccttggaaaagaacaagaagaaagggaagatcttttaaactctctattgaccaccagttaacgtattagttgccaatatgccagcttggacatcagtgtttgttggatccgtttgaccaatttgcaccagttttatccataatgatggatttaacagcatgacaaaaattatttttttttttgttcttgatggagattaagatgccttgaattgtctagggtgttctgtacttagaaagtaagagctctaagtacctttcctacattttctttwtttattaaacagatatcttcagtttaatgcaagagaacattttactgttgtacaatcatgttctggtggtttgattgtttacaggatattccaaaataaaaggactctggaagattttcattgaggataaattgccataatatgatgcaaactgtgcttctctatgataattacaatacaaaggttccattcagtgcagcatatacaataatgtaatttagtctaacacagttgaccctattttttgacacttccattgtttaaaaatacacatggaaaaaaaaaaaccctatatgcttactgtgcacctagagcttttttataacaacgtctttttgtttgtttgttttggattctttaaatatatattattctcatttagtgccctctttagccagaatctcattactgcttcatttttgtaataacatttaatttagatatttyccatatattggcactgctaaaatagaatatagcatctttcatatggtaggaaccaacaaggaaactttcctttaactccctttttacactttatggtaagtagcagggggggaaatgcatttatagatcatttctaggcaaaattgtgaagctaatgaccaacctgtttctacctatatgcagtctctttattttactagaaatgggaatcatggcctcttgaagagaaaaaagtcaccattctgcatttagctgtattcatatattgcatttctgtattttttgtttgtattgtaaaaaattcacataataaacgatgttgtgatgtaatattgtgtgaggtcttaaatatcctacagtcgatgtacaagagtagagtatgtttgggaagaaacttttcagcttaagtttgcctcctctacaatgacatcttttatatgcttgtctcatttagaatgcatatgtgctgattttctaatttaagagataccatatctctctattcatttctatctctcatttgtatgcttatttttctgagaacattttttttttcccccagacagggtcttgcttcattgcccaggctggagtgcggtggcacaaacacgactygactgcagcctcaaccctctgggctcaagcagtcctcctgcctcagccccctgagtatctgggattgcaggcgtgcaccaccacgcctggctaatttttgtattttttgcagcctcccaaagttctgggattacaggcatgagccgtcatgcctggcctctgagaacagtttctgactcattcagattaggtatactctcaagtccctgraaactgaaattttttttaactgtaaagagggtagtgtcatttcttttcttaaggtcaagtgacatagattttaatgtaatgcataatttaggtaagaaattaattaatgtagcctagtttattatcttgaaatgttttaccctatttactttttaaaattaatgacctaagcggagggaataattataagtcaatagcagagagattgttgtttgggtgtttatttttttcagtttttgttttgagagattgggttaacacctctagccaaaattgtttggttttagggaggctaacaataacctactgaatttggaaaatgcaaaggtaaaaaatgtatatagactgcctgctgaactggttaagtactactgcttctgggaaatactatttcaaaattctatgtattataataataaatttgtaagacattcattattstaccatcctaatgaaaactttcagaagtctttctttatccatggcatgcccagggttttacctgaatctgatacaggatctatataactttactaggacttttgattgttgactccaggcttaggtatatcagaaggttctttttgccatttggcctgtggatgtctragaagatcattcacaatacatgtaaaattcaggtaggcctaaggaaaggccagcctgtagaaagcaaaatggcagtgtctgttctccactgttggaggcattatgtaatttaagtatcctgttagccactgtctttctgctaattaagtggggctgaacaagtaagcactaataataccagtgaaccacttgggcaccttgtgggtagagttttgctgccacctagtggaatgggatatcattgcttccatatcaggttcacaagcaagttaagtgggcacagtttatttctgtgtagctcaggctgtaatcttgaaagctgaggagatacccatgcctctcagactcattagctgggtgtcacattaccacctgcacattytgacccaccgcatcttaatatgttttgtcctcttggagaaactaggagtagaagtcaggatatggtaggtaagggggaaaaaggaaagacggcttgatagctatgaatgcatgaggagcgaaatgttgactcagttatctagatcatggtctccaaacctgatgctatttccttacaaaaatatttgttgagcatgtgtccataattatatgtattgaacaatgaaaatatgtgtcaacaaatgtactgctacactaatgtgaacattatggaacaaaatttgaaagagtgaaataaaaggtttacactttccccaagctccaatgaattattactttgcacgttggaggccatcgatctaggcagtatgtggatrgttaatagttattgttgaatcaccaaggaaggtcctagtgaagactgctgtggtgtcctacttgatctgaaaggaaaatttgccacaccagtaaatygaagtcctttytaataataagcttgcaaatgtaagcccttgtacttcatccagaattttacctgccccttttgtaataaaaacttcccataactgtcctgttccagatggtaacctaagtagttacatgtgttatttaatccttaatgataacaattgggtaagttatctcttaaggtaacttattaatacattatctaataaatgaataagttaaacatcttaaaccctgtttcctcatctgcaaaaggatgaggaaactgagggtttaagatgtttagtagcttattcaataggtggtaactggcagaacaagagtttgaactggtcttagttacaccagggcctgtgcttaaatattacgccttgcaagtacctggtctgctacactgccacatttctgaagcatgatcttctacagagttgttagcacagagcagatgctccctgattaagaggggcagctggccaccaggcagcctggagaagcagaaagcaccagacatgctaattgtctcagtttagaccccaactctgtgaattgggcatgtaacttctatgaatgttttctcagctataaaacagaccccatgccttccttgctggttkggagtgaggattacattgtgactgcacacgttaaggtgtccagacctcgagaatgtgacaatctgctggggtcatgacagaccaaaaagtatttcttctcagttttagtgacggtttatttttaggaaatgtgcatggtgccatggtaagtctctggatctgcttctttgtgcacagagatagtcttttggagttacttccatggaaataaggtaattttggtcaaaagaggaaaggtgttagtaattggagttataaaatacaccattctttgtaagtaatgccgagatggtttatcagagtctctcatctttaatgaaaacttytgctgcttttcaagcaaacttggttcccataatttgggattcatccacagaatgttcaaagtttagtgtcagccrttttcagcagaaaatagaggctgacaatttcctgtgttctttagaagactttgaaagcttcatgggaagaatgaagactattcttggcctgaacatttgccccatggggtgctggacccagccaaacagccttgtattggcaaaggagggtcaagtgaaaggagaccttgttctgcgccaggctctcaaaaagggtagcctgaaaccctattggccacacggaacctcttttagatgctgtttgtggacctgccgaaatcgaatgccactcaggctttctgaaaccctatgggggtgggaagaggcagtagctgacacctctgagagcagaggtttgtgaagatgtggcatagatgaggaggctagcagagggggggtagtcagacactaccaacaaacttcctttttgttctctttgttctctcttcgaggtgggccaccccgcttagctcccttttgtccaagtgtgttgcaagggagcagcatttcaccgggagatttgcacgtaagtagagcacagattcccctgggtgaggggctggctctcacccaagtgtggggataccaaactaacttgttctggcaaaggcatacaacttttttacccctcatttaattctgttgtctttgaatttttaatgatctctttcatatttaaatatatgctgtactctagcgtagcacagaaaagttccctgtgtcttggataagccagtagttttaagcaacttggcaaatggtgagtgaagtaatgagcactctggcatggcccctggtgttaatgtgagctrttttccctgcatttcagaagtcggaatatatcggtgggacataataggagctgtccaatttttttttccttagggataactctcaatgtgattatacaaatctctggcttaccctgataaagttaaaaaacaaaactaaatgttgtattcaatattttgggaacacagttctctcacccagacacaaatgaaatcttccttagacctttttattgctgggcagaggtgccaggaactcaaattggcattttctcaaatctccacctcattagtgcctatttagaccccatccctaagagtcaggtgctttggaagatggaatggaggccgctgataaaaatccactttctgtagtctccattcaggtatgattggcctgattatagctcatgtcctgaaaaggagataggtttttttctccaacttgtaagaactgatgaactcatcccaccaaatgcgaatgttttagacagtattcaaactgggaaaaatacctgcctatcaagggagagagaactcactttgaagtctaagggaaggaaacaaaattgaaaagtgctgcaacaagtgtttgtggagtacttgctgtgtgccaaatacagagcattcacatagattgtgaactagagctcctgagaaggctatgacatgggcatttccacctctttataaaaacaagcaagctaaaatatcacggtgtgattccataacatttgtatttgttatccattgttccacaataaatgcccctcaatcctggcaacaaaatttaaaccacaacaatctgtaatagtaacattcattatcttagtttctgcaggttaggaattaagcggtttagctgggtggtctggcagggtgccttgcagtaaagatgttggctgaggctacagtcaactgtgggcttcaatggggctgggggatctgcttccatgatggctcactgacatcactggcaagttgacgttaagaggcctcagccccttgccacatggacctctccacagggctgcttgagtggccttgtgacatggtggctggctttctcctagagcaagtaatccaagagagagcaaggcataagccacatggcttttatgacccagctctgagagtcacacacatgatttcccaatatgctattgctaatgcagcttagtcctgttcaatgcatgaaggagctgtacaagagcgggcgtactaaataaaggtggcacaaatacagcaagcttttataaatagtcttatttggcaaacccatttagctgactttctgggtattcttgataatcattttcctaaaatgaaactatttcagtttttgaaattagctaattggattctccctaaaataactaaatttaaaccaattgaaggtgctgataatgtttttacagatgggtctagtaatggtaaagcttcttattctggttcaaaaactaaagttttccagatgccctatacttcagctcaaaaaacagagctggtagctgtaattgaggtattgactgcttttaatatgcctattaatgtgatttctgattcttcatatgtggttcattccacacagttaattaaaaatgctcagttacaatgtcaaacagatgaataactgatgacaaaaacaaaaaagggggagaaacagggattacgggacagcccatatacaactgaatctagcattattaacttcaaattttttgagcctgctgaaaggccagatgttatcagtagctgaacagcatctacagaaaccagctgcaaagacagaagcagaacaactggtttggtggagagacccgataacaaaaagttgagaaataggtaaaataataacttggggtacaggctatgcttgtgtttctccaggccagaaccagcagtcgatttggataccatcaagacacctgaaaccttatcatgaaccagatgccaaggaagagattctggaaggatcctgaggacccccctggttgcagccatgtcaagactgatgctgaggaggaccccaactgtcacgagcaacacccatcaaacacagccacccacctggggacagaccaagaagctgccacagatggcagaagaaaacctgaagaaagcaggacaaccagtcacaatgagtaatttaatggtagctatgatagcggtaatcaccactgctgtgagtattccttcaataagggctgacacagggaacaattatacttattgggcatatttatcaatcttggctggcaataatgcctggatgtaatcactctatgatgcagttacacatgctttctgatctcagtatttaccataacaaatctgctcctatatttgaggcatactgccctcaaaaacctatttgtaaacagaactggacctggccagaaaaaatgaacgtacttgtttaggaagattgcattgcagaacatgcagagatgctgcacaatgattcctatggaatcattattaattgatcccctaaggggatgtttagcttaaattgcacctctcagtccgtgtgccacggccacactatgttcagctgatctgaacaaaacggccagatggtacatataataagaagtatggcaagagttcctattatctggaaccgtggcagtatagtgacacctcaacctcaaatgatatggcccactgtaggagctaaacattraggatttgtggaaactattaatagctcttagtaagatcaaaatttgggaaagaataaaaaagcatctagaaagacactctacaaacttgtttttggatattgcaaaattaaaagaatatttaaagcatcccagacacacccgaccttaatgccaggatctggagtgcttaaaggagctgcagacagattagcagctagtaacccattaaaatggatacaaacacttggaagctctgtgatttcaatratgattgtgcttttaatctgtgttgtttgtcttgtatagcctgcagatgtggatcctgactcctgagagaagtagctcaccgtgacaaagctgtctttgcttttatcgatttgcaaatcaaagaagggggacatattgggagcaggcctcccaaaatctggccataaactggccacaaaactggccataaacaaaatctctgcagcactgtgacatgctcatgatggccataacgcccacgctggaaggttgtgggtttaccggaatgaaggcaaggaacacctggcctgcccagggcagaaaaccacttaaaggcattcttaaaccacaaacaatagcatgagcgatctgtgcctaaagggcatgttcctgctgcagataactagccagacccacccctttatttctggccatctcttcatttcccataagggatacttttagttaattgaatatctatagaaacaatgctaatgactggcttgctgttaataaatatgtgggtaaatctctgttcggggctctcagctctgaaggctgtgagacccctgatttcccactttacacctctatatttctgtgtgtgtgtctttaattcctctagcaccactsggttagagtctccccgactgagctggtctcggcacttctctttgccttgaaagcaggtacagcggaccttcctggcatcagaaaaaggcctccagaaaaagagacacaggtactagcaattgcaaattatccagagcccttctaagttgtaagatctgaaggaaatgtctgccatctatattctcagccacacttagtttcttaatctgcaagatggaattaataatagtacttactttatgacgctgttgcagaaattcattgarttgctacacgccaaacactgagaacccagctgggcatataataagcattctattgcatggcattattgccatcatttttacttctattactgctactgcttgtaactgcttgtgcttttttgatatgaaagtccaccatcagggagcactgtagtggaaaakgtattaggccaggcatagcctttagttstctggccttgggtccttcatctgtgatattcagttaacaatacctagccagtaggggtgttaaagattaaataaatgtgagaatgtgcctgttgcttaatcttcctcaragggttatggactctcagagccacaagaaggtcatctctcctttgctcctcgtatgctgggatctgccacatcaatggcaacaggtgggcctccagaatttgctccaggtgtttggaagtcctgacaccctcctgatcttctctgtaacatgcacactttggcctgtgtcagtttgctggaaccacatcaggccggccctcttcctgggacaaaattctttctttttatctttctttctttctctttctttctttctttctttttctctctctttctttctttctctttctctctttctttcatctttctttcttccccttccttcccttccttccttccttcccttcattccttccttccttctttctttccttccttccttctttccttccttccttccttctttctttccttccttccttctttccttccttccttccttmtttccttcctttctctcaactccagtgtcctggctgaagtgcagtgcactgaacattgctcactgcagccttcacctcttcagctcaagcgatcctccaacctcagcctcccagtagctgggactacagatgcatgccaccatgcctaactaatttttgtattttttgtagtaacaggatttcaccacattgcctagtccartctcaaactcctggcctaaagtgagccttacaccttggcctcccagagtgctgggattacaggcatgagccactgcacctgcccaggaacagaatattgaccgccattttaaaagaattcaagaagtttgcttgaattcacgatcaagcagctcaccagctgggaataatataatgccaatttttagagtaatggctaaataaatcaggatatagccatagaacagaatactatgtagaaagcgagaatgaagtattcctttatttcttcttaaggaaatacgtctaagcataacatwgagaaagaatgaggtattcctttatttcctattaaagaaagaactctaatcataactttgagtgataaaagcaggtcatatgctataataacatttaaataatgcacacaaaatatagcatattttaattatataggaatgtttatatgcattccatattgtgacagttaattttaaatatctcatggctaggccatggctgaatactatcttagatgtttttgtaaaggtattatttaggtaagattaacatttagatcagtgtactttgaataaaacagattactctccatagtgggatgggcctcacttaatcagttgaaggccttaaaagaaataaggctgacctcccccaaggaagaaggaattatgcctccgggctttctttggactcagggtgcaacatcacttcttccctgggtctccacactgatggctggagttaccctgcctgcatattttggacttgccagcttccacaattgtgtgacccaattccttacaataaatctctctctcttctctctttctgtccctctctctctctctctctmtmtatatatatatmcacacacacataaatatatatagattatgtacacataygtatatatacataaacctatgtatacatacctattccttaccaattccttacaataaatctctattctctctctttcattctctctctatatatgcatacamgtatatagatatgtacgtgtgtgtatatatacataaatatatgtatacatagatatgtgtacatagatatgtatgtgcacgtagatatgtgtatatagatatgtatttgcacatatgtatatgcacacgtatccatgcatacctacatatatttatgtacacatatgcatgcgtgtgtacacatataatgtatgtgtacatatatgtatacatgcacgtacatatatgtatatatgtatatatacacagatgcatgcatgtacatatatgtatatatgcgtatrtacacaggtgcatgtatacatgtgtatatatacatgcatatacacatgtatacatgtgtacatatatatacacacatatacatatatgaaataaaggggtgggtctggctagttatctgcagcaggaacatgcccttaaggcacagatcgctcatacacatatatatatatacacacacacatgcaaatgttcacccatgcacctgctcatacacacacacttctggaattgggtagggaaggaaggacagtagggaccagggacattttagacttatctgaattgttttcattttttaacaaagaaaacttacgcaagcattaattttgcaattaaaaggcattcaaacattttgctgcaggcactgaccaatatcccctgtgaaatatcactaatgtcatgttacttacctctgttaatgttacgaaattacactatttctgttttctgctttcctagtttcctgttgcaccgtttttsatctctgcatggttccactgtcatctagctttttgaaaaactcattttgtttgctctccttccaggtcctggcttcctgtcctggccatccaatcatatccaccgcaaacaggccttgttcctctgtcactgcaggccagctctgaaccgtctcttttcttccactgacatagaaagatgagatgtgtcagcacccttgcaaacatgaaagcctagccagtgaagtgctgagtkctggaagctttgcctggggcatgaacaggtagagaaactgcagattctgtgtcagatgaagtgactcaaagggacagaatggccatctttggacagtttaagarcttttataaggaagaggaatcagaactcacttcatgtggygcatggtgccraatcaacaagataagtgttcccaggaagcagatttcagcccatctcagctcacttcaacctctgcctcccgggttcaagtgattctcccacctcagcctcccgagtagctgggattacaggtatgtgccaccatacccagctaatttttgtatttttagtagaaayggggtttcaccayattgcccaggctgattttraactcctgagctcaagggatccacccacctcggcctcccaaagtgttgggattacaggcttgagccacagcgcctgacctatatgcgtattttatgtccaaattaaaaaggactataaataaatatgagagtcttgttatgtgtgctgaagtgtttaggggtgaaatgtactaatgctgcaattcattttgaaatgcctccaaataggatggtttgagggatggatagttgaatagattatatgataaactgagcataatgaaatgataattgtagacttcaggggtgggtatggatgttcactgcaaaattctttcaacttttcattaagtttgaacatttcttaagagtgttaattcatttattttttagagacagggtcttgctctgtttccccggcaggagtgcaatgatgtgatcctagctcactgcagcctcaactcctgggctcaagggatgctcccttctcagcctcccaagaagctgaaactacgagtgcgctccactgcatttggctaattacccaggctggtctcaaactcttgtcctcaagtgatcctcccaccttggcctcccaaattgttaggattacaggtgtaagccccacaccccaaacgtttttataataaaacactgaagggaaattctgatgctgagaccctgcacttacatctgttaatgagatctttcctcaattaaatatgctgccattggaaattggtacatttcttcgtcaagggcaacagtttgtcaagggcaacatacacatattcctgggagaagtgacactgtgggagattgttgagcttttttacccctaaaaatgaacttatcggggaatacgttcatgatctctccacaggttctaataatgaggggagacctgggttctgcacctggccttgttgtcgtggttactgttgctttcaggcaatggcacctgttctccaggtgtgagtctggacttgtacttgctttagccatatatggccaccagagggcgcagttaccccacagttgcctggagcatccacacccctcaaactcacagcttgaaatgtcacctgcagccgtctgaggtcatccacggttattttctttttcttttcttgtcttttctttttctttctttctttctttctttctttctttctttctttctttctttctctcttccttctttcttttttcttcctttctttttctttctttctttttctttcttctctctctttcttctttctttttctctctctctctcactcccttccttctttccgtctttccttctatccttccttccttctcccctcctttcccctcccctcctctccccttcccgaaagagtttcgctcttgttgcccaggctggagtgctgtggcacgctctcggctcactgcaaccactgcctcctgggttcaagtgattctcctgcctcagcctcccaggtagctgggattacaggtgcccgccatcatgcccggctaatttttgtatttttagtagagacggggcttccccatgttggccaggctagtcttgaactcctgacctcaggtgatccaccctccttrgcctcccaaagtgctgggatgacaggtgtaagccactgcggctggacatccacggctattttcctcatgcctcaccttcccctgttggttcagtgaccctcaaaggacagagcctctgtgccatgggcccttcccctggatctgtgcattgtctaatatgactggaccctcctcctcacccctcatcctgccccagctcctctgatgacatcatcggctctggaactgccactcagcctcttgcaagagggtcccctccctccgaccccactgtcccctcaggaccccaattccgctggcaccatctggtgcagggagtcttttttttctcctataccccacataccgcagaatctaaagtagggtctatatcctccatgcttcctgtggttgcgtccaagacatttctcttccaaaggcagcagagtcacctgctgtccctctcggtgactgctgtctgctggtcttcygcttacacctcctcatccactgaggacttgggctstcagttgacagtgttctccatcattcttgtcatgtcgttagagggrttgctgcctggcaacccctctacattccccaggaggtttgcaacagtgatttcatacaagacgttggcrtygtcacccacgtggacatgccaggctactccctgagggcgtcatcacccacgtggacaggccaggctactccccgagggtgatgtcacccacgtggacagggcaggctactccctgtctctctgggcaccaggactgctgcagctccagtgaccttttccagtgtgcctctcagccacctctccctgcctgcggtcacacctgggaccctccatcacccagaaaggagacttcagacagctccccactgacctctctcgttccagaactctccacttggcctcatcacctcactgtcactctctctgtgtccactgccttccttaatcatygttcataattaaaatcaactcctgcagggcgaggtgattcacrcctgtaatcccagcactttgggaggccgaagcggatggatcacttgaggtcaggtgtttgagaccagcctggccaacatggcgaaacacccgtctctactgaaaatacaaaaattagccaggtgtggcggtgggcacctgtaatcccagctactgggaaggctgacgcaggagaatcacttgaatccgggaggtagaggttgcagtgagctgagatcacacaycactgcactccagcctgggtgacagagggagactccgtctcaaaaaaaataaataagtaaactcctttttctctctctctcctgacattgttcccctcaacaagggtgacatgaacgggctagatgtcttgcgtctgcacctgacagccaagcatcactgggaaagcacacactcagctgaacttttactttatttattcatctatttattcatttgtttatttattttagagacagcttctcactctgtcacacaggctggagtgcagtggtgtgatcagagctcgctggagcctccacctcctgggctcaagcgatcctcccacctcagcctccctgggagctggaatcatagacgtgcaccacaccacgcccagctgattttctaattttctgtagagatgaggtctcatcatgttgcccaggctgctgttgaactcctggcctcaagcaatcctcctcacctcaacccctcaatgtgccgggattacaggtgtgagccaccatgtctggctgtactgcccaggctggagtgcagtggagcgatctcggctcactgcaatctctgcctcctgggttcaagcgattctcccacctcagccttctgagtagctgggattacaggtgcccacaaccatgcatggctagcttttatattttaagtagagatggggtttcaccatgttggtcaggctggtctcaaattcctggcctcaggtgatccacctacctcggcctctcaaagtgctgggattacaggagtaagccactgagctcggcctggccagactttcactttaaattcacagacttcaagtaggctgcctggcaaccgctttatattcccccaggaggtttgcaacggtgatttcatacttcctctctctctcctcaaacctcctgtgcttccttccctccctctcttctgctcagctgaagctcacttctctaacgttattagaagccatcagagtgaatattctttttttttctctctctcttttttgagacaaagtcttgctctgtcgcccaggctggagtgcagtggtgcaatctcactccaagctccgcctcctgggttcacgccattctcctgcctcagcctccctagtagctggaactacaggcgcccgccacsacgcccggctaattttttgtatttttagtagagacgtggtttcactgtgctagccaggatggtctcaatctcctgacctcgtgatccgcccaccttggcctcccaaagtgctgggattacacgcgtggactgtgaccggcccagagtgaatattcttatcttcccaccacccaccgactgtgtctctgttccttccactgtcactgtgtaataattgcccttctggggctgggcatggtggctcatgcctgtaatcccagcactttgggaggctgaggtgggaggactgcttgaggccaagagcttgagaccagcctgggcaacatagtgagactctatctctacaaaaagtttaaaaattagcaagggtctgggtgcggtgggtcccgcctgtaatcctagcactttgggaggctgaggcgggcggatcacctgaggtcaggcgttcaaaaccagcctggccaacatggtgaaaccctgtctctacaaaaatacaaaaattagcagggcctggtggcatgtgcctgtaattccagctacttgggaggctgaggcaaaaggatcacttgaactcgggaggcggaggttgcagtggaccgagatcgtgccattgcactccagcgtgggtgacagagcaagactgcatctcaaaaaattaaaaaaaataaaaataaaagttagcaaggcatggtggtgtgcacctgtggtcccagctactcaggaggagctgggaggatctcttgagcccagaagttcaaggctgcagtgagctgtgattgggtcactgcacaccagcctgggcgatggagtgagaccttatctcttaaaaaaaaaaaaaaagaattgtccttttgattgatgaagccgcggaccaccctgagctgtgcttcctattccttctggctttcccaagcttttcttgtccaccggaagctttcactagaaggtagaggactggctctgtagttgggaactacagttgggaacattcaagaatattctattaacatatttacattttttaaatatttggttttaagaatatcagcccccttggcccggcacagtggctcacgcctgtaatcccagcactttgggagactgcggtgggccgatcacctgaggtcaggagttcaacgtcagcctgacgaacatggtgaaaccctgaatctactaaaaaaatacaaaaattagccaggtgtggtggtgggtgcctgtaatcccagctactcgagaggctgaggcaggagaattgcttgaacccgggtggcagaggttgcagtgagccgagagcaagccactgcactccagccagagcaacagagtgagatgctatctccaaaaaaaaaaaaaaaaaaaagaatattactatcagtcactccttgatataactggagatctgagataacataacagctgtggcaccgctatgaaccagagagaggacaggaggcttccccaagggcagctgtagttcagtaatccgttaacaaaagtctcccttctaaagtctccaccattttttttaagacagagtctcactctgtcacccaggctgaaaatgcagtggcacgatctcagctcactacagcctctgcctcccagcttcaagtgattctcctgcctcagcctcccaagtagctgggactaaaggcatgtgccatcacgcccagctgatttttgtatttttttttttttttttagcagagttggggtttcaccatgttggccaggctggtctcaaactcctgacctcaggtgatcctcccacctcggcctcccaaagtcctgggattacaggtgtgagccaccgtgcccggcctaatttttgtatttttaatacagatggggtttcaccatgttggtcaggctgatcttgaactcctgacctcgagatccacccgtatcggcctcccaaagtgctgggattgcaagcgtgagccaccacgccaggccttatatgtgtttttctaaatgcacttagaaatcaatgggtagggcttggctgctttaggaaaccgttccagaactctactctgcccatagacccagaaaaacacaaatgaggacaaataaggaaagcttaggttttccctggagaaagaggaaaggtagaaacagacaggaccagacgaccggccagacaagaccacgtgtaagtgccaaaagaaccacacaggccacgcctttaattccagcactttgggaggccaaggtagaaaatcacttgaggccaggagcttgaggacagtttgagaacagcttgggcaacatagcaagaccccatctctacaaaaaattttttaaagtctgggtatagtggctcatacctataatgccaacactttgggaggctgaggtggaaaattgatcacttgagcccacaagttcaagaccagcctgagcaacatagtgagaccctgtgtctataaaattttttttaaattaggcatggtggcctacatctgtagtcccagctacttaggaaactgaggcaggaggatcccttgaacccaggttgatgctgcagtgagctgtgttcatgccactgcactccagcctgggtgacaaagcgagaccctctctctcaagaaaaaaatgtttttttaattagctgggcatggtggcatgccaagagcagaaatttgtcagggtattaagttgaaacaataacagtcctttaaaacttttatatgcttwaaaaaaatgaccttatgcccccacccactccattccctcctggtttaactactgcttatgttttatttttatttttttgttgagacggggtcttgctctgttgcccaggcaggagtgcagtggcacgatgatarcccaatgcagactggaactcctgggctcaaacagaccatctgtttctggtcaaaaaaagaaaaaaaaatcatctgtttctggtcagaagtcaggtagctcagtccttcatgaagaggaatgccttgcatgagctagattactcaaagggtcccagtataaaagatacctcttataaaagataccccctcccacctcttagaaaccttcaaatgctagaaagaatgttccaaaaggccggctgtgactaggagctgaatagaggctgctccctctgaaaaataacatcacgtcaagctgggcaaatctgagagctatgaaccttcctaaatgtcaaaattgctaaggtatttttaaaactcagaaacttatattaacaactgagaagagaaagcggtggaaaacgtgaagaaatcacacttttgttaggtgttgaattactggagacgtatgtgtgtcatgaactgaattgcgtctcccaaatttatatgttaagtcctaacctccaggaccttagaatgtaactatatttagagatagggtctttaaagaagttaagttagaatgaggtcattggggtgggccccaacccaatctgactggtgtccttataagaaggggagatggggccatgcatggtggctcatgcctgtaatcccagcaatttgagaggccaaggcaggcagatcacctgaggtcgggagttcgagaccagcctgaccaacatggagaaaccccgtctctactaaaaatacaaaattagccgggtgtcgtggcgcatgcctgtaatcccagctactcgggaggctgaggcaggagaatcgcttgaacctgggaggtggaaatcatgccattgcactccagcctgggcaacaagagtgaaactccatctcaaaaaaaaaaagtcagctagctcatgtctttttatttttatttttgagacagggtcttgttctgttgatcagtttggagggcagtggtacaatcatagtttactgcagccttgacctcctgggttcaagggattctcccatctcagcctccagagtagctgggaccacaggcatgtaccaccatgcctggctaatttttatgttttttgtagaggtggggtctcttcatgtttcctaggctggtctccagctcctggcctcaaacaatcctcctgcctcagcctcccaaagtgctgggattactagcatgagccaccatacccagcctctttttataatgtactgaaacactctttcaaagtactggtgagtgcacaatacaattttcctttaggttcagtttttctatcccagaacttgctgaatctgaatcccagccttgtgcattcctggactctgtttctgccattcactctgagtgtgggatgcagaaacagctttttagatactggtgcttaattaactcccaaaggcttgaagaaaaaggtctttgggccaggtgcagtggctcacacctgtaatcccagcactttgggaggctgaggcaggtggatcacttgaggtccaaagttcgagaccaacctggccaacatggcaaaacttcgtctctactaaaaatacaagaattagcctggcatgatggtgggtgcctgtaatcccagctatttgggaggctgaggtaggagaagcgctggaacccaggaggcggaggttgcagtgagcagagatcacaccactgcaatacagcctgggtgacagagtgagactcagtctcaaaaaaaaaaaaagaaaaaagaaaaaggtatttgcacatttctgatcacagaggccctgaagatgggtctgctggccttttactattctcagaaacctgcttggtgtttgggaggagggttgagaagggggcaagagctgaccttcctcgccctgcaactgcacgcgggggtggctgttctgtgttcagtgaggcgctagactccagacctgtgagccctcacatgttttcctccccttctctggccaggcgccagttggcccacgtgcccttagctttcagagcatccaactctgccaaccttgcaggaagatctgggggtagggggttcggggaagaatctttattggggccatacacactgcagcctcataggatgggtggggcaggagccagggcccagttgaccctgatgaaaaccttaatagagatatgtagcccagctctggccaggcacagtggttctcatgcctgtaatcccagcactttgggaggctgaggcgggtggatcacttgagcccagaaatactagactagcctaggcaacatgacaagacacccctctttattttattattttttatttatttactttattgagacaaagtttcgctcttgtttcgcagactggagtgcaaccacacgatctcagctcactgcaaccgcctcctgaattcaagcgattctcctgctgcagcctcctgagtagctgagattataggcatgcggtgccatgcccagctaatttttgtatttctagtagaaatggggtttcaccatgttgtccaggctagtctggaactcctgaccttaggtgattcacccgcctcggcctcccaaagtgctgggattacaggcgtaagccagggtgcctggccaatgcccctcttcataaaaaacgtataaaatttgcagggtgcggtggctcttgcctgtaatcccagcactttggaggctgaggtgggcagatcacaaggtcaggagatcgagagcatcctggctaacatggtgaaaccccatctctactaaaaatacaaaaaattagtagtcccggctactcgggaggctgaggcaggagaatggtgtgaatctgggaggcagaacttgcagtgagccgagattgcgccactgcactccaacctgtgcaactgagcgagactccatctcaaaccaaaccaaacaaaacaaaacaaaacaaaaaacagaaaaaaaattataaaattagccggatgtgatggtgcatgcctgtagtcccagctaccgaggaggctggggtggagaatttcttgagcctgggaggttgaggttgcagtgaattgtaatcgtgccactgcactccagactgggggacagagcaagatgaaagaaagaaacaaagaaggggggggagggagggagggaggagggaaggaaggaaggaaggaaggaaggagggaaggaaggaagggagggagggagggagggagggagggaggggagaaaaaagagagagagggaaagaaagaaagaaagagagaaagcaattattataatatgatggtcaaagtgttcttattcagttagcctctcaccagagcttagcggaggggtcttcaactctagactacaagttaaggcaaagttttcagaattgagtttttttctgtttttgtttttttgtttgtttttgagacaggatctcgctgtgttccccaggctggagtacagtgttgcaatcatagatcactgcagcctggagctcctgggctcatgtgatcctcccatctcagcctcccaagtacctgggattacagtagagatgcaccaccatgcccagctaattttaaaatttttttgtagagacagggtcttgctatttgcccaggctggtctcaaactcttgggctcaagcaatcctttctcattggcctcccacaatgttgagattacaagtgtgagccaccacgcccacccagagtgattttttttttttgagacggagtttcactcttatcatccaggctggagtgcagtggtgcagtggtgcagtggtgcagtggcgtgatctcggctcactgcaacctctgcctcctgggttcaagtgattctcgggattacaggtgtgagccatcgtgcctagagtccatattttggaatattttcaatctgtggttggctgaatccatggatggggaacctgcagttataagggtcaactgtactggcctcgtcagtctggaagtgccccttcttctgttttctggagattacgtgtaattggtgttgctatttctttaactatgagcagacttctccagtgaaactatctgggtctggagatacctttttcaagagtgggaggaaagagttaacacaacaggtctgattcactcatttctcacttatttctgtagccaaagcgtggccattggtcaaactctgaaaaccaaactcctggaatattcacatagttaccgggtcagatgttattctccacgcccaaaacagtgagcccagatgaaccaggctgtcagcaggtttaaagtaaacatacagattcatgatgcttagccaggcacagtggctcacgcctgtaatcccagaatttggcgaggccgaggcaggcggaatcgcttgaggtcaggagttcaagatcagcctggccagcatggcaaaaacctgtctctactgaaaatacaaaaaattagctggacgtggtggtgagtgcctgtaatctcagctacttgggaggctgaggcaggaggatcatgtgaacccaggagacagaggtcgcagtgagccaagatcacaccactgcactccagcctggtgacagaacgagactctgtctcaaaaaaaaaaaaaaaaaaaagccacagtgagctatgatcatgccactgcactccagcctaggcgacatagtgagaccccatttttgaaaaaaaaaaaaaagaataaaagattcatgatgcccaacctggtggtttagggctgtgtttggtcacatggcaggaatgtcacccaggttggagtgcaatggtgtgatctcagctcactgcaacctcagcctcctgggttcaagtgatcctcccgcctcagcctcccaagtagctgggattgcaggtgtgtgccaccatacccagctaatttttttacatttttagtagagatggggttttaccatgttggccaggctgctcttgacctcctgacctcaggtgatccgcccccgtcagcctcccaaagtgctaggattacagccatgagccagaaggagtcttgctcttgtcgcctaggctggagtgcagtggcacgacctaggctcactgcaacctccgcctcccaggttcatgcaattctcctgcctcagcctccagagtagctgggattacaggtgcctgccaacatgcccagctaatatttttgtatttttagtagagatggggtttcaccatgttgcctaggctggtctcaaactcctgacctcaggtgatccacccgccttggtctcccaaagtgctgggatgacaggcataagccaccacgcccagccttttttttttttttaaataaagacgagatctcaccatgttgtccaggctggtctcaaactcctggactcaagcaattctcccatctcggcctcccaaagtcctgggattacaggggtgagccactgtgcctggcctaaccacacaaattttgactccagaactcaagtgggatttcctgggcaaggacatctcacacaaatccttgcagtttgctcctggaaaagataagtctgtactgtccctgcagaggataagtatgcatttgaccttccagccttcatctattaatatcctttttcctgctgtctttgtattgtatcctccactgtaataaaccttcacctagagtataacttgatctagaatcacatgggtccttccagggaatcaccaaactagttgtatgcgaccacgaagacaagaaattcttttattaaaactatgaattcaaggacaggcgtggtggctcacgcctgtaatcctaagactttgggaggttgaggtgggtggattgcatgaagtcaggagttygagaccagcctggccaacatagtaaactctgtctcttctgaaaatacaaaaagttagccgggtgtggtggtgggcacctgtagtcccagctacttgggaggctgaggcaaaagaatcgcttgaacccaggaggcaaaggttgcagtgagccaagattgtgccactgcactccagcctgggtgacagactgagacacyatctcaaaaaaaaaaaaaaaaaaggattcagctgggcctagtggctcatgcctgtaatcttaacactttgggaggctgaggcaggcggattgcttgagccccaggagttgaagaccagcctgggcaacttggcaaaaccccgtctgtacaaaaaataaaaaactagctgggtgtattggcgggcgcccgtagtcctaactactcaggaggctgaggtgggaggatcacctgagcccaggaagttaaggcagcggtgagctgtgattgtgccactgcactccagtatgggtgacagagtgagatgcagtctcacaataaaataaaataaaaataaaaaaccatgaattcaatttttaaaattgttacaagattttaaaaattatgtttcatattgagtgatttttggtagtttgtagttttcaaagaattggtccatttcatccaacttgttggatttatatgggtagagttgcttagtattcacttattatccttttgttagttttttttttctttgttttgttttttgagatggagtctcactctgtcacccaggctagagtgcaatggcacaatcttagctcactgcaacctctgcctccctgattcaagcgattctagttccttggcctcccaagtacctgggattacaggcgcccgccaccacgcctggctaatttttctttttttttttcttttgagacagagtcttgctctgtcgcccaggctggagtgcagtgacctgatctcactcactgcaacctccacctcctgagttcaagtgattctcctgcctcagcctcctgagtagctgggactacaggtgcccacaaccatgcccagctaattttttgtatttttagtagagacagggtttcaccgtgttagccaggatggtctcgatctcctgaccttgtgatcttcccacctcggcctcccaaagtgctgggaatacaggcatgagccaccatgcctggcctaatttttgtatttttagtagagacgggggtttcaccatgttgcccaggctggtcttgaaccccttacctcaggtgatccacctgcctccgcctcccaaagtgccgggattacaggcatgagccactacacccggccttgttttgttgttttgttttgttctgaggttttgagacggagtttcgctcttgttgcccaggctggagtgccctggcacgatctcggctcactgcaacctccttgtcccaggttcaagcaaatatggaacgcaacacaaatttgcatgtcatctttgtgcaggggccatgctaatcttctctatatctttccaattttagtatatgtgctaccaaagcgtgcacaatttttgtattttttgtagagatagggtcttgccatgtcacccaggctggtcgcaaactcctgaattgaagtgattcgaccacttcggcctcccagagtgctgggattacaggcatgagccacaacacctagcctcaaatggaaattttaaaacaaaaatacaataacaaaaatttaaaactcactagatggactcaattaacaatatgaaggtgaggaagagtcagtagacaaacgtggattgatagaaagcactcaaactggccggtcaaggtggctcacgcctgcaatcccagcactttggaggctgaggtggtggatcatttgaggtcagagttcgagaccagcttggccaacacagcaaagccccatctctactaaaaatacaaaattagtcaggcatggtggcacacgcctgtaatcccagctactcaggaggctgaggcgggaaattgcttcaacctgggaggcagaggttgcagtgagctgagatggcgccatggcactccagcctgggcaacaagagcaaaactccatcacaaaaaaaaaaaaaaaaagtgctgaaactgaggccgggcatggtggctcatgtctgtaatcccagcactttgggaggccaaggtgggtggatcacctgaggtcatgagtttgagaccagcctggccaacatggtggaaccccgtctctactaaaaatacaaaaattagccaggcttggtgttgactgcctgtaattccagctactctggaggctgaggcaggagaatcgcttgaacctgggaggtggaggttgcagtggagccgggatcgtgtcactgcacaccagctgaaatgacagagcaagattgcatctcagaaaaaaaaaaaaagaaaaaaaaatcaatgggattacttggtgtgtttctgtttctttcagggaaatttatcagaagaaagagaaaggatatttcagttttctctgaaaagttgattttgaaaagagccctatatcttatacataatttccccatgattctccagaattctaaaaagggaagcacattgttaatgttaatgttcttagggctatttttggactggacagaaaagcagaatagtttgtgttttgtgtggacttcagagtgcattgaaggctgtaaaataaccaatcttgttagacatctgtatccaaagtcacagtactccaagcatagtataacccttgtatattactaaagactaccccattgttatgtttttgccttttttttaataaaccagctttattgagacataatttacggacaataagttctacatatttgaaatatcaagtagatgacttttatcaaaggtataaaacattttcacctccttcactcccctttacagtcaatctccatttcactccccactccaggcaaccactcatctgattgctctctctataggttaactttgcctgttctagaatttcatgtaattaaaatcacacagtatgtgcccttttgtgtttaacacatctcactgagcacaatgtgagattcactcacactgcatgcatcagtaggttcctttttatagttgagtagaggttttggtgtgaacataccacaatttatttattctcctcttgattgacaaaagggttgtttaggatttttttgctaagtaaatctcttttgaatgttattggactagaatttttttttaattttattattatactttaagttttagggtacatgtgcacaacgtgcaggtttgttacatatgtattcatgtgccatgttcgtgtgctgcacccattaactcgagatggagttttgctcttgttgcccaggctggagtgcagtggcatgatcttgtctcactgcaacctccaccttccagtttcaagcgattctcctgcctcagcctctcgagtagctaggattacaggcacccgccaccacacccagctaatttttgtatttttagtagagacaaggtttcatcatgttggccaggctggtctcaaactcctgacctcaggtgatccgcctgcctcggcctcccaaagtgctgggattataagcgtgagccaccgcacctggccatgtttttgcttttatgagatattcattggaattggaatttgtttgatgctgcttcaggatatgagtaattattaaaagaaaatgtgactttttaacaaagcagtccaggaatacgttgtagagaaaaaagatgactgcttaaaatatggctatggttaaaatgttgtctatattaaggaatcttcatgagatccttgacatcattgtgaacacaatcttttgtgattatgttacatgattttcatcttttttcaatttatctaagtgcttggccataaagacacaactgaccacacttaacccctcttgaagacatttttaaatctctaaatgaatactaactccaacatatctatcttgtttttaccacaagcattttgaaaaagcagagtaggccaggtgcagtggctcatgcctgtaatcccagcactttggggtgccgaggtgggtggatcagctcaggtcaggagttcgagaccagcctggacaacatagtgaaaccccaactctattaaaaatacaaaaattagctgggcatggtggcaggtgcctataatcccagctactcaggaggctgaggcaggagaatcacttgaacaatccaggaggcagagtttgcagtgagccaagatctcaccattgcactccagcctgggtgacagagcaagactctgtctcaaaataaaaattaaacaaaaaaaaaaaaaaagaaaggaaaagaaaaatctgatgaatgtggaaaatctatatgtattcttagaaaaaaatgctcttcagggctgggcgtggtggctcacgcctgtaatcccagcactttgggaggctgaagtgggtggataacctgaggtcaggagttcaagaccaaactgaccaacatggagaaatcctgtctctactaaaaatacaaaattagccgggcatggtggcacatgcctgtaatcccagctactagggaaggctgaggcaatcacttgaacccaggaggtggatgttgcggtgaaccaagattgcaccattgcactccagcctaggcagaaagagtgaaactccatctcaaaagaaaaagaaaaaacgcttttcaaatttttgcatttctgacaactggatgtccccacctgccaaccagtcctgtggcccccactcaggaactgacttagcccaaaaggacagctttaattctctatgatttcatctcctgcacccaaccaatcaacaggccccctatcctagccccttgcccacaacactatcttggaaaaatccctcatctccaagacgttagcaagattgatttgagtaataactccatctcccacgtggcatagctggcttcgcatcaatgaaactctttaatgccatggtcttcagtggattttgtttgtgtggtagtcaggaagaaccccttgggccattacaaacatggggacattgtagaggaccattttagggaccccatcctattaagtgccatgaatacagaaaaaaatcgtgattccatttacatgttttagaagtgagagaaactccaaatatgatatggtcaagttgtgcaacagaattcagaatttattcaatattacagtgtttatatcacagagaacatctttgtcatttatataggcaattttccctggggctcacatgctattgaacactgtaacgtttattttggggagaatctgtggagatgggggaggcatcgtcaacattccagtgcagcatcagctaattcacatgcaacaaagagtctatcaatgcagaaatgtgcaagagcttttggaaaagtatagctcattcaatatcagagaattcacaatggaggaaaatcgtatgtgtgtaatggacgtaaaaatgctttgagatggtgyccagagctaatcagacatctgggattttgtagcagagaggggccttgtgagtataatggatgaggaagaaccttcaatcagagttccatacttagacaatatcagctaattcaggtgggacttaaaatgrtcatacgtaatgaagacggaaaactcagggaagcatggggaatacggaatgtgagatcatccacactggagagaagtcttaggagtacaatgagtgtggaaaatcacttggggacaaacttagctttctcatcattggagaattcacacaaaaaaaggaatgagcttggacggatcatgggagaacttccaggcactaatcaggctaattcatcccggagaaaaaccttgatgatgaagaaggggaaaaagtcttccagtttttttccttattggatytcagagaatcctcagtgacatatagggaaacttgctggaggaattcagggtttattaagattcacattaaagcattaatcccattaaagtaggagtttaaacttttttgcttctttcaccccaaagttttcattccttacgtctctgttgagggaatgaagcaacaggcaaaaatcaatggtgcactggctttgcctttcaaaacatcacacaatatgtggggtgcagaaggacagcattgagaggtgctgggtttggtgccagaatctggcagttgcaaattctaatacatcacaacacactcataggtgggccccatatatctgatgaacttccagggccacatctctacaaatgctgaagattatttggagatgggaaaatgcggctgggggtgctttttctccaggtctgagtaaaatgaaatagtgggtatttctaagatatattaggaggatgccagtttctctttgtttcatattttcaaaaacagagatttaaagaggacgggctagagctcttatgttcagcttcttattccataagggaagaatcaggcgtatttcttgtgttgaagcaacacacacacacacacacacacacacacacacacacacacacacacacacacacgttgtttggcaaaagtcagaccagaagaaagcttctctcctaccaacctcattccttggccttgaaccagcattctaagtcttccaatacatccttgtctctccctacagtaactctctcattgagttctgtttttgtttgttttttgagaaggattcttgctctgtagctaggctggagtgcagtggcacaatctcggctcactgcaacttctgcctcccaggttcaagcaattctcctgcctcaacctcccaaatagctgggattacaggcatgtgccaacacgccaggctaatttttgtatttttagtagagacagggtttcagtacgttggtcaggctggtctcgaactcttgacctcgtgatccacctgcctcagcctcccaaagtgctggtattacaggcgtgagccatcatgcccggcccattgagttctttatagaagtgagttaggttttgtagatttttggctcctagctttgcttagagaagccagaaagaggcgcagtggctcacacctagaatcccagcacttgggaggccaaggnnnnnnnnnnnnnnnnnnnnnnnnnnnnnnnnnnnnnnnnnnnnnnnnnnnnnnnnnnnnnnnnnnnnnnnnnnnnnnnnnnnnnnnnnnnnnnnnnnnnnnnnnnnnnnnnnnnnnnnnnnnnnnnnnnnnnnnnnnnnnnnnnnnnnnnnnnnnnnnnnnnnnnnnnnnnnnnnnnnnnnnnnnnnnnnnnnnnnnnnnnnnnnnnnnnnnnnnnnnnnnnnnnnnnnnnnnnnnnnnnnnnnnnnnnnnnnnnnnnnnnnnnnnnnnnnnnnnnnnnnnnnnnnnnnnnnnnnnnnnnnnnnnnnnnnnnnnnnnnnnnnnnnnnnnnnnnnnnnnnnnnnnnnnnnnnnnnnnnnnnnnnnnnnnnnnnnnnnnnnnnnnnnnnnnnnnnnnnnnnnnnnnnnnnnnnnnnnnnnnnnnnnnnnnnnnnnnnnnnnnnnnnnnnnnnnnnnnnnnnnnnnnnnnnnnnnnnnnnnnnnnnnnnnnnnnnnnnnnnnnnnnnnnnnnnnnnnnnnnnnnnnnnnnnnnnnnnnnnnnnnnnnnnnnnnnnnnnnnnnnnnnnnnnnnnnnnnnnnnnnnnnnnnnnnnnnnnnnnnnnnnnnnnnnnnnnnnnnnnnnnnnnnnnnnnnnnnnnnnnnnnnnnnnnnnnnnnnnnnnnnnnnnnnnnnnnnnnnnnnnnnnnnnnnnnnnnnnnnnnnnnnnnnnnnnnnnnnnnnnnnnnnnnnnnnnnnnnnnnnnnnnnnnnnnnnnnnnnnnnnnnnnnnnnnnnnnnnnnnnnnnnnnnnnnnnnnnnnnnnnnnnnnnnnnnnnnnnnnnnnnnnnnnnnnnnnnnnnnnnnnnnnnnnnnnnnnnnnnnnnnnnnnnnnnnnnnnnnnnnnnnnnnnnnnnnnnnnnnnnnnnnnnnnnnnnnnnnnnnnnnnnnnnnnnnnnnnnnnnnnnnnnnnnnnnnnnnnnnnnnnnnnnnnnnnnnnnnnnnnnnnnnnnnnnnnnnnnnnnnnnnnnnnnnnnnnnnnnnnnnnnnnnnnnnnnnnnnnnnnnnnnnnnnnnnnnnnnnnnnnnnnnnnnnnnnnnnnnnnnnnnnnnnnnnnnnnnnnnnnnnnnnnnnnnnnnnnnnnnnnnnnnnnnnnnnnnnnnnnnnnnnnnnnnnnnnnnnnnnnnnnnnnnnnnnnnnnnnnnnnnnnnnnnnnnnnnnnnnnnnnnnnnnnnnnnnnnnnnnnnnnnnnnnnnnnnnnnnnnnnnnnnnnnnnnnnnnnnnnnnnnnnnnnnnnnnnnnnnnnnnnnnnnnnnnnnnnnnnnnnnnnnnnnnnnnnnnnnnnnnnnnnnnnnnnnnnnnnnnnnnnnnnnnnnnnnnnnnnnnnnnnnnnnnnnnnnnnnnnnnnnnnnnnnnnnnnnnnnnnnnnnnnnnnnnnnnnnnnnnnnnnnnnnnnnnnnnnnnnnnnnnnnnnnnnnnnnnnnnnnnnnnnnnnnnnnnnnnnnnnnnnnnnnnnnnnnnnnnnnnnnnnnnnnnnnnnnnnnnnnnnnnnnnnnnnnnnnnnnnnnnnnnnnnnnnnnnnnnnnnnnnnnnnnnnnnnnnnnnnnnnnnnnnnnnnnnnnnnnnnnnnnnnnnnnnnnnnnnnnnnnnnnnnnnnnnnnnnnnnnnnnnnnnnnnnnnnnnnnnnnnnnnnnnnnnnnnnnnnnnnnnnnnnnnnnnnnnnnnnnnnnnnnnnnnnnnnnnnnnnnnnnnnnnnnnnnnnnnnnnnnnnnnnnnnnnnnnnnnnnnnnnnnnnnnnnnnnnnnnnnnnnnnnnnnnnnnnnnnnnnnnnnnnnnnnnnnnnnnnnnnnnnnnnnnnnnnnnnnnnnnnnnnnnnnnnnnnnnnnnnnnnnnnnnnnnnnnnnnnnnnnnnnnnnnnnnnnnnnnnnnnnnnnnnnnnnnnnnnnnnnnnnnnnnnnnnnnnnnnnnnnnnnnnnnnnnnnnnnnnnnnnnnnnnnnnnnnnnnnnnnnnnnnnnnnnnnnnnnnnnnnnnnnnnnnnnnnnnnnnnnnnnnnnnnnnnnnnnnnnnnnnnnnnnnnnnnnnnnnnnnnnnnnnnnnnnnnnnnnnnnnnnnnnnnnnnnnnnnnnnnnnnnnnnnnnnnnnnnnnnnnnnnnnnnnnnnnnnnnnnnnnnnnnnnnnnnnnnnnnnnnnnnnnnnnnnnnnnnnnnnnnnnnnnnnnnnnnnnnnnnnnnnnnnnnnnnnnnnnnnnnnnnnnnnnnnnnnnnnnnnnnnnnnnnnnnnnnnnnnnnnnnnnnnnnnnnnnnnnnnnnnnnnnnnnnnnnnnnnnnnnnnnnnnnnnnnnnnnnnnnnnnnnnnnnnnnnnnnnnnnnnnnnnnnnnttgttgctcactgattttactgtctggtttttccactccaatttccaaaaggggccatctgactggcctggctggctttccctacatttgtgagccagatgacttcaaaaatcattggccagcctgtatgtgatcctggtccactgaactgtatatctgggggcttggggggtggcagagaggcagggtcatgtggtgtgacacagctgcctgggcagtggtttccatggaggggctgggggtagcacaggtgatggtgcaatggtgtagggtatccatagagggttctcagagcccaacaactgtacgagatgacaaggctactctgtcagggagagagaccacatggaagaacatgaggcatcagtcatgtgactgcaaaagccactttggacatttcagccccaatagctgtggaggagaggagacctcagacatagtggagcagaaataaactggaacacaagactcacggagctgggtgcatcatcacagattcttgagtcccagcggcctcaaggcttccatggctcaagaacgtcccccaattcccacagcagaaattccagttgctgcaggtagaaagcttgagttctctcatgaacatggctttaatagtgattggaagtgtttcttgcctacgggatttaagatgttgggaaacttttttttttttttttttgagacagagtctcattctgtcacccaggctggagtgcagtggcgtgatcttggttcactataacctctacctcccaggttcaagcgattctcctgcctcagtctcccgagcagttgggaccacagatgtgcgccaccatgactggctatttttttttattttgtttttgaattggagtcttgatctgttacccaggctggactgcaatggcgtgatctcggctcactacaacctctgcctcccgggttcaagtgattctcctgcctcagcctcccaagtagctgggattacaggcatgcaccaccacatccggctaatttttgtatttttagtagagatggggtttctccatgttggccaggctggtctcaaacacctgacctcaggtgatgcgcccgccttggcctcccaaagtgctgggattacaggcatgagtcactgcgcctggccttgggaaactttttgtggctttgacaggccgaagaaggaactgtggaggcaggactatttcaagatggccctgttacagacagaaaatgggctggttcttccagcaaatggaattttaaaattcttcaatggaaaaatgagaacttttagaaacatgggtgatgggcagagctggatttgaacccctgctcttctacttactagctgcatgaccttgggcaagttatttagcctctttaagtcttattttttttcatttgtaacaagaggatagaaacacacctctttcacagggttgctggtaggactaaatgagatactgcatgggaaacaattggcaccactggccctggacacatgatggtgactgcgattgtgagtcgcttatgcacttggcaagtgagggccaaaggcccagtgagagacccagctagagcttcagggcgctggcttggctcttcttaacagggatctggtgccctccacggtggggactggggatggggtaggggtgtctttacagctctccatctagatccagtttcttgagcaatttcatagaagcctctcgttctatttatttatttatttattttgagatggagtctagctcttgttacccaggctggagtgcaatggcttgatcatggctcactgcaacctctgcatcccgggttcaagcaattctcctgccgtagcctcctaactagaattacaggcctgcaccaccatgcctggctaacttttgtatttttttgtagaaacggggtttcaccatgttggccagactggtcttgaactacggacctcaagtgatccgcccaccttggcctcccaaagtgctgggattataggcgtgagccaccattcctggccctctcattctctttagaatggcctttgctacccccatggggatgcctagcttctccaatagccttcacctggtctttcttcctcctctctttattcctcctctttctttctctcctwctctctctctctctctctctctcarggtcttgctctgtcacccagsctggagtgcagtggtatcacakctcactgccacctcgaactcctgggctcaagcaatcctcctacctcagcctcctgagttgctgggattacaggcatgctccactacacctggctaatttttaaatattattgtttgcagagacagggtcttgctatgttgcccaggctggtccagaactcctggactcaagtgatcctcctgctgtgrcctccctaagtgctgggattacaggtatgagcyaccatgtccagccgggttattaatgtcaatctccgycacctccacctgtttttgtaatttcttatccaatttggcctggggatcatcatcagaggagggatttgagagggtattctttttttttttttttttgagatcgagtctcactctgttgctcaggctggagtgcagtggcacaatctcagctcagtgcaacctctgccttccaggttcaagtgattctcctgcctcagcctcccgagtagctggaattacaggtgcgcaccagcatgcctggctaatttttgtgatgttagtagagacagggtttcaccatgttgcccaggctggtctcaaactcctgggctcaagcaatctgtccgccttggcctcctaaagtgctgggattacaggcatgagcctccgcgcctggctgaggatattctggaggctcattgtaaatggcattccagctatacaattccaggacttgagcaatggagccagcaaccggctgtctcctgtggcctgtagagaactgggtaaatacatgagcctctggtaagcagacggagaggcmgctggccagggaactccctttccttctctcctgaatgctcaatgacctgctgacatgttcggcaagtcaaagttcagcagtgtggaagacttggctttctaggaaatgcagttctcacaggcagygccaacactaagaactagttcttactatctgtgtcaagataccaagaattttaacttactaggtttttttttttttttttgtacgaagtcttgctctgtcacccaggctggagtgcagtggtgtgatcttggctcaccgcaacctccacctcccaggttcaagcagttcttctgccgcagcttcccaagtatcggggataacaggtgtgtgctaccacacccagctaatttatgtattttcagtagagttggggttttaccatgttggccaggctagtgtccaactcctgacctcaggtgatctgcctgcctcggcctcccaaagtgctgggattacaggtgtgagccactgtgcctggctagtaacttttaaagttagaagagagctccaaggctatataaaactctggacttggctgggcgcggtgggtcgcgcctgtaatcccagcactttgggaggccgaggcaggtggatcatgaggtaaggagtttgagaccagcctggtcaacctggtgaaaccctgtctccactaaaaatacaaaaattagccgggcatggtggcacccgcctgtaatcccagcttactcgagaggctgagtcaggagaattgcttgaacccaggaggcagaggttgcagtgagccgagatcacgccactgcactccagcctgggcaacagagcaagactccatctcacaaaacaaaaacaaaaaaaactctggacttgtacacaaatttgttccctttcaggggagattgacatttcaccaccaacaaaaggcgagaggccttttctgtcctgtgtccttgagacccagaacttagccatataccaatgggatgatgtcctccccaggggcaggagcagacccaggtgggacatttcagtacagtccttaaggtctgttctcgctacctccaagaactccttggctgcctgggaaccagagtgcaacattcattcaacagatactgagtgcatacctactacgagtcagatgctaagctgggcactgtggacacagagacaggcctaaggcatagccttgctttcagagagccccaagttcacatcgagggtggtccctgagctggtcatacttaactaggactgtgaatgcacagctccgcagcaatggtgacttctattttttttttttttttttttttttgagagcagtctttctctgttacccaggctggagtgcagtagaatgctctcagctcactgcaatctgcacctcccgggttcaagcgattctagtgcctcagtctcctgagtagctgggattacaggtgtgcaccaccatgcctggctattttttgtatttttagtggagatggggtttcaccatgttggccaggctggtcttgaactcctgacctcaggtgatctgcctaacttggtctcccaaagtgctgagattgcaggtgtaagctaccaccgcacctggccaacaacactgacttcttgcttgttccttgcctttccatccccaaaatcgttcccagggcctagtgtaatgcagggcaactagcaacacctctcaggcagagctgaagctgtggagaccaagcatcgaccaccttggctaatgcggctggtctgcctggggctgaaggttgggaggggaggaagaggtggcagtaagtataagatcaccttcctccctgtgtgaccttcaaggggcaaccaccctgaagaaggtgggctacatcttcagtggaaggtaaatgacctgaacaacaaacccatctgcctagatgacatcgtcacagttataagcagtctgcctgtccacacagtccgccaagccaccttgagtgtctcagggttcaaaggattcttggaccatccagaggacaaggggcggcccctcttcaaagatctctcagtctgcttcagaagaaaaagtcatcaaaagataatgaagggctaagtgtggcatgagtgttaaacgggtttcacaggcagtgcattctcatgaagggaagcaggggagtagggctccaggctcacagcatcccaggagggcttcagggaacagatgggctttgggccaggcttaaaggatgggcagaatgcagagtgggaggggtgggcaccccactgcattccagggggtgctgaccatcagcaatgacatggcactcaaaatagagtttgggctaagcacggtggctcatgcctgtaatcccagtgctttgggaggctgagatgggaggactgctagagcccaggtgttcgagagcagccggggcaacacagtgagacctcatctctataaaaaatttaaaaattagccaggtatgctggtgtgtgcctgtagttccagctactcagaaagctgaggtgggaggatcacttgagcccaggaggtcaaggctgcagtaagctataatcgtgccactgcattccagcctagaaatgcagagcaagaccccagctctttaaataaataaataaaaaggtaccacttcggggaaattgcagactctaagcttaaactctactggcttgatacacatggcaaaacacttggtcaggatttgcagtagaatatcaaagaactcacagggcagaggaaagcttcaaatattatgaatgagggaaaatttccattcatctcataattcatactagagagactcccagtgaatggcaccagtggaggaaaatcctcagacggaggcgagctgttattggagatgcgaaaatcacaggggaggacaaagcatagaagcgcgtggaaccatgtaacagcttgcacctgaaagcatcacacgggagagaagttgcatcctcaatgaaggcgnnnnnnnnnnnnnnnnnnnnnnnnnnnnnnnnnnnnnnnnnnnnnnnnnnnnnnnnnnnnnnnnnnnnnnnnnnnnnnnnnnnnnnnnnnnnnnnnnnnnnnnnnnnnnnnnnnnnnnnnnnnnnnnnnnnnnnnnnnnnnnnnnnnnnnnnnnnnnnnnnnnnnnnnnnnnnnnnnnnnnnnnnnnnnnnnnnnnnnnnnnnnnnnnnnnnnnnnnnnnnnnnnnnnnnnnnnnnnnnnnnnnnnnnnnnnnnnnnnnnnnnnnnnnnnnnnnnnnnnnnnnnnnnnnnnnnnnnnnnnnnnnnnnnnnnnnnnnnnnnnnnnnnnnnnnnnnnnnnnnnnnnnnnnnnnnnnnnnnnnnnnnnnnnnnnnnnnnnnnnnnnnnnnnnnnnnnnnnnnnnnnnnnnnnnnnnnnnnnnnnnnnnnnnnnnnnnnnnnnnnnnnnnnnnnnnnnnnnnnnnnnnnnnnnnnnnnnnnnnnnnnnnnnnnnnnnnnnnnnnnnnnnnnnnnnnnnnnnnnnnnnnnnnnnnnnnnnnnnnnnnnnnnnnnnnnnnnnnnnnnnnnnnnnnnnnnnnnnnnnnnnnnnnnnnnnnnnnnnnnnnnnnnnnnnnnnnnnnnnnnnnnnnnnnnnnnnnnnnnnnnnnnnnnnnnnnnnnnnnnnnnnnnnnnnnnnnnnnnnnnnnnnnnnnnnnnnnnnnnnnnnnnnnnnnnnnnnnnnnnnnnnnnnnnnnnnnnnnnnnnnnnnnnnnnnnnnnnnnnnnnnnnnnnnnnnnnnnnnnnnnnnnnnnnnnnnnnnnnnnnnnnnnnnnnnnnnnnnnnnnnnnnnnnnnnnnnnnnnnnnnnnnnnnnnnnnnnnnnnnnnnnnnnnnnnnnnnnnnnnnnnnnnnnnnnnnnnnnnnnnnnnnnnnnnnnnnnnnnnnnnnnnnnnnnnnnnnnnnnnnnnnnnnnnnnnnnnnnnnnnnnnnnnnnnnnnnnnnnnnnnnnnnnnnnnnnnnnnnnnnnnnnnnnnnnnnnnnnnnnnnnnnnnnnnnnnnnnnnnnnnnnnnnnnnnnnnnnnnnnnnnnnnnnnnnnnnnnnnnnnnnnnnnnnnnnnnnnnnnnnnnnnnnnnnnnnnnnnnnnnnnnnnnnnnnnnnnnnnnnnnnnnnnnnnnnnnnnnnnnnnnnnnnnnnnnnnnnnnnnnnnnnnnnnnnnnnnnnnnnnnnnnnnnnnnnnnnnnnnnnnnnnnnnnnnnnnnnnnnnnnnnnnnnnnnnnnnnnnnnnnnnnnnnnnnnnnnnnnnnnnnnnnnnnnnnnnnnnnnnnnnnnnnnnnnnnnnnnnnnnnnnnnnnnnnnnnnnnnnnnnnnnnnnnnnnnnnnnnnnnnnnnnnnnnnnnnnnnnnnnnnnnnnnnnnnnnnnnnnnnnnnnnnnnnnnnnnnnnnnnnnnnnnnnnnnnnnnnnnnnnnnnnnnnnnnnnnnnnnnnnnnnnnnnnnnnnnnnnnnnnnnnnnnnnnnnnnnnnnnnnnnnnnnnnnnnnnnnnnnnnnnnnnnnnnnnnnnnnnnnnnnnnnnnnnnnnnnnnnnnnnnnnnnnnnnnnnnnnnnnnnnnnnnnnnnnnnnnnnnnnnnnnnnnnnnnnnnnnnnnnnnnnnnnnnnnnnnnnnnnnnnnnnnnnnnnnnnnnnnnnnnnnnnnnnnnnnnnnnnnnnnnnnnnnnnnnnnnnnnnnnnnnnnnnnnnnnnnnnnnnnnnnnnnnnnnnnnnnnnnnnnnnnnnnnnnnnnnnnnnnnnnnnnnnnnnnnnnnnnnnnnnnnnnnnnnnnnnnnnnnnnnnnnnnnnnnnnnnnnnnnnnnnnnnnnnnnnnnnnnnnnnnnnnnnnnnnnnnnnnnnnnnnnnnnnnnnnnnnnnnnnnnnnnnnnnnnnnnnnnnnnnnnnnnnnnnnnnnnnnnnnnnnnnnnnnnnnnnnnnnnnnnnnnnnnnnnnnnnnnnnnnnnnnnnnnnnnnnnnnnnnnnnnnnnnnnnnnnnnnnnnnnnnnnnnnnnnnnnnnnnnnnnnnnnnnnnnnnnnnnnnnnnnnnnnnnnnnnnnnnnnnnnnnnnnnnnnnnnnnnnnnnnnnnnnnnnnnnnnnnnnnnnnnnnnnnnnnnnnnnnnnnnnnnnnnnnnnnnnnnnnnnnnnnnnnnnnnnnnnnnnnnnnnnnnnnnnnnnnnnnnnnnnnnnnnnnnnnnnnnnnnnnnnnnnnnnnnnnnnnnnnnnnnnnnnnnnnnnnnnnnnnnnnnnnnnnnnnnnnnnnnnnnnnnnnnnnnnnnnnnnnnnnnnnnnnnnnnnnnnnnnnnnnnnnnnnnnnnnnnnnnnnnnnnnnnnnnnnnnnnnnnnnnnnnnnnnnnnnnnnnnnnnnnnnnnnnnnnnnnnnnnnnnnnnnnnnnnnnnnnnnnnnnnnnnnnnnnnnnnnnnnnnnnnnnnnnnnnnnnnnnnnnnnnnnnnnnnnnnnnnnnnnnnnnnnnnnnnnnnnnnnnnnnnnnnnnnnnnnnnnnnnnnnnnnnnnnnnnnnnnnnnnnnnnnnnnnnnnnnnnnnnnnnnnnnnnnnnnnnnnnnnnnnnnnnnnnnnnnnnnnnnnnnnnnnnnnnnnnnnnnnnnnnnnnnnnnnnnnnnnnnnnnnnnnnnnnnnnnnnnnnnnnnnnnnnnnnnnnnnnnnnnnnnnnnnnnnnnnnnnnnnnnnnnnnnnnnnnnnnnnnnnnnnnnnnnnnnnnnnnnnnnnnnnnnnnnnnnnnnnnnnnnnnnnnnnnnnnnnnnnnnnnnnnnnnnnnnnnnnnnnnnnnnnnnnnnnnnnnnnnnnnnnnnnnnnnnnnnnnnnnnnnnnnnnnnnnnnnnnnnnnnnnnnnnnnnnnnnnnnnnnnnnnnnnnnnnnnnnnnnnnnnnnnnnnnnnnnnnnnnnnnnnnnnnnnnnnnnnnnnnnnnnnnnnnnnnnnnnnnnnnnnnnnnnnnnnnnnnnnnnnnnnnnnnnnnnnnnnnnnnnnnnnnnnnnnnnnnnnnnnnnnnnnnnnnnnnnnnnnnnnnnnnnnnnnnnnnnnnnnnnnnnnnnnnnnnnnnnnnnnnnnnnnnnnnnnnnnnnnnnnnnnnnnnnnnnnnnnnnnnnnnnnnnnnnnnnnnnnnnnnnnnnnnnnnnnnnnnnnnnnnnnnnnnnnnnnnnnnnnnnnnnnnnnnnnnnnnnnnnnnnnnnnnnnnnnnnnnnnnnnnnnnnnnnnnnnnnnnnnnnnnnnnnnnnnnnnnnnnnnnnnnnnnnnnnnnnnnnnnnnnnnnnnnnnnnnnnnnnnnnnnnnnnnnnnnnnnnnnnnnnnnnnnnnnnnnnnnnnnnnnnnnnnnnnnnnnnnnnnnnnnnnnnnnnnnnnnnnnnnnnnnnnnnnnnnnnnnnnnnnnnnnnnnnnnnnnnnnnnnnnnnnnnnnnnnnnnnnnnnnnnnnnnnnnnnnnnnnnnnnnnnnnnnnnnnnnnnnnnnnnnnnnnnnnnnnnnnnnnnnnnnnnnnnnnnnnnnnnnnnnnnnnnnnnnnnnnnnnnnnnnnnnnnnnnnnnnnnnnnnnnnnnnnnnnnnnnnnnnnnnnnnnnnnnnnnnnnnnnnnnnnnnnnnnnnnnnnnnnnnnnnnnnnnnnnnnnnnnnnnnnnnnnnnnnnnnnnnnnnnnnnnnnnnnnnnnnnnnnnnnnnnnnnnnnnnnnnnnnnnnnnnnnnnnnnnnnnnnnnnnnnnnnnnnnnnnnnnnnnnnnnnnnnnnnnnnnnnnnnnnnnnnnnnnnnnnnnnnnnnnnnnnnnnnnnnnnnnnnnnnnnnnnnnnnnnnnnnnnnnnnnnnnnnnnnnnnnnnnnnnnnnnnnnnnnnnnnnnnnnnnnnnnnnnnnnnnnnnnnnnnnnnnnnnnnnnnnnnnnnnnnnnnnnnnnnnnnnnnnnnnnnnnnnnnnnnnnnnnnnnnnnnnnnnnnnnnnnnnnnnnnnnnnnnnnnnnnnnnnnnnnnnnnnnnnnnnnnnnnnnnnnnnnnnnnnnnnnnnnnnnnnnnnnnnnnnnnnnnnnnnnnnnnnnnnnnnnnnnnnnnnnnnnnnnnnnnnnnnnnnnnnnnnnnnnnnnnnnnnnnnnnnnnnnnnnnnnnnnnnnnnnnnnnnnnnnnnnnnnnnnnnnnnnnnnnnnnnnnnnnnnnnnnnnnnnnnnnnnnnnnnnnnnnnnnnnnnnnnnnnnnnnnnnnnnnnnnnnnnnnnnnnnnnnnnnnnnnnnnnnnnnnnnnnnnnnnnnnnnnnnnnnnnnnnnnnnnnnnnnnnnnnnnnnnnnnnnnnnnnnnnnnnnnnnnnnnnnnnnnnnnnnnnnnnnnnnnnnnnnnnnnnnnnnnnnnnnnnnnnnnnnnnnnnnnnnnnnnnnnnnnnnnnnnnnnnnnnnnnnnnnnnnnnnnnnnnnnnnnnnnnnnnnnnnnnnnnnnnnnnnnnnnnnnnnnnnnnnnnnnnnnnnnnnnnnnnnnnnnnnnnnnnnnnnnnnnnnnnnnnnnnnnnnnnnnnnnnnnnnnnnnnnnnnnnnnnnnnnnnnnnnnnnnnnnnnnnnnnnnnnnnnnnnnnnnnnnnnnnnnnnnnnnnnnnnnnnnnnnnnnnnnnnnnnnnnnnnnnnnnnnnnnnnnnnnnnnnnnnnnnnnnnnnnnnnnnnnnnnnnnnnnnnnnnnnnnnnnnnnnnnnnnnnnnnnnnnnnnnnnnnnnnnnnnnnnnnnnnnnnnnnnnnnnnnnnnnnnnnnnnnnnnnnnnnnnnnnnnnnnnnnnnnnnnnnnnnnnnnnnnnnnnnnnnnnnnnnnnnnnnnnnnnnnnnnnnnnnnnnnnnnnnnnnnnnnnnnnnnnnnnnnnnnnnnnnnnnnnnnnnnnnnnnnnnnnnnnnnnnnnnnnnnnnnnnnnnnnnnnnnnnnnnnnnnnnnnnnnnnnnnnnnnnnnnnnnnnnnnnnnnnnnnnnnnnnnnnnnnnnnnnnnnnnnnnnnnnnnnnnnnnnnnnnnnnnnnnnnnnnnnnnnnnnnnnnnnnnnnnnnnnnnnnnnnnnnnnnnnnnnnnnnnnnnnnnnnnnnnnnnnnnnnnnnnnnnnnnnnnnnnnnnnnnnnnnnnnnnnnnnnnnnnnnnnnnnnnnnnnnnnnnnnnnnnnnnnnnnnnnnnnnnnnnnnnnnnnnnnnnnnnnnnnnnnnnnnnnnnnnnnnnnnnnnnnnnnnnnnnnnnnnnnnnnnnnnnnnnnnnnnnnnnnnnnnnnnnnnnnnnnnnnnnnnnnnnnnnnnnnnnnnnnnnnnnnnnnnnnnnnnnnnnnnnnnnnnnnnnnnnnnnnnnnnnnnnnnnnnnnnnnnnnnnnnnnnnnnnnnnnnnnnnnnnnnnnnnnnnnnnnnnnnnnnnnnnnnnnnnnnnnnnnnnnnnnnnnnnnnnnnnnnnnnnnnnnnnnnnnnnnnnnnnnnnnnnnnnnnnnnnnnnnnnnnnnnnnnnnnnnnnnnnnnnnnnnnnnnnnnnnnnnnnnnnnnnnnnnnnnnnnnnnnnnnnnnnnnnnnnnnnnnnnnnnnnnnnnnnnnnnnnnnnnnnnnnnnnnnnnnnnnnnnnnnnnnnnnnnnnnnnnnnnnnnnnnnnnnnnnnnnnnnnnnnnnnnnnnnnnnnnnnnnnnnnnnnnnnnnnnnnnnnnnnnnnnnnnnnnnnnnnnnnnnnnnnnnnnnnnnnnnnnnnnnnnnnnnnnnnnnnnnnnnnnnnnnnnnnnnnnnnnnnnnnnnnnnnnnnnnnnnnnnnnnnnnnnnnnnnnnnnnnnnnnnnnnnnnnnnnnnnnnnnnnnnnnnnnnnnnnnnnnnnnnnnnnnnnnnnnnnnnnnnnnnnnnnnnnnnnnnnnnnnnnnnnnnnnnnnnnnnnnnnnnnnnnnnnnnnnnnnnnnnnnnnnnnnnnnnnnnnnnnnnnnnnnnnnnnnnnnnnnnnnnnnnnnnnnnnnnnnnnnnnnnnnnnnnnnnnnnnnnnnnnnnnnnnnnnnnnnnnnnnnnnnnnnnnnnnnnnnnnnnnnnnnnnnnnnnnnnnnnnnnnnnnnnnnnnnnnnnnnnnnnnnnnnnnnnnnnnnnnnnnnnnnnnnnnnnnnnnnnnnnnnnnnnnnnnnnnnnnnnnnnnnnnnnnnnnnnnnnnnnnnnnnnnnnnnnnnnnnnnnnnnnnnnnnnnnnnnnnnnnnnnnnnnnnnnnnnnnnnnnnnnnnnnnnnnnnnnnnnnnnnnnnnnnnnnnnnnnnnnnnnnnnnnnnnnnnnnnnnnnnnnnnnnnnnnnnnnnnnnnnnnnnnnnnnnnnnnnnnnnnnnnnnnnnnnnnnnnnnnnnnnnnnnnnnnnnnnnnnnnnnnnnnnnnnnnnnnnnnnnnnnnnnnnnnnnnnnnnnnnnnnnnnnnnnnnnnnnnnnnnnnnnnnnnnnnnnnnnnnnnnnnnnnnnnnnnnnnnnnnnnnnnnnnnnnnnnnnnnnnnnnnnnnnnnnnnnnnnnnnnnnnnnnnnnnnnnnnnnnnnnnnnnnnnnnnnnnnnnnnnnnnnnnnnnnnnnnnnnnnnnnnnnnnnnnnnnnnnnnnnnnnnnnnnnnnnnnnnnnnnnnnnnnnnnnnnnnnnnnnnnnnnnnnnnnnnnnnnnnnnnnnnnnnnnnnnnnnnnnnnnnnnnnnnnnnnnnnnnnnnnnnnnnnnnnnnnnnnnnnnnnnnnnnnnnnnnnnnnnnnnnnnnnnnnnnnnnnnnnnnnnnnnnnnnnnnnnnnnnnnnnnnnnnnnnnnnnnnnnnnnnnnnnnnnnnnnnnnnnnnnnnnnnnnnnnnnnnnnnnnnnnnnnnnnnnnnnnnnnnnnnnnnnnnnnnnnnnnnnnnnnnnnnnnnnnnnnnnnnnnnnnnnnnnnnnnnnnnnnnnnnnnnnnnnnnnnnnnnnnnnnnnnnnnnnnnnnnnnnnnnnnnnnnnnnnnnnnnnnnnnnnnnnnnnnnnnnnnnnnnnnnnnnnnnnnnnnnnnnnnnnnnnnnnnnnnnnnnnnnnnnnnnnnnnnnnnnnnnnnnnnnnnnnnnnnnnnnnnnnnnnnnnnnnnnnnnnnnnnnnnnnnnnnnnnnnnnnnnnnnnnnnnnnnnnnnnnnnnnnnnnnnnnnnnnnnnnnnnnnnnnnnnnnnnnnnnnnnnnnnnnnnnnnnnnnnnnnnnnnnnnnnnnnnnnnnnnnnnnnnnnnnnnnnnnnnnnnnnnnnnnnnnnnnnnnnnnnnnnnnnnnnnnnnnnnnnnnnnnnnnnnnnnnnnnnnnnnnnnnnnnnnnnnnnnnnnnnnnnnnnnnnnnnnnnnnnnnnnnnnnnnnnnnnnnnnnnnnnnnnnnnnnnnnnnnnnnnnnnnnnnnnnnnnnnnnnnnnnnnnnnnnnnnnnnnnnnnnnnnnnnnnnnnnnnnnnnnnnnnnnnnnnnnnnnnnnnnnnnnnnnnnnnnnnnnnnnnnnnnnnnnnnnnnnnnnnnnnnnnnnnnnnnnnnnnnnnnnnnnnnnnnnnnnnnnnnnnnnnnnnnnnnnnnnnnnnnnnnnnnnnnnnnnnnnnnnnnnnnnnnnnnnnnnnnnnnnnnnnnnnnnnnnnnnnnnnnnnnnnnnnnnnnnnnnnnnnnnnnnnnnnnnnnnnnnnnnnnnnnnnnnnnnnnnnnnnnnnnnnnnnnnnnnnnnnnnnnnnnnnnnnnnnnnnnnnnnnnnnnnnnnnnnnnnnnnnnnnnnnnnnnnnnnnnnnnnnnnnnnnnnnnnnnnnnnnnnnnnnnnnnnnnnnnnnnnnnnnnnnnnnnnnnnnnnnnnnnnnnnnnnnnnnnnnnnnnnnnnnnnnnnnnnnnnnnnnnnnnnnnnnnnnnnnnnnnnnnnnnnnnnnnnnnnnnnnnnnnnnnnnnnnnnnnnnnnnnnnnnnnnnnnnnnnnnnnnnnnnnnnnnnnnnnnnnnnnnnnnnnnnnnnnnnnnnnnnnnnnnnnnnnnnnnnnnnnnnnnnnnnnnnnnnnnnnnnnnnnnnnnnnnnnnnnnnnnnnnnnnnnnnnnnnnnnnnnnnnnnnnnnnnnnnnnnnnnnnnnnnnnnnnnnnnnnnnnnnnnnnnnnnnnnnnnnnnnnnnnnnnnnnnnnnnnnnnnnnnnnnnnnnnnnnnnnnnnnnnnnnnnnnnnnnnnnnnnnnnnnnnnnnnnnnnnnnnnnnnnnnnnnnnnnnnnnnnnnnnnnnnnnnnnnnnnnnnnnnnnnnnnnnnnnnnnnnnnnnnnnnnnnnnnnnnnnnnnnnnnnnnnnnnnnnnnnnnnnnnnnnnnnnnnnnnnnnnnnnnnnnnnnnnnnnnnnnnnnnnnnnnnnnnnnnnnnnnnnnnnnnnnnnnnnnnnnnnnnnnnnnnnnnnnnnnnnnnnnnnnnnnnnnnnnnnnnnnnnnnnnnnnnnnnnnnnnnnnnnnnnnnnnnnnnnnnnnnnnnnnnnnnnnnnnnnnnnnnnnnnnnnnnnnnnnnnnnnnnnnnnnnnnnnnnnnnnnnnnnnnnnnnnnnnnnnnnnnnnnnnnnnnnnnnnnnnnnnnnnnnnnnnnnnnnnnnnnnnnnnnnnnnnnnnnnnnnnnnnnnnnnnnnnnnnnnnnnnnnnnnnnnnnnnnnnnnnnnnnnnnnnnnnnnnnnnnnnnnnnnnnnnnnnnnnnnnnnnnnnnnnnnnnnnnnnnnnnnnnnnnnnnnnnnnnnnnnnnnnnnnnnnnnnnnnnnnnnnnnnnnnnnnnnnnnnnnnnnnnnnnnnnnnnnnnnnnnnnnnnnnnnnnnnnnnnnnnnnnnnnnnnnnnnnnnnnnnnnnnnnnnnnnnnnnnnnnnnnnnnnnnnnnnnnnnnnnnnnnnnnnnnnnnnnnnnnnnnnnnnnnnnnnnnnnnnnnnnnnnnnnnnnnnnnnnnnnnnnnnnnnnnnnnnnnnnnnnnnnnnnnnnnnnnnnnnnnnnnnnnnnnnnnnnnnnnnnnnnnnnnnnnnnnnnnnnnnnnnnnnnnnnnnnnnnnnnnnnnnnnnnnnnnnnnnnnnnnnnnnnnnnnnnnnnnnnnnnnnnnnnnnnnnnnnnnnnnnnnnnnnnnnnnnnnnnnnnnnnnnnnnnnnnnnnnnnnnnnnnnnnnnnnnnnnnnnnnnnnnnnnnnnnnnnnnnnnnnnnnnnnnnnnnnnnnnnnnnnnnnnnnnnnnnnnnnnnnnnnnnnnnnnnnnnnnnnnnnnnnnnnnnnnnnnnnnnnnnnnnnnnnnnnnnnnnnnnnnnnnnnnnnnnnnnnnnnnnnnnnnnnnnnnnnnnnnnnnnnnnnnnnnnnnnnnnnnnnnnnnnnnnnnnnnnnnnnnnnnnnnnnnnnnnnnnnnnnnnnnnnnnnnnnnnnnnnnnnnnnnnnnnnnnnnnnnnnnnnnnnnnnnnnnnnnnnnnnnnnnnnnnnnnnnnnnnnnnnnnnnnnnnnnnnnnnnnnnnnnnnnnnnnnnnnnnnnnnnnnnnnnnnnnnnnnnnnnnnnnnnnnnnnnnnnnnnnnnnnnnnnnnnnnnnnnnnnnnnnnnnnnnnnnnnnnnnnnnnnnnnnnnnnnnnnnnnnnnnnnnnnnnnnnnnnnnnnnnnnnnnnnnnnnnnnnnnnnnnnnnnnnnnnnnnnnnnnnnnnnnnnnnnnnnnnnnnnnnnnnnnnnnnnnnnnnnnnnnnnnnnnnnnnnnnnnnnnnnnnnnnnnnnnnnnnnnnnnnnnnnnnnnnnnnnnnnnnnnnnnnnnnnnnnnnnnnnnnnnnnnnnnnnnnnnnnnnnnnnnnnnnnnnnnnnnnnnnnnnnnnnnnnnnnnnnnnnnnnnnnnnnnnnnnnnnnnnnnnnnnnnnnnnnnnnnnnnnnnnnnnnnnnnnnnnnnnnnnnnnnnnnnnnnnnnnnnnnnnnnnnnnnnnnnnnnnnnnnnnnnnnnnnnnnnnnnnnnnnnnnnnnnnnnnnnnnnnnnnnnnnnnnnnnnnnnnnnnnnnnnnnnnnnnnnnnnnnnnnnnnnnnnnnnnnnnnnnnnnnnnnnnnnnnnnnnnnnnnnnnnnnnnnnnnnnnnnnnnnnnnnnnnnnnnnnnnnnnnnnnnnnnnnnnnnnnnnnnnnnnnnnnnnnnnnnnnnnnnnnnnnnnnnnnnnnnnnnnnnnnnnnnnnnnnnnnnnnnnnnnnnnnnnnnnnnnnnnnnnnnnnnnnnnnnnnnnnnnnnnnnnnnnnnnnnnnnnnnnnnnnnnnnnnnnnnnnnnnnnnnnnnnnnnnnnnnnnnnnnnnnnnnnnnnnnnnnnnnnnnnnnnnnnnnnnnnnnnnnnnnnnnnnnnnnnnnnnnnnnnnnnnnnnnnnnnnnnnnnnnnnnnnnnnnnnnnnnnnnnnnnnnnnnnnnnnnnnnnnnnnnnnnnnnnnnnnnnnnnnnnnnnnnnnnnnnnnnnnnnnnnnnnnnnnnnnnnnnnnnnnnnnnnnnnnnnnnnnnnnnnnnnnnnnnnnnnnnnnnnnnnnnnnnnnnnnnnnnnnnnnnnnnnnnnnnnnnnnnnnnnnnnnnnnnnnnnnnnnnnnnnnnnnnnnnnnnnnnnnnnnnnnnnnnnnnnnnnnnnnnnnnnnnnnnnnnnnnnnnnnnnnnnnnnnnnnnnnnnnnnnnnnnnnnnnnnnnnnnnnnnnnnnnnnnnnnnnnnnnnnnnnnnnnnnnnnnnnnnnnnnnnnnnnnnnnnnnnnnnnnnnnnnnnnnnnnnnnnnnnnnnnnnnnnnnnnnnnnnnnnnnnnnnnnnnnnnnnnnnnnnnnnnnnnnnnnnnnnnnnnnnnnnnnnnnnnnnnnnnnnnnnnnnnnnnnnnnnnnnnnnnnnnnnnnnnnnnnnnnnnnnnnnnnnnnnnnnnnnnnnnnnnnnnnnnnnnnnnnnnnnnnnnnnnnnnnnnnnnnnnnnnnnnnnnnnnnnnnnnnnnnnnnnnnnnnnnnnnnnnnnnnnnnnnnnnnnnnnnnnnnnnnnnnnnnnnnnnnnnnnnnnnnnnnnnnnnnnnnnnnnnnnnnnnnnnnnnnnnnnnnnnnnnnnnnnnnnnnnnnnnnnnnnnnnnnnnnnnnnnnnnnnnnnnnnnnnnnnnnnnnnnnnnnnnnnnnnnnnnnnnnnnnnnnnnnnnnnnnnnnnnnnnnnnnnnnnnnnnnnnnnnnnnnnnnnnnnnnnnnnnnnnnnnnnnnnnnnnnnnnnnnnnnnnnnnnnnnnnnnnnnnnnnnnnnnnnnnnnnnnnnnnnnnnnnnnnnnnnnnnnnnnnnnnnnnnnnnnnnnnnnnnnnnnnnnnnnnnnnnnnnnnnnnnnnnnnnnnnnnnnnnnnnnnnnnnnnnnnnnnnnnnnnnnnnnnnnnnnnnnnnnnnnnnnnnnnnnnnnnnnnnnnnnnnnnnnnnnnnnnnnnnnnnnnnnnnnnnnnnnnnnnnnnnnnnnnnnnnnnnnnnnnnnnnnnnnnnnnnnnnnnnnnnnnnnnnnnnnnnnnnnnnnnnnnnnnnnnnnnnnnnnnnnnnnnnnnnnnnnnnnnnnnnnnnnnnnnnnnnnnnnnnnnnnnnnnnnnnnnnnnnnnnnnnnnnnnnnnnnnnnnnnnnnnnnnnnnnnnnnnnnnnnnnnnnnnnnnnnnnnnnnnnnnnnnnnnnnnnnnnnnnnnnnnnnnnnnnnnnnnnnnnnnnnnnnnnnnnnnnnnnnnnnnnnnnnnnnnnnnnnnnnnnnnnnnnnnnnnnnnnnnnnnnnnnnnnnnnnnnnnnnnnnnnnnnnnnnnnnnnnnnnnnnnnnnnnnnnnnnnnnnnnnnnnnnnnnnnnnnnnnnnnnnnnnnnnnnnnnnnnnnnnnnnnnnnnnnnnnnnnnnnnnnnnnnnnnnnnnnnnnnnnnnnnnnnnnnnnnnnnnnnnnnnnnnnnnnnnnnnnnnnnnnnnnnnnnnnnnnnnnnnnnnnnnnnnnnnnnnnnnnnnnnnnnnnnnnnnnnnnnnnnnnnnnnnnnnnnnnnnnnnnnnnnnnnnnnnnnnnnnnnnnnnnnnnnnnnnnnnnnnnnnnnnnnnnnnnnnnnnnnnnnnnnnnnnnnnnnnnnnnnnnnnnnnnnnnnnnnnnnnnnnnnnnnnnnnnnnnnnnnnnnnnnnnnnnnnnnnnnnnnnnnnnnnnnnnnnnnnnnnnnnnnnnnnnnnnnnnnnnnnnnnnnnnnnnnnnnnnnnnnnnnnnnnnnnnnnnnnnnnnnnnnnnnnnnnnnnnnnnnnnnnnnnnnnnnnnnnnnnnnnnnnnnnnnnnnnnnnnnnnnnnnnnnnnnnnnnnnnnnnnnnnnnnnnnnnnnnnnnnnnnnnnnnnnnnnnnnnnnnnnnnnnnnnnnnnnnnnnnnnnnnnnnnnnnnnnnnnnnnnnnnnnnnnnnnnnnnnnnnnnnnnnnnnnnnnnnnnnnnnnnnnnnnnnnnnnnnnnnnnnnnnnnnnnnnnnnnnnnnnnnnnnnnnnnnnnnnnnnnnnnnnnnnnnnnnnnnnnnnnnnnnnnnnnnnnnnnnnnnnnnnnnnnnnnnnnnnnnnnnnnnnnnnnnnnnnnnnnnnnnnnnnnnnnnnnnnnnnnnnnnnnnnnnnnnnnnnnnnnnnnnnnnnnnnnnnnnnnnnnnnnnnnnnnnnnnnnnnnnnnnnnnnnnnnnnnnnnnnnnnnnnnnnnnnnnnnnnnnnnnnnnnnnnnnnnnnnnnnnnnnnnnnnnnnnnnnnnnnnnnnnnnnnnnnnnnnnnnnnnnnnnnnnnnnnnnnnnnnnnnnnnnnnnnnnnnnnnnnnnnnnnnnnnnnnnnnnnnnnnnnnnnnnnnnnnnnnnnnnnnnnnnnnnnnnnnnnnnnnnnnnnnnnnnnnnnnnnnnnnnnnnnnnnnnnnnnnnnnnnnnnnnnnnnnnnnnnnnnnnnnnnnnnnnnnnnnnnnnnnnnnnnnnnnnnnnnnnnnnnnnnnnnnnnnnnnnnnnnnnnnnnnnnnnnnnnnnnnnnnnnnnnnnnnnnnnnnnnnnnnnnnnnnnnnnnnnnnnnnnnnnnnnnnnnnnnnnnnnnnnnnnnnnnnnnnnnnnnnnnnnnnnnnnnnnnnnnnnnnnnnnnnnnnnnnnnnnnnnnnnnnnnnnnnnnnnnnnnncaggcacccagggcaggcaggcaagctgcacgctgtcatcgcctaagtcagaggcattgggcacgcttaattacaggggaagcagaatctgactgcactttctgtgccagctgctgagttcgtttgcatcgtcatttttttttcctttttcatacctcaatggaataaatctgaaagatgtttagagctagattttcaccagcaggtcttcagaaatgaatacagggatgaggaatttcatccatttatccttgcgttggctgagcaaatatttattaagtgcctgttttatccaggtactgtgcttggtgctaggggggttctcagatttgttttctaaggtgaaacaataggaatttggagccaccgatattttccatgctcatcacaagggagaggggagctataatatttggacatcacaatgaggtaaactggaagtaatcagcccagaagacactgcctggttcctggaaggtgaagattgagatgcaggctcataggtgggaagctctgccttagatctgggcattgtgatatttccattaatgaggcataaggtggaaaggtggtgcctgtcatctgggcttgacaatctcctcagtgccctagaagaaagtcttccctcctatggcgatttctctttctctttctttttttctttttcttttaaattatactttaagttctagcgtacatgtgcacaacatgcaggtttgatccataggtatatgtgtgccatgttggtttgctgtacccatcaactcattatttacattagatatttctcctaatgctatccttcccccagccctccaccccctgacaggccccagtgtgtgatgttccctgccctgtgtccaagtgatcttattgttcagttctcacctatgagtaagaagatgtgatgtttggttttctgtccttgtgatagtttgctgagaatgatggtttccagcttcatctatgtccctgcaaaggacatgaattcatccttttttatggctgcatagtattccatggcgtatatgtgccacattttcttaatccagtctattgctgttgaacatttgggttggttccaagtctttgctattgtgagtagtgctgcaataaacatacgtgtgcatgtgtctttacagcagcgtgatttataatcctttgggtatatacccagtaatgggattgctgggtcaaatggtatttctagttctagattcttgcagaatcgccacactgtctcaatggttgaactaatttacgctcccaccaacagtgtaaaagtgttcctatttctccacatcctctccagcatctgttgtttcctgactttttaatgatcgccattctaactgacgtgagatggtatctcattgtgttttgatttgcatttccctgctgaccagtgatggtgagcattttttcatgtgtctgttggctgcacagatgtcttcttttgagaagtgtctgttcatgtcctttgcccattttttgatggggttgtttgtttttttcttgtaaatttgtttgagttctttgtagattctggatattagccctttgtcaaatgggtagrttgcraaaattttctcccattttgtaggttgcctgttcactctgatggtagtttcttttgccgtgcagaagctctttagtttaattagatcccatttgtctattttggcttttgttgccattgcttttgttgttttagtcatgaaatccttgctatgggtcttaaaatctctatggaatctaaatttggtgtcaagttagcttattttttattctactttgggtgtaaatgaaaacagatgaatgccaccttccttaacaatagtcttttgttcattttaaatctgaaatttttgttttggtaacattttgaatgtatattaaagcttttttcagcttcccccccccagctattaatagaaacaaactcttgctgtttatttatgacagaacacacgcaggacttgaaagatgttactaataatgtccactacgagaactatggaatcagaaaactggcagctgtgacttatcatggagttgataacaagaagaataaagggcagtttgctaagtaagtatatattttttctccaaaaaaaggtattctttctgtagtcaataatcatattgtttcattttcattaaatttctcctggctactcagtagaaaatttggataatattctctatgcacaacagcataaatttatattgttatgctttgttaatagtagaagcttttttgaatgaaccattttgatagagttttcacttacagattgtgtggaaacaaaggacaggctttaagaaaaggaatatttagatgaatttattcttggttaccttctctaatcctattccagggagtaaattacttggagtttcagtttcttcttttggttgttagagtggtgtaagtgactatgaagtgtgtagctttgccctattgagcttatatctcaagctgtggtagtttcatgttggggtcaaaaaaagagatgtgtgaggaagctgataaccatgtctgtgccctacttttaaaaaatttgtcattattgaagatcacaattacatcatatgtcacttagcaatggggatacattctaagaaatgtgtcattgggctatttcctcattctgtaaacatgattgagtgtacctacataaacctagatggtagagccttctgcacacctaggttatgcggtctagctatcgcttgtaggcagtaaacctatacagcatgttactgtatggaatgttatagacagttgtaacataatgttaagtatttgtgtatctaaacatagaaaaggtgcagtaaaaatacagtgtaaaagattacaaatggtatatctgcatagggcacttggtgtgaatggagcttgcaggactggaagttgctctgggtgagtcagtgagtgagcggtgagtgaatgtgaaggcctaggacattactgtacactactgtggactttatgaacactgtacacttaggctatactaaatttactttttaaatttatctttagtaaacttattttgctgtaacttttataataaatttttaaaaactttttgattcttttgtagtaacacttagcttaaaacacaaacacatgaacagatgtacaaaaatattatctttataatctttatcccataagcttttttctattttaaaagttctttcttttttcacttaaaacttttttttgttaaaaacgaaaacataaacttacacattagcctaggcctattcagggtcaagatcatcaaaatgctaccgggcagtaggaatttttcagttcctatgggccaccatcatatatgcagtcccttgttgactgaaatatcattatgcagtgcatagctgtattacgaaaccattttaaataatgtgcatttgtagctcggtgttatctaccattagacaataatcctgacggatcaactatataaatacataatacaagttctcaaagtagctgtggtgttttccatagtggttaacatgctttatcatggaatagaaaaatgtcccttcttaaatatttaaaatacaagattctgtttgaggtaagcctcaatacatgaacagaaggaaggctttttatctctttttagcaaaatgtttattgagcaactttggcacaaaaatgtaaggatccatcatagtgaatattgttcataaaatcctaattcactttaaactcattctcattaatgatgaatgttttaactcattaaaagaaacacatacacaaagctactgataattttgtatattaaaagaaaatatacaaaatatacaaaaaatatatgtacttatacaatatattttttaaaacatttgttatgttgtcgatataaggaaytgtttaattgttcccatgtctcaaatgtaaggctttttaaagtagtgctgttggatgcaggtaagataattcagagaaaaatagtaaactttacagtatcattwrgtttttttccgcatacacaaaattctgtgtrgatacgtgagttaaactatatcccaggtgaaaacataaatagtagaattctactggaaatatatctcttaaagagaggaatcataccatactttktctatgcgaataagaaaagaaatgtttgcattgctaaaaagcaaattgccccaggagctagcataatattttattttatgttaataataagtagaacaataaacatttgagaagatcaagccaactagggaatggctgtaattggaatagatatttgatatgatttgataaattagattgttactacttcattgaataacacatactgaatctgaaagaaatcgcttagaagtttatctattggttgtatcttacattgtcttgaaaatgttagcaatttcaaaaaatatttttgttaaatttttctttaaaagtcattaacaacttatggtgctttagctgatgtaaggtgcttttcctcatagctcagtacatatccatgaataactgaaaagaaagactaatgtttaartaagtgaagtaagcaggtatgagttaggcttcttttaatsttctttttrtattgctctcatgcgactctccatagcaatgtattctttaacagtggtagtggygaggggttgagagttgcaagaattttggaatggaacatgaacctattgaaaatttatagttaaattgatctttggcaatgtatgcttcacaaagtgctaatcacactttggttttagaatataagctaaactttttaaagatgttagacattgaakagtaaaatacattcatgtgccacataacgatgttttggtcaatgactgactgcatatatgacaagatcccataatattataatgtctataccatagagcctaagtgtgtagtaggttatactatctacggtcatgtaagtacactctgttgttcacacaatgacaaatgaatttctctgaatgtatccccattgttaagcagtgcatgactgtagatcaatttatcttatatttaaattttctgaggtagttttgggcaaactgtagaggctattgaaacatgaaataaaaataaaaattaaaaatacatgtgtagatgtctgaaaatgtgcctttctgttaatagccctggaacaattctattttagagggacttaaaacaagaattagatgcgttgtttaaatctgaagaatagctgaacttgtccagtcagctatartttgtctcaaggttagatctggagaagcggatgctgttcttagcagctatccagtaattacctgtttctgacaaagaacgtatggagccatcaaagtacttcttaactccttagagaatatatcttgcatcccttatggagggtagtgggtggctgaaagccacagaaagggtagcctctcaaatcaaaggaaattcagcaagggtctgtaaaggaaaggggagaagagttggtcatatcagattgctgatctcttaaaggaagtgattcccaataagaggagggccatcttgttaaacttccttcttgaacttttatctgcctccttttttcttgatcttcattgtaccttttacttaaaatcacatttgattggtgactctttttcagaactgatgtgtatcattggtaccaattgtgacaatagataccttgctccaagttggggcacaccctagtctctctttcccttatgttaatttatttttctgttctccatagccttttccatcagtcatcttgggaaaactttataagtaaatgactaaaaatacaggttccaaaggcagatcctcagaattcttcatacaagagttctcattgatctaaatagaaataaagacaattttctgaaaatttcaagttgtttcaaaaaattaaacttatttatttatatcttttactctttattcaagtgtcctttcataaaattataatgatagtagttggagttttgtttatgtttggttttaatactcttacttggcaaaacaagatgttggcaaccattattacttaaaatttttggaaatttttattgatctttcaaataatttaagtgaaattcctttggaaaattttgcacatagtgacctactaaccactggagcgaaaaagtatgtaaatctacttgcttaatgtattctttaggaaagacaaccacacataatttaaatgaaacatgattgttttttattatactccaagggtgggtcacgtgtaatgcagcaaagtagaacttgactaggtcatccttatgtggtggctgtaattctcttattagtcacatgaaggggtgtggcttgcaggaattttaaccttataaagacatccctagaaggagctaaatctttggggatttagtttcatattcgggttatgttgtaaccatttacttttgcttgttttactaggcttttttcatttctttgggtttttaatttcgctgataggtttataagctttactactatatgtgtgtgtgtaagagtttcctatttaaaagcaggcaggcaatgatataacttaaatggtttttccagctgtttaataaaaggttttacttggaaaaaaatagtaaatgtgaagacaaaaagtgatttccctatattttctgccttgtaagcataattctttatttcaattttctaaaaattcataaagatgtctagaagtgaggtgttaatttacaaattaaaaatgtaaaatatttttactggtgagagacttcaaaaaattcattttaaatatgcatgaacattttttcacagtatttgagtatgttcggtcagattatttttacaagcctaaaaacttacagtatcttaactgttaaatattgcaaatttcttttagaaagtacacacatttagcaggtttagaactttgaacagactgtcagaagataattgcacagcatatttattttcatagtgatttagtgtaatgattacaaacataatttgggaaataaattagctttagcgaattttactgtaaattttttatttatggcacataccttcataatttaattgtgaaagctacgcatttgccttcaattgaagcttttagcatgctttacttttaatgtgctaaatcgctaatttttgttcctttagatatgatacagttgaaggcatgtaaggcggggaattgtttttccaaagacatagtagttttactatacagggatttttaatacttaaattttgaatttaaaagaagtgtttttttttcccttcgagatggagccctgctctgtcacccaggctggagtgcagtggcacgatcttggctcactgcaacttttgcctcctgggttcaagcaattcttctgcctcagcctcccaagtagctgggattacaggtgtgcaccagcacatctggctaatttttgtatttttagtagagatgaggtttcaccatgttgtccaggctggttttgaactcckgaccttgtgatctggmggccttggcctcccaaagtgctgggattacaggcgtgagccactgtgcctggcctaaaagaagattttgaaacatcattgaatgttttctctgcagtctcttattttccccttgtagttatttaaataataatttaggtagcaaaattacctgctccttcccaaggataaagtaaaataaacattttatagatgagttatataagtaggagtagatatttaattatatctgatttctaatttaatgtacttacaatcacaattatattgttgaataatcttaagttgcttaaatatgcatattcggttacttaagattagcaattaatcgtttttagattatttattttctagagcctaaaaaagatttttggggtgttaggggacagtgggaattatagactctttgaaaatgtaacaaaagctttggaccctttcactggaagaatgctggcaaacacatttggtatgctgtttcagggcagtcactgacgttgtgtgtgctcagatcagaggcaactatattaaaaaacacctgccattaatatgagaaatatattattaagaaggatctcatcaacttttaaccaaaaaaaaaaaaaaaagatatttacacttgaaaatgtatttcagctgactccactttttttgtttttttttttttttggagacggagtctcgctctgttgcctaggctggagtgcagtggcatgatctccgctcactgcaagctccgcctcccgggtgccaccacacccagctaattttttgtatttttagtagagatggggtttcactgtgttagccaggatggtctcgatctcctgacctcgtgatccaaccgccttggcctcccaaagtgctgggattacaggcgtgagccaccgcgcccggcctcagctgactcgcttttaaaatgcaggttcttgttctaagttaatatgtctggttactttcattttcagaacttttgatccattgcttaattggaaaagtatatggcaggtttgcatgtagaagtaagttttctttcagtgaagaaatatccttgagttaaataacattttattctaatttacgcaattgcgaaaacagatcatcttaattaagaaaaactgatagccagtattctgtcttgttttgtttttarcattttcactctagctctcttgcctgcttcctttatagaaaagattgctgtgatggttagaaatatttagccaaataaggagaaaagacaccataataagagtgtgtcaaatcagggttaaaagttatgggtgaaatccaaggtctggtttttgtttttaagccatgagttaattcttttcttaaaattagtgtattacaataaaatttacccatttaaaatataaaccttaatggtcaaagcctgtttttatggaaacaaaacaagcatgctttattaacaaattcaaagaaggatctacctcatttaatttgtcccagggtattgaataattttcagagactctcaaagctaagagcccacttatctttctgctcctgggctgaaagcactaggtaatttggtattctcttgtgtctctgtgagtaagtatattggccttaacataaatcccacctgtaaatatatctcagtgtgaaaaattttgaacacaattgtccaaagagatttgagtccatggactttaacatcaacagagtgaatattttttttttatttaactatgcttatgtgtatattctggcatttaaaaaaataaaatatttgcttctgattatctctaaagtatgtgtgtgtgtgttaaatcattgaatttaagactgaaatatttgagttaagtggaattaatttttttttttttttttgagacagagtctctctctgtcacccaggctggagtgcagtggcgtgatctcggctcactgcaagctccacttcccaggttcacgccattctcctgcctcagcctcctgaatagatgggactacaggcgcccgccaccatgcccagctaattttttgtattttttttcagtagagacggtgtttcaccatgttagccaggatggtcttgatctcctgacctcgtgatccacccgcctcggcctcccaaagtgctgggattacaggcatgagccaccatgccggccaagtggaatgaattttcaagagcactgaagttactataagaggcctagaaatattctgtatacctaaatagtgctctaggtattgactagtagtgatttccaacgtatcagttcagttaccaaaataaataataatattgttcatttttgtggtgttagtagctgtcttagaagagattgtaacacttgaaattttggtaaaactaaaaatactctacatacattaacttcattactcatttcctgtttttcatgttaaaatgttgtttaaagaacaaaattaaatgattttcttctgatattttattctgtaaatgtattttgggaattttttccctcattttccttctacagtttatttggtatgtcatcatccttagatttgatatgtagtaggtttagagaacatctttgctttttacatttttttcataagttttatatatgaaatatcacagaaagaagttctaggttataaatatattaataatggcatatatacatatatagcatctctgttttcatcaaactgtttcatatttctattataatttttattcacagacatttaatgattacccttaatattcgtgacaggagccctctggcacaaatggaagaagaaagaagggagcaagtagctaaaattaagaagatggagatggagatggagcaggtgtttgaaatgaaggtcaaagaaaaagttcaaaaactgaaggactctgaagctgaggtaatcagtccaatattccagctcttagcagacattgtgttcctttttaaatagtatcttcagtaaaatttatagataatataaccttcttatacatattttttagaaattaataccctagcgtaacaaaatggagaaatttctagaagcaagccctgtttacaataaaataatatagacttcaatacataagtgcttggacatagtgtattaggtaggacagcatartagagtacttacaatgaattattaaagttataatgaacaagtgtgagttgtgaaaaataaaattataagccattccatacaggtggcataagaacactaaagatgagagtttgggggtggatttatgcacaaaaactagtgctaggataataataattgaccagacttacttgtgtatgaatgaaaaagagggaaataacctttattgaactaaagacatgcctggataaattacacacagttaaaggagagaaaattagggaatgtgatatttttgttaacaggttggccttctttatttataatgtagtgtcaaggtagttcctggtgttacaacattgggcagggtaatgacaaaacatcccagcagacatatctactatcttgaaacccttctagatgtcgagttatacatttagtttctattaatcaaaaagaccttggagacatttccttcagtaggtggcaagaaagaaaagatggagaaaaggataaacttaacataagaatccatagagcagtagtttgatagatatctgagaatagtagaaaaaaaattgggtaatcccaaaataaatcagtgatttcagtatgaagttttctcaacataaatctgttataattaaaaattacaggcccttgggaagcgtggagtctgggacgcccagcgcgggcccggagcagggggaagggaagcgcagctcggtccgcgtgggtggaagggacgtgaggccgccctaaggtggtggtcaaggaagggctctacggctcccaagctaggccaaacgcctccggcggccgcgcccaggcgccccttcccctgtggggcaaccctagccggggacgcgtgaaccacctccgtagccgccccgccagcacccccagccgtgcgcccctgcaccacgcagctgccctgcgcatggagcccagagggacagcaggcccggcccccagcaccaccggcctgccgggaggttcgggaaactggcgtcgcagcggagagggcatcaggccaacgcctcccccgaggctcagctgcgggctcccaggcgtaggcacccayggcccttacgctgaccgtagcttggacgccgctgccgccggggtccaatgccggtcatgcccatcccgcgggggttgtgctccttccatggtccacacaccacctgcctgcatgcggtctgtgggcccgtgggcgcctcccacctggcccgcaccaagtacaacagcttcgaggtgtgcatcaagacgcgctggctgtagggcttcatccacttcctgctctacttcagctgcagcctgtcactggggcacgctggccgccttcttctgcctgcagtacttgggcgttagcgtcctcctgtgcttccagcacaagctgtgggtgctgctgctgctgctgggccgctggcgcgtggaattccgcctggtgaacgagctgctcatctacagcatccacgtcaccatgctgctggatgggggcctgggctggtgcctcatggtcttcgtggacatgtgagggccgtgggcgcgagcttgatgtatcgtcccggcctgtggctgtgtcctctccatgggtgggatcggccagggccttcccttccgcccatcccgcaggcagtcgctgctgcccggcgcccatggagagtaaagaaagggctaagacttccgtgatggtgcgaacgccgtccctaggctggcttcctgcgcccaccctccccgtgtgcactctcaggggcggcgcccacctgctggtggctcctgctcccacgtcttcaggtcgtactgcggggtgggcctctctccaggaccacagctgccagggactttagacatcaccctgggaggccgctggacacagagggctgtgtgcccaggagcaaatccagacggggggggcccgcctggctgcacagccccttcctgcgtgccctggtcccagccgcagccaacgggacacggaagactcccctccctgacacaccacactgccacaaagctgcttactctgccctgggccgcctgaggcctggcactgcccgcggaccaccctctgtgtctcacctgaggggctgtgtgggttctgaagccccagccagccttcagggtcaccttggattgtgtagatgcagtctagcagggggccggagtggggctcaggtgggaggggtctcagcaggctcccagctcgggctggcctgggggaaccccgggagccaggggccaactccagcaacactggcctgtctgcctgttcctgtagggctgtatgtcctgcagatgctgtggatttctggggaggaacctccattcctttctggctttttttgcgggggaggactttgggcctctttctttgagggaacaccctcaaagaaagcctgggagattgaggctgcagtgagccaggatggggacttgcgcgtccgagtgtccggagcaggcggcagaggcttcagtgtggcaaccacagccccggagcttgtgtggcaccagcagcgtcttaaagcctcgggtatatgctgagaactactctttgaaggatggaatgttaacatttaaaggacccgtgaagagctctgggccaagttcccactaatactctaagccattagagaattaggcatgctcattctagatgctttgtcttttatgaaaccacatctagagtgtgtttaccaacatccctgtggtaatgagtttgcaaatcatcatgtatatgatacatgtaaatacataaataggtaaagaaacccttttagccttaatacagtttctccttaaattcattatgctggaaatatttggggcacagccagcagcacagtacatcagccacagcaccaagcaactttcatttattgtgtcatctagtgcacaccacagccctacaaggatattattgcccatctcccctttatagatgagaagaaggataagttaacttagtatgccagcatttaaacccagttaatttttaggtttgctgttaattgctagataggtctacagtcctgtttttcacaatttcagaatggaaaaagctctgaaaactgcaaaacctaagatgaactaagttttaatcctacatattgtgaatatttatatattttactgaaaaaaataaaaagtaatgtgtttgattatgtttgttgccccagatagcccaggaggtattttataaacatatactcctttctaagcagtgttgtcattttaataacagaaaaatgttgaactttgaaaggcatctgaccccatgggtttcttaagagtgagattgtgacctatacctttatctacatgcagttaacacaaaagataattacttacatatgacataaatgtaagttaaggaatgatgaacactgtaagccccaccaccagcttaaaaaaatagaatgttatcaactcatttgaagaccctgtgtgcctgtcccctattgtatccctctctctccattcccagaggtaactactattccgaattgtgtatatgtggttcccttgcatttaaaaaaaataactagagacactttcttatgttcctactttctgacattttcttagtaacttgtttgctgtcatcaggaagatttcacctgatttgactcatgtttgcttaaatgtgtcttacgtgattttgttttgtaggaattgcatgaaataattgaaataggaataaatctgaagtcacttcgggcttgcaaaaaagaaaacaaattgtatgcaaaattatattataatccaaattcaagatgttaactcaccaatgtagtaaaatctataacagaacataattcctggataactgaaggttttgaatagcccttgggtatttggcatagtaggatttaatctgatttttaaaatttgttgacttttttcagaaatggattgacttgcgcctaaatgaaattacttatctaatgatctcttggacgtaaagctctttgtttcttcagttattttgcatgagtgtttcccacctctcagtcagcattctttacagcattaatacacagcagaggaaggaccacctgcattagaatcactgtaacttgttgaaaatccacatttccagacttaacacccagatattctttttttttttttttttttttttttagttgcaccaaaggcggatcctagctaaaaagggcccgcgctgcagattcaatataaaaacacaaaaagtcccaccagtttagtaacaaaaaccccaaaagtgaaaactgagggggcagaggaagagaccccgggccaggggcacgaggagccctgctcatggcaccaggcctggccgtagggtcccccagtattgctgttgctacgaggtcggggggcagctattgtcctgtggcagccaccgtttgcctgggtcggggaccctcatttcttctggggtgtgctcagcttctgcatgccccagatcttgtccaggaggccagagacgaaggcctctgtgggtgtgtaacagtcaaccagcagctccttgaccctggcagcccaggcatcgtcagtctccatgtccaggagctcatccacatcaatctccagttctgggatctactcttcctggcagtcgcagaggcacgtgagctgctccaggatccactcctctaggttgaggcgcttccgtagctccttgccgtcatacttgacggtgaccttcccttggcgcctcactgggctgtctcctgcggccccagaggggctctgaaagtagacgcgtggtcctgggccgccactgcccggcccgggggccagggccgccaacgcagcgcccccgcgcggtgccgctgtccgccttggcggccgccgggaccacgagcacgcgtcgggccgttccytgcgccgccgccttcgggaggccggccggctggctctggttaggtccccggctcctctccatgctgctcggcggcgagggcagcggcgggggcacccgggggcagctgcagcatgcggagcycccgggcagggcctggccgcgccccgctccctccccgccgatccgcctgccctttgtccccgtgaccgccaccccttaacacccagatattctaattcagtacatctgagtgaggtccaggattctatatgtttaacaaacatcccaggtgatttgaatgaagaccagtgtctgagaaccactgcttacaggaatcggagtacttcactggcatctttgagctcttagggtcctaaactacctgctttcttttcacttgtcttagctttctacacttggaattgggtggcttgttcaagtcctggttcttccactttctggctagcagtcttgggcaagtcacttaaattctgcaactatttcctcatctgtacaatgagaacagtgatcactgcccagcctccaacatatttgtgattaaagaaaaaggagataagatagtaattttccattataaagtaccacacattgttaagtttattgcttctttttttccccctgtttcccaagattattgtcttgggtcactggccttttccgtggcaggtcctaaaataggaggagtccttgaccgtgctttccaggtagtactctgaatttacaacagggctattcaaatagtgctcatactccttatcattagggtgtctggatgaaacatacctctgcttctgrtttcttaaatagttttgttttatatattgtgctatgatttagctccagcggcgccatgagcaaatgaaaaagaatttggaagcacagcacaaagaattggaggaaaaacgtmgtcagtttgaggatgagaaagcaaactgggaagctcaacaacgtattttagaacaacagaactcttcaaggtaactaatagcagattactaagaaatgtgtgtattaatgttttaaagaattgttttcctacttatttaaaaaacattagaataacacttaaaaagtcatcacccattatcatgcattccaaacacaacggtttccatggataaatatttttatatggatggatacagtctgtgtccattagcagtattttttcagtacatctttcatgacttaatattcataattatgatttagcaacttcataacattctccccagttaactcacctgaattggatttcttacctcctccccccaattattggacataagggttgttttcaaattttggcatacaaagggaacattgctcaaaatctattatatatttaggggtacattttaattgtgttgaattatgtttttacgataaaattcttaagacaaaatgttagatatttaatttccaatacagctaatcagttactttctctcaatttatacaaaattcaatatttgtaccttgattttcttttccttcatagtttcatttaaaactgaaaagtgggattcctataaggattctataatttatcctcattactaaacattttcagatttgacatttgttctactacactagcctactgttaacattttccccaaagaagaggaaaatagatttgtaaaagcagttgcacttcagaatgcaaatgacagtgggggaaaagaacaccctgtttgatgccagttgatgtttttcagtttgtgctgttttatttgggaagaattgttcttgtatattaaagtgggattttgccatattttttactgcttatcctggaattttgtcaaatatttgattgtctaagaaaatactactataggttaacattgtcttagttgtttacttctaaatcttgtaatttctttaaatgaaaaagtagyatctgaaaatcccaacattgttgtaattgggttagctattgttgttatcatgttgtctatcatgtttataaaatggtcactcatcttgwttattttcctttcatcatttagaaccttggaaaagaacaagaagaaagggcagatcttttaaaccctctattgaccaccagttacgtattagttgccaatatgccagcttggacatcagcgttggatccgtttgaccagtttgcactagttttatccataatgatggatttaacagcatgacaaaaattatttttgttgttgttgttcttgatggagattaagatgcctcgaattgtctagggtgttctgtacttagaaagtaacagctctaagtagctttcctacattttcttttttttttttattaaacagatatctttggtttaatgcaaaagaacattttacagttgtacaatcatgttctggtggtttgattttttacaagatattccaaaaaaaaggactctggaaggttttcattgaggataaattgccataatatgatgcaaactgtgcttctctatgataactataatacaaaggttccattcaatgcagcatatacaataatataatttagtctaacacagttgaccctattttttgacatttccattgtttataaatacacatggggaaaaaaaaaccctatatgcttacagtgcacctagaggtttttttttttataacagtctctttttgtttgtttgttttggattctttaaatatatattattctcatttagtgccctccttagccagagtctcattactgcttcatttttgtaataacatttaatttagatattttccatatattggccctgctaaaatagaatacagcatctttcatatggtaggaaccaacaagaaaactttgcattaactccctttttacactttatggtaagtagcagggggaaaatgcatttatagatcatttctaggcaaaatcatttctaggcaaagctaatgaccaacctgtttctacctatatgcagtctctttattttactagaaatgggaatcatggcctcttgaagagaaaaaaagtcaccattctgcgtttagctgtattcatatattgcatttctgtatgttttgtttgtattgtaaaaaattcacataataagccatgtagtgatgtaatagagtgtgggggcttcaatattccacagtcgatgtacaagagtagagtatgtttgggaagaaacttttcaacttgaatttgcctcctctatgatgacatctcttatatgcttgtgctgattttctaatttaagagataccatatctctctattcatttctatctctcatttgtatgcttatttttctgagaacaattttttttttttttccagacagggtcttgcttcgttgcccaggctggagtgcagtggcacaaacgcgactcactgcagcctcaaccctctgggctcaagcagtccttctgcctcagccccttgagtagctgggactgcaggcatgcaccaccacgcctggctaatttttgtattttttgtagagatggggtttcattatgtggcccaggccgatctcgaactcctaagctcaagtgatccacccacctcaacctcccaaagttctgggattacaagcatgagccgtcatgcctggcctctgagaagtttctaactcattcagattaggtatactctcaagtccctggaaactgaattttttaactggaaagagagtggtgtaatttctcaagrtcaaatgatgtagattttaacataatacataatttaagtgtaattaatgtagcccagtttattatcttgaaatgttttaccctatttactttttaaattaatgacctaagcagagggaataattataagtcaatatcagagattgttgtttgggtgttttttatttatttttttcagtgtttgtgttgagagattgggttaacacctctagccaaaaatgtttggttttagggaggctaagaacaacctactgaatttggagaatgcaaaggtaaaaaatttatacagactgcctgcctaactgattaagtactactgcttctgggaaatattatttcaaaattgtatatattataataacagatttctaagacgcattcattattctaccatcctaatgaaaacttcagaagtttttatccatggcatgcccagggtgtcacctgaatctgatgtaggatctatataactttactaggtctttttattgttgactccagtcttaagtatattagaaggctcgttttgctatttggtctgtggatttctgaaaggatcattcacaatacatgtaaaattcaggtaggcctaaggaaaggccagcctgtagaaagcaaaacggcagtgtctgttctccactgtcagaggcattatgtaattgaagtatcctgttagccactgtctttctgctaataaagtggggctgaacaagttagcactaataataccagtgaaccacttgggcaccttgtgggtaaagttttgctgccacctagtggaatgggatatcattgcttccttatcaggttcagaagcaagttgtgaagttgctaataaaatggacacagagcttctttctgtgtagctcaggctgtaatcttgaaagctgaggagatacagacccatgcctctcacactcattagctgggtgtcaccactaccacctgcacattctgacccaccacatcttaatatgttctgtcctcttggagaaattaatctaggagtagaagtcagaatatggtaggtgaggggaagaaaggaaagatggcttgatagccatgaatgcatcaggagcaaaatgttgactcagaaagttatctagatcacagcctccaaacctgatgttgtttccttatgaaaatatttttgagtgtccatagttatatgtattgatatcggggaaactgccccaatattcatgtaggttcttttctattttccctaagcattggccagcttcagaaataaagggacagagtacaaaagagagaaattttcaagccgggcgtcagggggagacatcgcatgtcagtaggttccgtgatgccccacaagccacaaaaaccagcaagtttttattagggagtttcaaaaggggagggagtgtgcaaataggtgtgggtcacagacataaagtactttacaaggtaatagaatatcacaaggcaagtggaggcagggtgagatcacaggaccacaggactgaggcaaaattaaaattgctaatgaagtttcaggcactgttgtcattgataacatcttatcaggagacagagttttgagatcaaccatcggaccaaaatttattcggcaggaatttcgtcttcctaataagcctgggagcgctatgggagactggagtctatctcacctctgcagtctcgaccataagagacgaccacgcccagtggggccagtttagagacctacccccaggtgcgcattctctttctcggggatgttccatgctgagaaaaagaattcggtgatatttctcccatttgcttttgaaagaagagaaatatggctctgttccacccagctcactggtggacagagtttaaggttatctctcttattccctgaacaattgctgttatgctgttctttttttaaggtgcccacatttcatattgctcaaacacacatgctgtacaatttgtgcagttaatgcaattattacagggtcctgaggcgatatacatcctcctcagctgacaggattaagagattaaagacaggcataggaaatcacaagggtattaattggggaagtgataagtgtccatgaaatctttacagtttatgtttagagattgcagtaaagacaggcataacaaattataaaagtattaatttggggaactaataaatgtccaagaaatcttcacaatccacgttcttctgccatggcttcagccggcccctccatttggagtctctgacttcctgtaacatattgatcaatgaaaatatgtgtcaacaaatgtactgctacactattatgaacattatgtaataaaatttgaaagagtaaaacaaaaaggttagttcctaagccccaatgaagtattactctacaccttggaggccatcgatcgatctaagtagtatgtggatagttaatagttactgttgaatcaccaaggaaggtcctagtgaagactgctgtggtgtcctacttgatttgaaagaaaaatttgccacaccagtaaattgaagtcctttctaattaaaagcttgcaaatgtaagtccttatacttcattcagaattttacctgcctcttttgttataacaacttcccataactgtcctgttccagatggtaacctaagtagttacatgtattatcatcatttaatccttaatagataacaattggataagttatctgttaatataacttaatatgttatctaataattgaataagttagtaaacattttaaaccctcagtttcctcatctgcgaaaggatgaggaaactgagggtttaaaatatttagtagcttattcaataggtggtaactggcagaaccagagtttgaactggtcttggtgacaccagggcctgtgtgtaaatcttatgccttactagcacctagtctgctcactgccacatttctgaagcatgatctacggagttgttagcacagagcagatgctccctgattaagaggggcagctggccaccaggcagcctggagaagcagaaagcaccggacacactaattgtctcagtttagaccccaactctgtgaattgggcatgtaacttttctgaatgtttcctcagctataaaatgggccccatgcctttgctgtttggagtgaggattacattgtgactggagtgaggattacactgtgactgcacacattaaggtgtccggaccttgagaatgtgataatctgctggggtcatgacagaccaaaaagtattatttcttctcagttttagtgacagtttatttttaggaagtgtgcatagtgccatgataagtctctggatctgcttctttgtgcacagagatagtcttttgaagttaattccatggaaataaggtaactttggtcaaaagaggaaaggtgttagtaattggagttataaaatacgtcattctttgtaagtaatgccgagatggtttatcatctttaaagtctctcatctttaacaaaaacttttgctgcttttcaagcaaacttggttcctgtaatttgggattcatccatagaatgttcaaagtttagtgtcagccattttcagcagaaaataggggctgacaatttcctgtgttctttagacgactttgaaagcttcatgggaagaatgaagactattcttggcctgaatatttgccccatagggtgctggacccagccaagcaggcttgtattagcaaaggagggtcaagtgaaaagagaccttgttctgtgccaggctcccaaagggtagcctgaagccttattggccacacggaacctctgttttagatgctgtttgtggacctgccgaaatcgaatgccactcaggctttctgaaacccttttggggtgggaagaggcagtagctgacacctctgagagcagaggtttgtgaagatgtggcatagatgaggaggctagcagaggcagggtggtcaggcattaccaagaaacttcctttttgttctctttgttctctctttgaggtgggccaccccgcttagctcccttttgtccaagtgtgttgcaagggagcagcatttcaccgggagatttgcacgtaagtagagcacagattcccctgggttaggggctggctctcacccaagtgtggggataccaaactaacttgttctggcaaaggcatacaacttttttactcctcatttaattctgttgtctttgaatttttaatgatctctttcatatttaaatatatgctctactctagtgtagcacagagaagttccctgtgccttggataagccagtagttttaggcaacttggcaaatggtgagtgaagcaatgagcaccctggcatggcctctggtgttaatgtgagctgttttccctgcgtttcagaagtcagggaatatatcggtgggacgtagtgggagctgtagaatttttttttccatagggataaatctcaatgtgattatacaaatctctggcttagcctgataaagttaaaaaacaaaactaaatatttcaggaacacagttctctcacccagacacaaatgaaatcttccttagacctttgtattgctgggcagaagtgccacaaactcaaattggcattttctgtctcaaatctccacctcattagtgcctaattagaccccatccctaagagtcgggtgcttggaagatggaatggagaccactgataaaaattcaccttctgtagtctccattcaggtatgattggcccgattatagctcgtgtcctgaaaaggacataggaggcttttttctccaactcgtaagaactgatgaactaatcacaccaaatgcaaatgttttagacagtatattcaaactgggaaaaatacctgcctatcaagggagtgagaactcactttgaagtctaagggaaggaaacaaaattggaaaagcacagcaataagcatttgtggagtacttgctgtgtgcaaacacagagcgttcacatagactctaaactagagctcatgagaaggctatgacatggccattttcacctcttcataaaaacaagcaagctaaaatttcactgtgtgattccctaacatttgtatttgttatccatttttccacaataaatgcccctcaatcctatcaacaaaatttaaaccacaacaatctgtaatagtaacattcattatcttagtttctgcaggttaggaattaagtggtttagctgggtggtctggcagggtgcgttgcagtaaagatgttggctgaggctgcagtcaactgtgggcttcagtgggcctggggtatctgcttccatgatggctcactgacatcactggcaagttagtgtttaccattttttttttttttttgagacggagtcttattctgtcacccaggctggagttcagtggcgtgatctccactcactgcaagctccacctcccaggtttgcgccatt

SEQ ID NO: 94579 - DNA, 740342 bp, Homo sapiens
  misc_feature (1)...(740342): n = A,T,C or G
ccaaaactaatcatgcttttttactaatcttgaatattttaattcttaggtagatgaggcaaagagcctcaccatttgctttttgcctaaaaataaggtatcttttccttcatgttaaactcatgctctttgctttcctttcacacaatgtacccacaaaggaaatgattttttgaatagtccagaaacaaaaaggcaaggtcactgaacactttcatcattatttcccaacttgataatacatctgaattctgaacatctccacacgggccaatataacttatttttttttttttttgagatggagtatcactctgtcacccaggctggagtgcagtggcactatctcggctcactgcaacctctgcctcctgggttcaagtgattcttctgcctcagcctccccagtagctggtattacaggcgcgcgccaccatgcccagcttatttttgtgtttttagtggagacgaggctttaccatattggccaggctggtctcaaactccgaacctcaagtgatctgcccacctgggctcccaaagtgctgggattacaggtgtgagccatagtgcctggcctataactcatttttaacaccacactttacccacaatgaaaatagattaacttccatcatattctcttaattatggcagtcagaagttggctaaggggccaagcgtggtggctcacacctgtaattccagcactttgggaggccgaggctggaggaccccttaagcctaagagttagagaccagcctgggtaatacagggaggcccctataaggagaccctctaactctttgaaaaaaaaaaaaagtctgttaatgttcaaagggaagggacgtaactccacatcttgataagggtagtggcaaggttcgagaagggtatgagactttaaatattgttggggtcatttctgcaaaacacaacttgccataggtttcttttgtaaaatgggagaccagtgattaccaaaaggcagcagggaaaaagaactggcatgatcccttgatatggatatgtttttatgtaggtcaattttaataaaggatttacatgggcactgggatctgaatttgcattcccttaaagctatttatgcctgcatatcccttagaaagtttaatattcccaggagtatgtagacccttgtttgaagactctactatagactacacttccatcctttaagcatatgaatttttaagatgtatacttaattgtaagtttttctaaaaagttattcagcatttttatagaggtaaaatgtgtatcctagaacattaaaaaacaatccctttcattttaaagaataatcaattccttttactcagataaataaaaatagagtaacggtaacaaaccaaatggccaatgccacaagaattttgataactgaatacactacttacagtgtatgcatctttcctgaggacaaaaatttttcttaaaaaactcaggccaggtctctagaagtagatgttggtaagcgttagcaagaaattttacctttgttttatgttacacttacagtgaaataaaatgtacgtagaccattagaagagttacagtttgaatgtcttccaaatatgatataaatacactggcacaaaatcctaacttctgttttcgtctttactaataacccaatgatctaagagatgcttcagtaaattatctccaaatgtcatttcctaaagacaacatttcttacctataaagttcaataaagtatttaaaaaagtattccctttgctttaatttccattatacatcatgacctcaacatatctggaaagacataatgttgggaataaggactttttctttaaaatactggggaaaaattactaagttatcccttttatatacagggtgtaggtagaacaatatagtagttacaatcagaatttctacatccatttatcacttaagtacctactatcttgcagacactattctaaaaactaaggaaatgggggtaaatgagaaagtaacagctaccacttattgagtgcttactatgtgccaggctctggcttaagagtttcatacataaattcatttaatcctccaacacaacacctctatgacacaggtactattaattttctcatcttacacatgagaaaattgaggcatagagaagtgaactcatccagctagtaacttgtagaaacagcatttccaaaatcctggctttcatggagcttttattaatctaaaagccttccattcttattttctagtctctgtgaaatacctaatgaacaaatttctgtgggtatggttcaaataggaggtgtgaccattttgtttttacacgtttctttctgggaatgttgaaacaaaagttttactagctctatcttcgtattttgtaacttcaaaatgcctagagtctgtgttacatgttaaaacacctgattttggccgggcatggtggctcacgcctgtaaactcagcactgtgggaggctgagatgggtggatcatttgagatcatgagttcgagaccagcctggtcaacatggtgaaactaaaaatactaaaaatactaaaaatacatgttctgggctgggcacggtggctcatgcctgaaatcccagcactttgggaagccaaggtaggggatcacttgagaccaggagttcaatcgagaccagcctggccaacacggtgaaaccccatctctattcaaaatacaaaaatgagccaggcgcgtgcctgtattcccagctactcaggaggtcgaggcgggagactcgtatgaacctgggaggcggacgttgcagtgagccaagattgcgccactgcactccagcgtgggcaacagagtgagaccctatttcaaaaacaaaacaaaacaaacaaaaaaaacaaaacatggtctctactaaaaatacaaaaattagccaggcatggtgacatgtgcctgtagtcccagctactcaggagccgaaggttgcagtgagccaagattgcaccactgcactccagcttgggcaacagactccatctcaaaaaacaaacaaaaaaccacttgatttttaaaaaatagttggggtaacaattcttccatatttttctctccagaactataggtatatatccatagcatcccttaatttggaaaaccacttctctactccaggtaggcccagtggtgttcaaggtcacagaatcctgtctcattatggtgatgtgtccatgattcaagttaattaggtctcactgtggccttggccacagttaattggttcaataatacagaaacatgatctaagtatggcaaatttgtcttctcttggattgatggagatgagagatgttctttttgcaatggaagtgatttgaggctgctggtagctatcttctttggcctcaagagaaactaactccataatgctaagaggtatagagaaattcagatagaacactttgatttagcaatgcatggtctattcttgccttttccagttaaatgagtataaagttatgcttaaatgggtttctggggcttcaagttttaatgcattttaacagaagcattagataaaatgagtatgaacagaactctgttattctcatcctcattatttacgaacaaatacagagctgtctacagctcaaaggatggtttacctatttcattttcaaaaataatttgcaaaacatttacctatgaactctaagtgactacaaagcattactgtagtaagtctacttctttatcataccacaaaaccacaatagctagaagacaaaatgttttattttaaaacattgaaaaaacattaaaagacaaatgtccattatgtaaccaggaatgttaaatatatggaaacggtaaatctctaaaatgtggtaggtacttccagagctaaatgttgcaagttatcctacttttttctctaatatcaacaatacctgatacgatgaaaaataacaaaaagaccttactaattatccaatcaaagtcatcatctttgggtaaatttatatcaacacaacttaaagttttgtccaagatgttcctgacacatgaagcttccagttgaatttcagaaatgttaacaaaagtatcttccttttttgcctgtgaatgtttgagtattgctgtattgttggcttatatccactacagatactggttctaggccagcccaaggatcttcaagcattgaaggcttgaaataattttccaactcattagacattcttttttctctaacacgccctgatccaaatggtgtagatgtccttggagaaccctttagaaaaaaaatcagttaaaaaaacacttagtaaagataattggtacttcttcctttagctaaaggttagcgggaatcacattgctgcttaaaagttgtgacttgaacctaaataatgttcaattacaaagtccatgcttcctttaatcaagtgttcctattttttaaaaaaagtacttaaagcaattcgttattctcatttatttataattccatgaccactgtcatctcaaatacttttgtgtctaatgtagtaactttgcagtaattaaatacaagcagtgatgaaatcaagtaattatattcaattttccctcgaaattttcacttttttcaggagaaaacaatactatagttttaaagtttctagaacctttctagctcatgaacattttctttactccttagctccaggctcaaaaggggtagggggttggtgtagaatacagcaagttggaaaaccacgtagttgcaagttgtaaaccacagaaatcccagacatgctagagatactctctctgtcttttgtatttactctcactaaaggaatggaaaacttccactaccaccgattttcttttcagggaagttggagcagaagccagtgtagctcgaaagaaagataaaaaaaaaaaaaaaaaaaagaaaaagaactatttcttgaaacaaactggcaaggcctttggcaaacaggaggaaatggagaattaggaaaatctgtgtacgggtggcagtgtattggttaaaagcacgagggctcgaaaacagaacgtacggctctgccactctttcggataatcttccggaagtcactcaacytctctaagcctcagttcgctcatctgcaaaattgggctaacaatagtacctcagagaggattagacaaaataatccacgtaaagggaatattagtaccgtgcctgccataaagtaagagctcggcaaacgctggctattattattacctgggggtgggtctgctgctgccctggggagtagccgaattgctgctgggaccccgcgggggacctggagtaggagccagggtagccgccaggggacggagacccgaaccggccccccgggaagctgccgccgtgtcgcggagagtgactgctcccgtacggcctagaccggggcccgtacggcggcgtgtggtgcggactcccgtacccgtctcgaggggagggcggccgtggtccgcccccgcccggggttccccggaagctgcttccgctaccccaacctcctccacccggaccagggtaaggaggagttgggggccgaaaattctgtcgctgcatatcaggagccaaagccgaaaacctcgcagccgcgttctcccaccggaactgtatcaaccggccctccgcagagaactgctagtcctttaccaaaacagtcctccgaccgcagccaccctacggcacatcagttccggcgtcacaaaggttccgccaggggcggcgggattacctaaatcactgacttggcgagagactcagtggatttaagtgaaaagaggaagaaaaggagacaggaaaggacggacacccaagcccagcaacaacctttccagtctgagtgcccttggtctgaccgacagactagaagctggcccagcaggcgactagtgctcagccccgcccggcgggggcggggtctgcggcgtccgtgggcgccccccagtggcggcgggtggcgccgcacggagttcgccgcttgcaccgggaccgatgccatctgagacgcacgcgatgctggcgacgctggcgagggtggcagctctgcgcagaacctgcctcttctccggccggggcggcgggagggggctgtggactggccgcccgcagtcaggtaccctccgagattcggtctgggtggctaaagggatccctgccccagcttgcctcctcgggcgccctgaggagagcaattagggtctgaagtctctgctgaccccttagcggtggctttgctcgcctccctgcaaccccgttccgtgggcctgcggccggcctgccccgctctggccgcccagggtcgcctctgtcccgtgcgttgttgtgaccgagggctccgtgcgccgtggggtcccgctcctgcgcgtcccgcggctcgcgtttggggcctctttactcctgtcctttcgtccgccaagtttaagtaacttcgaaaatgcacaccaagccacatttcagaaaggactttagcccgctgctttgaataacttgacacttcatgtacaataaaagatgcccttgtacagttacctgttgcagaattttatttagaggatgaaatttagctttactacagtgttatagaactttctttactccctctgaatttgggaatggtaatccactatgaatcttttttttccttttttctttttttctcttttttttgagacggagtctcgctgtctcgcccaggctggactgcagtggcgcgatctcggctcactgcaacctcctcctcccgtgttcaggagattttcctgcttcagccttccgagtagctgggattataggcatgcgccaccacgcccaactaatttttgtatttttagtagagacggggtttcgccatattggccaggctggtctcgaattcctgacctcaagttatcctcccgcctcggcctcccaaagtgttgagattacagacgtaatctctatgattatgcgcgcggcccactatgaatcttgaaattagttgcaggatgcaggatttttttttttttttttgagacagtctcgctctgtcgcccaggctggagtgcagtggcgcgatcttggttcaccacaacctctgcctcgcgggttcaagcgattctcttgcctcagctttctagagtagccgagattacaggcatgtgccacatgcccggctaatttttttgtatttttagtaaagacgggtttcaccatgttggccaggctggtctcaaattcctgggctcaagtgatccgcctgcctctgcctcccgaagtgctgggatttcatgcgtgagccaccgcgcctggcgtaggatacagaatcttaaaagagctttaggactcattaaatcatagcctaacgggtagcctggacctgtgatttccattcaccctcttgtagctgctactcctcgctgtctctttgacatgttctgtgacatcccaagctgacgagtgtggtatcttctcagcttctatcctccttgatgaatggagacacacacagacagtttttttgtttgtttattctgtggaaattcaattcactacatttcgtttcttctgtagatacaagtgatagacttaatcaaggtagcacgttgccattaaggcttagtgatacaattaaggtcggaggactccagcctatccactttattaaatacagtagttctgtcctggccaaaaattcacctttctggacattgtctttagtgtttaacttaatgcttgggaattgctcatttgaatatttattgaataaaatgacctaggtgggacgattgcttgagcccaggagttgaagaccagcctgggcaacatcgtgaagccccatttctaccaaaaatacaaaaaaaattagccgggcttggtggcgtgcgcctgtagtcccagttgcttgggaggctgaggtgggatggcttgagtcctaggaggttgaagctgcagtgatccgctattgtgccactgcactccagcctgggtaacagagcgagaccctatcatgcccccccaccccactggaaaaaaaaaaggttcacatacatcacataggtaattttcaccttttagatcatcagccagtctactcaggggagggggcagaaaagtgagagtggtggggaccaaaattaactttattattattattatggacatggggtkgtctcactctgtcaccgaggctggagtgcggtggtgagatcacagatcactgcatcctcgacctcctgggctcaagtgatcttcccacgtcagtctcccaagtagctgggagtacaggctcatgctaccatgcctggctaatttttttatttctttattttttgtagagacagggtcttgctgtgtttcccagaactccccacctcaagcattcctctctcctgccttggcctcccaaaactctgcaattaaatggtgtggtgagccaccatgcccaaccaacaaattaatttaatagtaaacagtttaactgatggacgcctaatgagtatatagatctttattccatcaacccatttatctgtataacttcaatctaactaaagttcactaaaatttattaaaattcaaaagccatgctctttttaagcttctagtagtacattttgtagcaagataaaagtgaccaataaaaaagtttgagttgtgtttttctgtcgtatagcagtatactctctctmtatattttttatttatttaagtattgagacatgtcttgctctttcatccaggctggagtgcagtggcgcaatcccagttcactgcaacctctgcctctctgggctcaagcaatccttccacctcagcctcccaagtagctgaaaccagaagtgtgtgccaccatgcctggctaatttttgtattttttgaagacatggggttttgccatgttgcccacactggtcttgaactcctcagctcacagaatccagccacctgggcctctcaaagtgctgggattacaggcatgagccccctgtgccccagccagttatgattttgttttggcatatattcatgggggtacaagtgcagttttgctacattgatatattgtattggggtgaaktcagggccttcagtgcatccatcactggcacaagacacattgtacccagcaagcaacctcctgtagtccatccccttccctctacatccccaaccctccaagtctccattgcccatcactccacactctgcttccatatgtacgcattatttaccaccaacttataagggagaacaggcaatatttgtttttctgtgcctgagtgatttcacttaagataatggcccccagttctatccatgttgctgcaaaagacataatttcattcttttttatggctgaatagtattccattttgtatatatgccatattttgtttatttagtgctccattgatgggcacttaggttgatttcatatctttgcttttatgaatagtgccgtgataaacatatgagtgcaggtgtctttttgatgtaatgatttcttttcctttgggtagatgcacagtagtgggattgctgcatcttccggtagttctatttttagttctgtgagaaatctccatactgttttccatagaaggtgcactgatttacattcccaccaacagtgtataagaagagttcccttttctcagcttcctcaccaacatcctgtgatttttttgtctttttaatagccattctgttgtgtgtaagatgatatctcattgtggtttttaatttgtatttctctgatgattggtgatgttgaacatttttwaaaaattttactcatggcagtacacagaaattttcagggaagattaaaaggcatgaaaacatgactcttaatagacaattctagcaatatacaaactatttttgtttccctagagtcttgaattttttgttcaactcattttctggttatgaatttaaaatgattacagcatactgccaatgtttgagaagaaatctgttattggattaagtttaggaatcaggctgggcgtggtggcttatgcctgtaatcctaccactttgggaggctgaagtgggtggatcacctgaggtcaggagtgagccgagattgcccattgtactccagcctgggcgacaacagcaaaactctggctcaaaaataaataaataaataaataaataaataaataaataaataaataaatccaggattcataatattaattaatttatttaattttgtgacaaagtcttgttctgtcacccaggctggagttcgatggcaagatctcagctcactgcaacctccacctcctgggttcaaggattgttctgcatcagcctccacagtagctgggactacaggtgtgtgccaccacgcctggctaatttttgtatttttagcagagacgggggtttcaccatgttggccaggcttgtctcaaactccggacctcagctgatccactcacctcagccttccaaagtgctgggattacaggcgtgagccactgtgcccggctgatggtgaacatttttgatatgcttgtttgtcttttgaaaaatgcctactcatgtccttagcccatttgttaatgggattatttgttttttgttgttgagttgtttgagttgcttacaaattctggatattagtcccctgttggatatgtagtttgcagatattttcttccattcctcaggttatccgttcactctgttgatcatttcttttgctatgcagaagctttttagtttaatgaagttccatttgcctatttttgtttttgttgcccgtgcttttgaggtctcagtcatgaattctttgcctagatcaatgtctagaagagtttcccctaggttttcttcagtatttttagagtttcatccttacattcaagtctttaatccatcttgaatttatttttttctttcttttttttttaagatggagtttcgcttttgttgtccaggctggagtgcaatggcgcgatctcggctcactgcagcctccgcctcctgggttcaagcgattctcctaccttatcctcccaagtagctgggattacaggcatgcgccaccatgccccgcgaattttttgtgtgtttagtagagacagggtttctccatgttggtcaggctggcctcaaactctcgacctcagttgatccgcccgcctaggcctcccaaagtgctgggattataggtgtgagccaccgtgtctggccaaattgatttttttatatggtgagatacagggatccagtttcattcttctgcatatggcaatccaattttcccagcaccttttactgaaaagggtatcctttccccagtaaatgttgtcgactttgtcaaaaatcagttggctttaagcatgtgggtttatttctgggttatgtatgctgttccatggatctatgtgtctatttatttatttattgaggtagagtcttgctctgttgcccaggctggagtgcagttgtgcaatctcagttcattgcaacctccgccccccgggttcaagcgattgtcctgcctcagactcctgagtagctaggattacaggcgcacgccaccacacctggctaatttttgtatttttagtagagacggagtttcaccatgttggtaaagctggtcttgaactcctgacctcatgatccgcctgtcttggcctcccaaagtgctgggattacaggcatgaggcaccgcacctggccctatgtgtctgtttttatagacactatgagtattatgctgttttggctactatagccttgtagtatattttgaagtcagaaaatgtgataacaccagctttgttctttttacttgggatatttttggctattcgggctcatttttagttcyatatgaactttagaattgttttttctaattctgtgaaaaaatgatgttgatagaaattgcattgaacctgcagattgctttgggcacaatggtcattttaaccacattaattctttcagcctacgtgcatggggtgtttttccatttttttgtttcatctatagtttctttcatcagtgttttgtagttttccttgtagatttctttcaccttcttggttaaatatattcctaggtgttttatttttttgtagctatcataaatgggactgccttcttggtttcgtcctcgggtagaacattattggtgaacagaaatcctagtgatttcttttccttttttttttttgagacagtcttgctctactacccatgctggagtacaatggtgcaatgtaggctcactgcaaaggcctcccaaagtgctgggattacaggcatgagccactgtgcccatctgatttataaatttttgacagattatgcatgagagtgtgcttcttgggccaggcgcggtggctcatggttgtactcccagcactttgggaggctgaggcagatggatcacaaggttaggagttcgagaccagcctggccaacatagtgaaaccccgtctctagtaaaaatacaaaaaaatagtcaggcgtggtggtgggcacctgtaatcccagctacttgggaggctgaggcaggagaattgcttgaacccaggagtgggaggctgcagtgagctgagattgtgccattgcactctagcctgggcgacagacagtgcaagactccatctcaaaaaaaaaaaaaaaaagtgtgcttcttatcacatttacaggtaatatatgaagattgagggagagggaattctttttttttttttttgagacagggtctgactccagtagcccatgttataaataaaggtttggtgccacaaaagaaatagcactggaatataaaattttctttttaattctcagcaaggcaatgtacttctatagaagaatgcgcccttacagatggaacaatggtgagcacacacctggacaagggaggggaaggggttcttatccctgatgcacgtggccccgctgctgtgtcattcccctattggctaggtttagaccacacaggctaaactaattccaattggctaatttaaagagagtgacggggtgagtggtttggcaggaaaaatggttatggcagagcaggaaatctgaatgagtcagggtggagaatgagcaggtaatcggaatgacttagggtggaataggtaactggaattagtcatggtggagcaggtaatcagaatgagtcaaggtgaagcaggtaatcggaatgagtcagggtggagcaggtaattggaatgagtcagggtagagcagataattgaaaaaggttgctttaccaggaagttaagtttaaaactagaaagcaaagaattgaacctactgacaaactgattctttgaagagaaatttagaactcatatctaacattctgtcctcttgcatttccttacggctctttttcttcaaacttctttaacatgtcttggcttagttgttctacagattttccaaaagaagaagcttctttacataaggcagagaatagttaagggaggttttagtaagtgctgtttttatgagcctctgcaccaacccatggatgcatggtgtgacacagcacctgacaagagtaagtacacccattatggctgcgagggaagtaagaactgaggctattattcttttccacttactgaaccacttttctagccatcctgtaaaggagtcatttacccctgagttgttggctaactcattggacacagcactcagaccttgcaatgcctttgttatacttccatcagggacagtgttgtttgggatgaaggtacaacatttgtgttttaatcatgatacaaactcctcctctttctgctaatatcatgtctaaggctatcctattttcccaagccatgtggcttgtagcccctaattactcagctattcctttaacagcatctctagtatagttaataaattgctgttggttgtaatagatgtagtttatccaatctacatttttattaattgtcacccaccaaaatattgactcaaattctgtagctatttgattttggggtttaaattgatctggtattccctgtgggactccaattgcatttaaatagatgtgagagtcgaaagacccataagaggcttcycttgctttatgacgtctggtttttccttcctctgcttgatgaaaggccagagtaaaagggatagccgattggactagagcataaatactgctctaattatttggcagagtgtccagtaaaggtcctccataatcccaccatacatccgcttagggatgaataagggcagactgataggtcagctcttggaagtgccacacttcactgcatcctgttaagtctccaaggaatgccaaatttttcccttggtcgttggagacatgaggtaaaattgattttggaaaatggaggctggatggcccttgggggctgacccgcagcatgctggactttgggatatagcagagagagagtgtggcacaacttgttactctaggctgtagaatcctggaaaagagctaccatgcagcccatgcctggttgactggatgaccaccctagtggaaaggggacagtctgggcctctggcctgcggtgcgcacaagcataacaattgcttttgtttaacgtgcagacggaatatttgatccattccaaccaggcatttgcatcttggtatcttgtcttaattgccgaagtttgttttaagtctttaacttgtatgatagctatcttggtcttgtcgttagatggaggagtggcaattgttcagttgtgagaggttttggaagaaggcttagaggaaggtgcaggcactgggggatcaaataaacacatttcaaagaatccaatagggtctgtccctgaaacctcagcccccataccataaaactggcttaaagaagggaactggcttagaaaaggggaagaagtttgagggttcgagataataacctgtattggaatgcactggtttagctgacccccagttgggggttggctgtccctctagtaaaatgaatgtatggttttaggaaattacaaaaactggttggggcagtccatccttgctctttagtggtccacagaatgttggacaaactacggcataaaagctctacactggggggcaagactcctggttgacactggggtctttaccaaaatctccctggattaagtggtctcaattcactaatgtctagtctcaggagagtcaggagggagagaggtacttttctgaagtagagagctgtctttgacttggcaagtccccacagggtataacaaggcaagcatcaaatgcaatagtttgaagagaaattgacttggttatgttaataactagatggtcagcaatagagcgaggaaagaagaaagagtaatagaatagatgaaagagagtgaaatttttctttgctttagtttggtagggttttcccctgggactatggcccatgactctggagggggcggcgctttcttgactcaggtgtgatgagtctattccctttcccactgtaagaacagcagtcttggtggttagcagcacaaggtagggtccttcccagggtggctggagttttcctyctttccaccctttgatgagaccatgatcttcaggctgttgctggtttaccggaaattctaggggtggtacctgtgctaaaagacttttagttttgagggaaaggaaagtggaagataaaccaagtatacaatttctaagaaattgatcttttgttttaaatgtggggacatcagcagtggactttatagtccttggtgtcttcttactgagaaatttcctttagcacctatttttattagtttttagaccaaagaaagccaaataccattttatatttgacaatgcttcctgtatgatttttataccagaaaagctaaatttcacctttatattagtgtgctattagtgataaacttaattttaataaaacttgtagacacatttatccaatttttaatgtctgaccataaggtaagatttttatagactctttttaaccttgtataatttttgttaaagagcaggttagtgctttaagaaaaacctgttgtgcttttattttaatgtccagtttacagaaaagctggatgatacccctttaactttagccaatatgtttacaaacagaattttctttaaaattaatgtttcaaaacttgcttaaacctttaaaacaaaaaatttttttaaccttttaatgtaggtaaaaatctacattcttatgcctcattataatccttttaccaaaagtatatttactttccttacacaccttgcacataaactgtttcttcaatagttttacaatcaagaggcctaattacttgtacattatacaacatttcttgcataaattcccttttataactttttttttcacgactttcacagacaattctttgacatgcctcagctttctcacttgttgcaacatccctttctttaaacaaccagttaatttattttaggacaagaatttactatataacattcgtttttacataaattctcctccccacttttttttttttttctcaaagataataaccgttcttttccaaagtgaacttccttcatgtctgtggactagtctaaggccacaagattagaagttaggataatacatgttacactgttaacttttagcaaactttacttttgttgaaaaccttgtgaatttgggatttcaattattctttggtattaataagaccctgttcagtccatattaacttagaattgatatagatggctccttcctgattctgtaagtacttcaaggcttggctgagtacaaacagctggcacgtttgagcagcccaattattaggcaattttcctaactcgcttctgttagagtttccttatcccttactgaatacccattgtgtctttttccctcaatcacctgggaggaatcatctatcctcctgtcctgaagggagttcctccaaggtctggtcagacctttgtacggtaattaagatttagatcctgttaggaaacctgctgggttaagagaattttcagtggttaatgttaaatcatctttttctaacagaatagcctcatactttaaggttcttgagtcagtaagttaccttttttgctttttttttttttgacttagtatagttctgacctgttgagctgtgctcataatgtttcctctgaaagttatttttctactttcttctgctagcaaagcagttgccgctacagattgaatgcatttgggccatccgcaggttactgggttaaggatttttgattaggaaggctaatcagtggcctcagcttgtcagtggcctcaatgctttcaggctacgcccttgtttacagtgacaactgctgagaccaactcagtcatggagaccctaacccagtgtcgctagaggaagtaaagacacacacgcagaaatatagagtgtggagtgggaaattaggggtctcrcagccttcagcgctgagagccttgaacagagatttacccacatatttattgacagcaagtcagtcgtaagatttactaaaagtattccttatgggaaacaaagggttgtgctggaaataaaggtatgggctctggctagttatctgcagcatgaacatgtccttaaggcacagatcgctcatgctattgtttgtggtttaagaacgccttaagcggttttccaccctgggtgggccaggtgttccttgccctcattccggtaaaccttccagtgtgggcatcaaggccatcacgagcatgtcaccgtgctgcagagattttgtttatggccagttttggagccagtttatggccagattttggggcctgttcccaacagacaacaaggtggtattggagtgttatagggtcacagagaagaccttcaattataggttttaaatttaccttggcttttaaaggaatagggtacactgttttctctttactacttctatctctctccttctttcttcctctctttgacttcctgtctctttctgtctctttgattccctctttgtctctctgtctcttcctctttctctctgcctctctttctctctctttyttctctctttctcctcactctctctctctctccctctctttcctctctgctggtctttmcctgcctctgccagccgcttatgctgctgttctcccctctccttccccttccgctaggggagggaccagcaggagtggacctactctttcttccctagagaagaaaggaaaggggagttctgaatatttttcttactactggaggtttgtgtgaggttcaaccccctccccatggggatttcttacctctttttgaggttcaacccccccatcatggggatttctcacctctttctgaggttcaacccccgccttcaatggggatttctcacctctttttaacctccaagcatcccgactaaggaatacttcaccacatcctgtggctttctttccctagtcccgactaaggaatgctttactgtccctgcggtttctctctccttggtatgtcctaaccaaggaatactttaccaccccgcagctttttccttagtcccgaccaccaaggaaatactttacccgctcctgcggcttctccttccttggtctgtgcacagagttgtcaccacagtatgtgaggattctttaagctaggttgctggccagtttctctccgcgttgctgagagctcgggttattcctcccactgggtgggtcctgatttctcacccctgaggccgccacaagggggcggggcggacctcctcatgagagagaaccagagaccacccccagaggggaatgtaatcacaggagaccccccaaattgttataaagtttctgtgctgcaaaagaaatagcactcgaatataaaattttctttttaattctcagcaaggcaatgtacttctttagaagggcatgcccttacagttggagcaatggtgagcacacacttggacaagggaggggaaggggagtttatccctgatgcacatggcccctgctgctgtgttgttcccctattggctagggttagaccgcacaggctaaactaactctgattggctaatttaaagagactgacagggtgagtggtttggcrggaaaaatggttatgagagagcaggaaatcggaatgagtcagggtggagtaggtaatcaggtaatcgggatgagtcagggtggagtaggtaatcgaaaaaggttgctttatgaggaagttaagtttaaaagtagaaggcaaagaattgaacatactgacatattgattctttgaaaagaaatttagaactcctatctaacacaggcaattatgtttcctaagaaatatgaatggactgtcagttgtggaaaggtaaaacctggccgggcgcggtggctcatgcttgtaatcccagcaccttgggaggctgaggtgggcggatcacctgaggtcgagagttggagaccagcctgaccaacatggagaaacctcgtctctactaaaaatacaaaaatagccgggtttgctggcacatgcctgtaatcccagctactcaggcagctgaggcaggagaatcacttgaacctgggaggcagagtttgcagtgagccgagatgacgccattgcactccagcctgggcaacaagagcaaaacttcatctcaaaacaaaacaaaaaacaaacaaaaaaaccagaatgaagacccaaacccatgatgaggtttatgagctcctataccatcttgaagttacagaaagaatgggggattggattctgatgaaagaggttatgggaaccgggagagaagaggaactctgttgggggaaataaaggattgctagggagaatgaatggatgcggatggagattaactggtaaatagttctctttagaatttgaatgagtctgagagacaggctttatcttctgaaagggcctgttcagttctgattacattcttggtcttccagggaggggaggaaaaaacagttgttcttctttggtgggtgaccctggagttttggcagataaaaatcttaaacttctttagaagagatggtaggggtggggaaccttggagagtccttgaggtttctcctttagttcagcatgtcaatgtgccatattttggggtctcagtttttgagtcccaacacagtccattctttgaaaagtaaaataagcatgtagcttattttasatttaaagatttagagatacaaccttaaatactggatttttatacatgtagctagggtcttcctgaaaccgcctttgcaaaattatgactgagatagtgaaagagatctaacttaactgactccatcttgcttctaacctccaagctgtccttgttcattcctgggtgtaggctgaactaactttaggagaaacttagtttatagttcatagtttaaacaaagactgtaacagccctttcccaaagcatacctccttcttgtctggggactagatttcctttgtaggactagcattagccataagattagaaattatactttagggctgggcgcggtggctcatgcccgtaatcccagcactttgggaggcaagtggatcaattgaggccaggatttcgagaccaacctggccaacataatgaaaccctgtctctattaaaaatataaaaatcggccgggcatggtagctcacgcctgtaatctcagcactttgggaggccgaggcaggtggatcacctgaggtcaggagttcacgaccagcctggccatcatggtgaaaccccatctctactaaaaatacaaaaaattagccaggcatgatggcaggcgcctgtaatcccagctgttcaggaggctgaggcaggagaattgcttgaacttgggagtcggaggttgcagtgagctgagatcgcgccatcgcactccagcctgggcaacaagagcaaaattctgtctcaaaacaaacaaaaaattacaaaaattagcagggtgtgctggtgtgtccctgtactcccagctactcaggaggttgaggtgggagaatggcttgaacccgagaggyggaggttgcagtgagccaagatcacgccactgcactccaacctgggaacagagtgagaccctgcctcaaaaaaataattatggtttaggagtcatgcggccggaggctacaagattctgaccctcccagaactactcctaagatcagtgcttgagatattttgcagaccctgcacttgatggatcagctggccccacctagatcaataaactggctcatctgatcttgtggcccccgcccaggaactgactgatcaagaagacagctctgactccctgtgacttcattctgagcaatcagcactcctggctcactggctcccccagtcctcaccaagttatccttaaaacctctgctcgctgggccgggcacggtggctcacgcctgtaatcccagcactttgggaggctaaggcaggcggatcacttgaggccaggagtttaagaccagcctggccaacatagtgaaaccacatctctactaaaaatacaaaaaacaatagctgggcgaggtggtgggcacctgtaatcccagctactcgggaggctgaggcaggagaatcacttgaacccaggttgggaacattgcattgagtcgagatcagccattgcactccagcctggggaacaagagcgaaactacacacaacaaaacaaaacaaaacaaaacaaaacaaactctgctccctgaattctggggagactgatttgagtaataataaaactccggtcttccgctcagccagctctgcgtgaattactctttctggattgcaatttccctgtcttgatgaatcggctctatctagacagtgggcaaggtgaamcccttgggcagttacattcctaggccttagccagggaattaccatgtatatgatgatgaattcaggagagaagagatgaagagaaagggagaaagttttatcttggctgggcactgtggtttacgactgtaatcccagcacttcgggaggctgaggcgggcggattgcaagatcaggagattgagaccttgctggccaacatggtgaaaccctgtctctactaaaatacacacaaaaaaattagctaggcgtggtggcgtgcacctgtagtaccagctaattgggaggctgaggcaggagaatcgcttgaacccgggaggcggaggttgtagtgagccgagattgcgccactgcattccagccaggtgacagagtgagactccgtctctaaaaacaaaacaaaacaaaataaagaaacaaagttttatcttggattacctagagttagaaaagttaagaactggaggtggcttccagtcgtgtgacctgagcacatgaggccagtggaatgctggagctgaaagcatctgtgtggcagctggacatgtccttttcactggcttcagctgccttttttagatgaagattgtattcacagtgactgtgagctccttaggcacagaaattgaatcagtgttaaacactattgtatatgcctggcattggcacgaggatagtatagatatttccaagatctctcctcatggccatccttggatcccagagcctgggacagtgttagggatcttggaagcactgccaacatgtctgacattsaagaagccactaacagctcctagttgtaaacctgcatgagaaccagaggtctgcacaagtgacagaaagtgacctcagaggtgagtcttagcttcctcaagtcactatgtaactgcccagtgcattcattttgcccagtggcccagatacagtttaattcatgcatagccagctgtacaagagactggagatttattactccaatcagtttcccttaaaatttggagactgaggttttctaaggataacttggcaggttgggagccagagggtagggagtgctgattggatgggtcagagatgaagtcaccgggggtcaaagtgggtttttctagctttcttttgtttctgggtgggatcacagaacaggttgagccagattattggtctgggtggcaccagctggtgcatcagaacgcagggtctaggaaatatcctcagcaccagtgttaggttttacaatagtgatgttatccctaagagcaactgggaaggttcagaatcttgcagcctctgggtgcatgactcctaaaccataatttctaatcttgtggataatttgttagttttacaaaggcagtctggtccccaggcaagtaagagatttgttttgggaaaggacttttattggctttgtttcaaagttcaactttaagttccacccaaagatagttcagcctatgcccaggaataaacaagggcagcctggaggttagaaccaagatggagttggttaggtcagatccctttctctgttgtgactttctcactgttttagttttcatcaaggtgatttcaactattggagccagctttgagcaaacagctgtggaagaagtgagagacaaattggggtcaccatacaatcagcagagaccatggcaagatatattttgtcatttcagtgaaaatttggcttaggtttattgtccgagatcggttgataacttatttgtggttgttcaggagttttaagattactagtttagaaaaacaaagaaattctaaaggattttgaagacttggctggaaaactcccgtggtcaaacactttaattttatggaaaattaaggtgtttttttttttttgagatggagtcttgttgtgttggccaggctggagtgcagtggtgcgatcttggctcactgcacaaactccacctccctggttcaagtgattctcctgcctcagcctcctgagtagctgggactacaagcrcccaccaccgtgcccggctaatttttgtatttgtgtttttagtagagacagggtttcaccatattggccaggctggtctcgaactcctgaccttgtgatctgcccatctcggcctcccaaactgctgggattacaggcgtgagccactgcgcccagccaattaatgttgattttaaggaacaaacaaacaaacaaaaacaaagctcaaaaagataattcagaattcaagtaaaaggaaggttcatgatggacaagaagtccaaacagatgaaagagatgttaaaaaaaagagttcattcactacaatgttttagattcacacatcttagattattgtgaaactccagccatcaaaggagatagcaacattagtaggtgatgatttggcatcttgcagagatgagactgatgaaagcaaaaaagaagaaactgagcctcaagtgtaaagtttagagtcatgtgcaacagagtaggagagaaatactgctttccctcaaatgagactggaagagattctgggggtgatgtttaaggctattttaagtggaaggccgacatgaccaatttgatgttgcgattcttttgaatatccatgataatgaaatcactgtgggcatggcattgactaaagcgagtctccactgaagacgtatcacacattttggacctatgactcttttgtacctatcaacattttggacctatgggcacattttggacctatcaactcttacccctgggatactcagcctctgtggtctgctaccttatgttataatagtcgatccaatgtgtggaacaggggcaataccaatagaggggactacttaatgttttcacgttatattctggtgataataatcctctggttgtgaatagagcagcaaacaacatcacatctttattgaccaagagccaaattaaagaaggctaaccatccttgcccatagatgctgttcaatgggataaatgcaatatgccattaagaactggctctgtggatattattgtggcagatttgccatttggaaaaaagatgggatccaagaagagaaactggaaccttcatccaccttgcctatgggagatragttgcgtctgtgtacacctacaacaggccaagctgtacgatgtactcaggacgcgaaatgctttaccaaagcattatctggcatgtgatgtgtatggtgaaaagtggatacagttcgggtgaacattgggggtctttgtgctgcagtttatattttgaaatgtacacctcaagcttttgttcatccttcagaacaagatggagaaacaggagctctggtaatgcaaagattgaagctaactaatagtactcgtacttcccaacactggaaatgtcagcatgaagaacttgctttgagagcaaaatagtatttaaaaaagtgcagtgtgcactctttaaacctgttcagagctcttcactctagttggcaaaagakgtgaatgtaatgtaatgtaatgggattgaaaaagtcttatgagaaagcagagcttttccttggcactgttttgtgttttgggcaattagtattttgcttaaaatgcttttaaagatgcctagtgaaaagcctagtaaaacgctctgagatttgggtgtagaacgttttattttcaggcttaaaactttttttttaatattatagttttttgtagagataggggtctcaccatgttgcccaggctggtcttgaactcctgggctcaagcaatcctcccaaagttttgggattacaggtgtgagccacaacacctgacctattttcaggctttacggcctgttttctattktgccaagcggaaagctactctggcctaaaggaaaggcagagaacataattacatcttaggccacatttcattgcctgcgtatctgtgctattcagttgctcaaattctttaactctagaagtgaagtattgcattttgtgaacaatgtttgccccataagatgaaatctcacaagtcctataggaaagtttaccatctgccttaaaaattaaaatgcacatctgttattcagattaatatgcatctgttattcagaactaaaatagaggactaggatttatcaaagggattgcaaaaatactgttagtagtagcatagagcattactatttgtaaacagcagaggcagggcgtggtggctcacgcctgtaatcccataactttgggaggccgaggtgggtgatctcctgaggtcaggagatcgagagcatcctggctaacacagtgaaaccccgtctctactaaaaattcaaaaaattagcccggcgtggtgaagggcacctgtagtcgcagctactcaggaggctgaggcaggagaatggcgtgaacccgggaggtggagcttgcagtgaaccgagatcacgctactgcactccagcctgggcgacaagccagaatccgtctcaaaaaacaaaacaaaacaacaacatttattagactagaaaagcaattcaaaagtgaataaccaggccgggcgcagttgctcgtgactgtaatcccagcactttaggaacccgaggtgggtggataacctgaggtcaggagttcaagaccagcctggctaacctggtgaaaccccttctctatgaaaaatacacaaattagctggacgtggtggtgggcgcctgtaatcccagctactcgggaggctgaggcaggagaatcgcttgaacctgggaggcagaggttgcagtgagacaaaattgcgccattgcactccaccctgggtgacagagtgagtctcccatctcaaaaaaaaaaaaagaaaagaaaaaaaaagtgaataacctcagtatggattcaatgttatatctgttataaaccaatatttgggnnnnnnnnnnnnnnnnnnnncggcgctctcttcttaaaaccccggttaaagagaaagctctctcccaccccaaaggggggggcaccaaaaaggttgggaaaaatggaaaaaatggaaaatggtaaaggggggattttaaaaaaaaagttctcttatttggaagaaaaaccaggtggctttttcccccgtgggcccactggtttttggtgggtttgggggcccaaaaattaagaaattctggcaccataaaaatggctttttaaaaaaaaatcccctaagtggaaaaaagccctaaggttaaacaccgctttctgaaatattttgggggtgtaaaaaccggtttttatttttcccgggtcttaaaaacctttttttttttaaaataataaaagagttttttgggaaaagaataagggggttcttccacccattgttggccccaggccttggttctttaactcttcctggggcttccaaagcaattccttccccaaaagttttgggggattacaagggtgttaagcccacaaaccccctgaccttatttttcaggccctttcgggcctgtttttctatttttgccaagcggaaaagcttctttggcctaaaggaaaggcagagaacataattacatcttaggccacatttcattgcctgcgtatctgtgctattcagttgctcaaattctttaactctagaagtgaagtattgcattttgtgaacaatgtttgccccataagatgaaatctcacaagtcctataggaaagtttaccatctgccttaaaaattaaaatgcacatctgttattcagattaatatgcatctgttattcagaactaaaatagaggactaggatttatcaaagggattgcaaaaatactgttagtagtagcatagagcattactatttgtaaacagcagaggcagggcgtggtggctcacgcctgtaatcccataactttgggaggccgaggtgggtgatcacctgaggtcaggagttggagaccagcctcgccaacatgggaaaccccgtctctactaaaaataaaaaaattagctgggtgtagtggcgcatgcctgtaattccagctacttgggaggctgagacaggagaatcacttgaacctgggaggcggaggttgcagtgagccaagattgcgccactgcactccagcctgggcaacagggcgagaccccatctcaaaaaaaaaaaaaatagcagacacattggtatttgaggtgtgggacccacaaagcaaattaaaagaaatgttttcttccagtgaaaaaaaaaaaaaggacaaatgaagaactgggatgatgcatgtgagcttatggtggctgtcctctgagctaagggaaaaggacactgctcgtttttgtgagcaacataggtatggttcccacaaaaagatccttgtagcactgttgaaggaggcccaacattagaagacaagatcctggataaggcagtgcttttaggaaatatgcttccagtggctaggggctatcttcaagtgacattgtatacagaagacatcatcagacaaaaaaaccatcaaggaacatttgagcacccaagcctcttggggagccccataaataattggttattattgttaataattggttattaatgatgtggtggtgtgtgtttagaagttctgctttaatgcaagtaagggtaacaagacaagaaaatttaagtataaatgtaaatgggaccttgtctatttctgtgaggctgaggatttttacttaggatacctaagattttttttttttttttttttgagatagagtctccctctgtagcccaggctagagtgcagcggcacaatcctggctcactgcaacctccacctccggggttcaagccattctcctgcctcagcttctgagtatctgggatcacaggtgtacgccaccatgcccggctaatttttgtgtttttagtagggacggggtttcaccatgttggccaggctggtctcgaactcctgacctgaagtgatccacctgcctcagcctaccaaagtgttgggattacaggtgtgagccactgtgcctggtctaggatacctaagatttttagtgctgactgggcgtggtggctcacacctataatcccagaactttggaaggccaaggtaggcggatcacgaggtcaggagatcgagagcatcctggctaacacagtgaaaccccgtctctactaaaaatacaaaaaattagcccggcgtggtgaagggcacctgtagtcgcagctactcaggaggctgaggcaggagaatggcgtgaacccgggaggtggagcttgcagtgaaccgagatcacgctactgcactccagcctgggcgacagagtgagactctgcctcaaagaaatagaagatttttagtgccttgtcttaaaaaactacacttggaagcccaatatatgagcaaatgggctgtattcaaaggaggaattggagtcccagagccctgctcactctgtactcctattttaactaccctcctaccccttcaccacctctgaggtggtggctcctggtggcacctctgaggaattcccaaggctctgcagaaagggtttgaaagccactattttaggtagatgtcaggtattaaccagtgctacaaatagaaattgttggttagtttcactatgtgttattaagaagtaaatattggctggacatggtggtttacttgaggtcaggagttcgagaccagcctggccaacgtggtgaaacccccgtctctactaaaaatacagaaattagccgggcgtgttggcacacatctgtaaacccagctactcagaggctgaggtacgagaatcgcttgaactcgggaggcagagcttgcagtgagccgagatggcaccactgtacttcagcctgggtgacagagcaagactgtctcaaaaaaaaaaaaaaaaggtaaatattttcatgtttctgcatggtcagggctttctgagcatagaaaagtagaacctgggttaaaagacaagccttggaagttaaaagatgacttaagggatataaaacccagagtgttggaggcattcccaagatcgtaaacccagtaacgcttatcttaccttctcctggagacatttatttatgttccaaagggtaagatcccagggatcttccccttttcttcccaagcagaatttgcttaccataggtagattgctttctttcactttctcaggcgaaggcggcasstgggcagttatcctgtacaaacytacagattcaaaattttgggattcttctcctgtggttcaacccttacctatcaatgggttttcattgcattgtctatggggtattaggtatgggaaaatgatgtatgtcttgacttaagtaataataactctgatctctgctccagaaactttgtgtttactttcaggttacaagaatgaatcaatatagagattaaaaacttaaatatttttaatgtaaaayacttcttaggagaatatacttaataatttctctgtacagaaatgattgtatgtatacttcaggtttaagctttaccttagtattcctaaaacttttcagattatatcagttttccttatagaggtgcttattgttagctgtttcatgttaaaggctactaatagtggaaaagtaaatgcttctgtaggatgtgattagctcactcgttgatagggttagacctgcactgaacacagtagattgcttaactgtcacttaaataatgatctcattgataaagggagaattagaagtggcttgttttaaagggtttccgagagtcaaattctactgcttcattaaaatgtggtattttggggccaggcacagttgctcacgcctgtaatgccagcactttgggaggctgaggcaggcagatcacgaggtcaagagttcaagaccagcctggccaacatggtggaatcccgtctttattaaaaatacaaaaattagccaggtatggttgtgcgtgtctgtaatcccagctactcaggaggctgaggcaggagattgaacccgggaggtggaggttgcagtgagccgagagcgtaccactgcactccagcctgggtgacagagcaagactctgtatccaaaaaaaaaaaatgtgatattttcatttccaattatgcaaggtagtcaagcacaagagaaatgttttatacatatttacttctttgtagactaatattcctcacccaagtgtaacacaggtattaatgcattaagttatgcttataaaagtttttcactgaaaataataaaattgctgacagattatttctatatgaagagacatagagtaggaatattgttttctagatacaagactaaaagtttatttaaaaatgagtaaatatggctgagtgtggtggctcacgcctgtaatcccagcactttgggaggccgaggcaggcagatcacctgaggtcagaagttcaagaccagcctgaccaatgtagtgaaacccatctctactaaaaatacaaaaattagccgggcgtggtggcatgtgcctgtaggccgaactactcgggaggctgagacaggagaattgcttgaaccyggggggcagaggttgcagtgagctgagattgtgccacttcactccagcctgggtaacagagtgagagtctgtctcaaataaataaataagtaaaataaataaataaaatgagtaaataaaatttttatgtccctagcatttacatatttgtattttttcaattgttaaaatgatggatacattttgcaaaaaatgtgaaatatttaggaaaacagaaagcaaggaaaaatagagatctctttttaaaattgtatttcttgagacagggtctggctctattgcctaggatgaagtgcagtggcatgatcacagctcattgcagccttgacctcactggctcaagtgatcctcctacctcagcctgctgagtagctgggattacaggcatgtgccaccaggcttgactaatttttttgtattttttttatagagacagggtttcctcatattgctgaggccggtctccaattcctgtgctcaagtgatccgcctgccttggcatcccaaagtgctgggattataggtgtgagccaccacgcctggccagataatttctttatgtccggtttttacacagatgtggcagagagacaattggagtagtatttttaggttttgtggctggcattggcgaaaagaggtctggtttctgtgacccttcttagggaagagggattctagttttttttaattgttgtcgttgtttgtttgttttgagactgagtctcgctgtgttgccaggctggagtgcagtgatatgatatcggctcactacaatctctgcctcctgggttcaagygattcccctgcctcagcctcctgagtagctgggactacaggcacgcaccaccacgcctggctaatttttcttattttagtagagacgaggattcaccatgttggccaggatggtctcgatctcctgaccttgttatctgcccacctcggcctcccaaagtgctggaattacaggtgtgagccaccgtgcctggccggattctagtttttatagctatcctcagaggagcatgggactgagagataggaaggcaggaggtcagagaaaaactttggcttctgaggctgctgtgatgcctacattttgggtgtggcttctgtgcctcaacaatggtaaacacctacctttcttctgggagggagtctggaattgtgctacatggtatgcagagagtgcctatgtaaatagtcttcagtgaaaacctaggttctgagtctctaatgggtttccctgggcagaaactttgtgtgtttctatatctattttttgttgttgctggagaaagaagcatgcttgatatggccttccatgagagcaaaagaacataagcagcctctgcatggcatgaattttttccatctctacctgtgtcttttcctcttgttggtcctgtcatatgtcattttgctgtagtaaaccttagctctgtatacaaccagatggttaggtcctgtggatcctcctagcaaatcactgaaaatatgggtggtcttgggaaaccctgaaacaattccaaaggcagaaaccataaaataatttttttctttttttttgagatggagacccgctttgtcgcccaggatggagtgcagtggtatgatctcggctcactgcaacctcttgctcccgggttcaagcgattcttctgcctcagcctcccaagtagctgggattacaggcatacgccaccatgcccggctaatttttgtgtttttagtagagacggagtttcaccatgttggtcaggctggtctcaagctcctgacctcaggtgatccaccctccttggctttctaaagtgctgggattacaggcgtgagccaccatgcccagatgaaatgatttttttaaaacatgaaatcttaaaacacctttgaaaagtgaagagcagatagggaaaaattacttttactaaatatgactgataaaagattaatattcttagtgtatgtataattcatataaacctataagaaaaagataaatgtgcatgtagaaatatggaccaacatcaagaataatttataagagaagatataaaaagagcagatttaaaagatgttcaatttcagaagtcattaaataagtacaaattaaaataatagtgacatgcaaatttttaactgttaggttgcagcaaacaaacaaaaactccacaaacccaggagattatgtttagggttatggaagatgatagagaacatgattttcatagcatactgatatatacacacacacacatatatataatattatatataccctttttggtggacggtttgataatatgtattaagagtattaaggaattcataacatgaatatggctaggccactttaaagcctacctctgtctttggaagcaagttctttgcttccccttctctatctccaaaaactctgaaagcactaaagactaatttttacctttactacctgaagagaagtctctgggaggataccttagtccagcacatagaaatttctaaacttctctccagacatttctcttgctcttcagagttgctcactggaagctgttaaaaacaaaatcaaatcataaaacaaatctctcacatatgtatcgcccccacgtttcttccaagctgcctcttcctttcccttctattcctccgtgttaaatatctaaactattccatggaatgggctctctmtatatttttttgtgtcaagaggctctttgtattcacactcttaacactgcaacactccactgtcttcatccaccccatgcatattttttttgctgtgacaattataattctccttaagtacctatgaagttgtttgatcaaccaacctagaatggtcactactttgccagttttcccctggatgggatgcatttttcttgtttgcactaaagtcttccttttggtcagtcttctccgtaggagaatcacgtcaccaatgttgagaaattccagggatcttttgggtttgtgagcattcttatattgaatagtaatttgcagtgatcatttcccctccagtttctggttcaatcccttctaatcctctggacagctaacttcaggatggcccgttaaagaagcctgaacacctaagttttttcctttgacttgttgacttttggttgtgcattctataactgtaggttgatttataaaatctataaattggtaccattttgtacccttccacataccaatttgaggtgattttcttttttatttttttgagacagactcttgctctgtcaccaggctggagtgcagtggtgcgatcttggctcattgcaacctccgcctcccgggttcaagccattctcctgcctcagcctcccaagtagctgggattacaggcgcccaccactatgcccagctaattttttgtatttttagtagagacggggtttcaccatgttgggcaggatggtctcgatctcctgacctcgtgatccgcccgcctcggcctcccaaagctctgggattacaggcatgagctaccgcgcccggccgtgaagtgattttcaaatcctaaatgatttgaaaaggaattatttgcatattttaagttgatattttaaagttgtcatcgcttatgtaaattttatactgtaaaccaaggtgagaataagatctgggatatgttaggaatctgctttcctttgccttgtaggagaaggcttattgtgaaagaaggcttacttacaggttgatcaattgtaggaaagaatacctatggaagttgaagatctggaaattgatttactgaaatgattcatgcatcccttaggcaagtattttccttttttgttagacagggtcttcctctgttgcccaggctggagtgcagtgatgccatcatagctcattgcagccttgacctgctgggctcaagtgatccttccacgtcagcctcctgagtagctgggaccacaggcatgcaccatcattcccagctgacttttttactttttatttttatttggcaaagatggcatcttgctatgttgtgctggttggtctcaaactccagggctcaagtgacactcccaccttggccttccaaatgttgggattacagatgtgagtcacctcgcccagcccttagggaattcttcacatattccaatttgaagattgccactaaaaggacagtgaaacagtctaccctgaaatagacatcctagttgttgatggtggtaactcattcagaactcatgctgcctctgatgcctggcatctttattgggcaggactggcggggttgtgctgcagtacaaattagcccaatctcagttgctcaatacaataaaaacatcttacatgtgtagctacactatttgaaatttgtgggctctaaggagagtagaggcctggaggatttcatggggtgtttttaaaggtcagagttggaaatggcttttattatttttgcctgtgtttcactggcaagatcgaagtcatttgactccaacataattgcaagagaagctggaaaatgtggaagagcagtgagatttgggattagcactgagttgtactttgattgtgacatgctttaaccatgattcaaaagttctttttctggcctttttgtactatctgcaaatttctcaagcttttattaaaaaagtagtgttggctgggcatagttgctcacacctgtaatcccagcactttgggaggtcgaggtgggcagattacaaggtcaggagatcaagaccatcctggctaacacggtgaaaccccatctctactacaaatacaaaaaattagccgggcgtggtggcgcgcacctgtagtcccagctactcgggaggctgaggcaggagaaacacttgaactgtggaggcggaggatgcagtgagctgagatcgcgccactgcactccagcctgggtgatagagcgagactctgtctcagaaaaaaaaaaaaaaagcaggttattatataatatctagcacagattagtttttttgaacaaaaatggtgcatctgtgtatgcagccacccacttgtctatctctgaaaggatttatacccaaaacactaccaattattacctttaagtgaygaaaaaatgagtgatttcaattttgtcaattttctttagctctattttcttaattttttgaattgaattttttttttttttttagacagagtctagctctgtcacccagactgaagggcagtggcatgatctcagctcactgcagtctccacgtcctgggtttgagcaattcttctgcctcagtctcccagatagctgggactgcaggcatgcaccaccacacccagttaatttttgtattttagtagagatggggtttcactagttggccaggatggtctcgaactcctggcctcaggcgatctgtccacctcggccccccaaagtcctgggattataggcgtgagccaccatgcctgacccttgamttttttttttttttttgagacggagtctcgttctgtcatgcagactggagtgcagtggcgcaatattggcttgcttwctgcaaccttctcctcctgggttcaagcgattctcctgcctcagcctcccaagtagcagggactacaggcaccttccaccatgcccagctaatttttttgtatttttagtagagatgaggtttcaccatattggccaagctggtctcaaactgctgaccttgtgatctgcctgccttggcctcccaaagtgctgggattacaggcatgagccactgcgcccggcctgaattgtttatgtaaagagaaaacatggaaattaattgcaaaagttgaggatttttttttctgtttttgttgtgtctctgtatttactttattaatgtaacagaggcttcagaaaattaatattaattagttgaattggaaggtgaattcctattttgttttttattatgcataaacatttgatgctgaaaattcatgtcccctctgcctccagagatttcagaaaaagaaatctaattaaaaattatcatctcgatgtgattcttttgtgagtgattgtgttaaagaggaataaagtggatgatgatgagacaataattaatccgtcaatacatactcatgaatttccatgatgaacagaattgaagcctccttgagtccatgaagatcttttactctccttttccacgaacctcatttcttatttcccatgaacctagaaattgaaaacaattattgcctgctgactcccaaattattatttccctggaatgtcttccagtggatactaattttccaggtaccctccactcctaaaatttcctatcaaactaggttgttaggaacagagcttcttcygtgacttcagacacatgctggaaaggaaacatcatgctaactattatagataaagcttcagcagattaagagagcatgctttgaagagaggcccattttctgcctcctcatgcataaggtctggtggttaaattctctgtaaatcatcaaattaaaaaattattttggtgtatatcacaggtttctgtttcatattgctatttgagcagtttgttttgtgacttggcctttaagaatttttttttaatctcaatagttggctagtatgggtgggaagggatgccatgattcctgtcacacagatgaaccacttgtgtgggcatctgtcaattatccctgctctggtgttgctcaagtttatttgtgtcgtctaaaccccagggccaagtaccaggggagtcctaccaagcagctttggcaagcatagaattgatggcagcttcattataattatacttctttgcatggttgaccagctgtatcatcataatagctttccatactagaggccaaaaagacagagagatatacaagctgctcaatatatttcaacaaattacattacaatttatgccttttccaactgtttcatgccttgtaatcatcccctactcccacccagcccatcagttctttcagaaatatgcaaaatttgactctagatatactttttaagtatagcgcattaagaagtgatttttttcctgttccttagaataatcatatgtttatcttttcttgttttcaaacaagaagttatttgctgtaatagatcatgtgactgtataatacatatatgataatgatgataatcataacaattgcaggccaggtgtggtgggtggctcatgcctatgaccgcagaactttgggaggccgaggctggtggatcacttaagatcaggaattaaagaccagcctggccaatatggtgaaaccccatctctacaaaaaatatataaaaatttgctggatgtggtggcacacgcctgtaatcccagctactcaggaggctgaggcaggagaatcacttgaacccgggaggtggaggttgcagggagccgagattgtgcctctgcactccagcctgggtgacagagctagactccatctttaaaaaaataaaaataacaattgcagcttttagtggcatttactttatgctgggggtatactaaacactttatatacaacatttcatttaaaacttgcaaactccatgagacaggtgcttcagatgaggaaagggaagctttgagaagtggagttacctcatgcaatgtcactgagctcttatatagtagagcagggagtcgaatccaggcagtctgacttttaatgatttaaaactcactcattcattttgacttaaatatactctagaagtcctttctgagtgtcttatcagataataaaattccattacctgatattaaatgaattcaatttacaagtttttgtttcattaaatggccaactatttacatgaaatgatattcaacatcattagtcatgagtgagatgcaaattaaaaccccaacaagaaacctttatacgcccattcaaacagctaacattaaaaaataaacaattccatggctgggcatggtggctcccacctgtaatcccagcattttgggaggctgaggcaggcagatcacctgaggtcaggagtttgagagcagcctagcctacatgatgaaaccctgtctccactaaaaatacaaaaattagtcaggcatggtggtgggtgcctgtaattccagctacttgggaggctgaggcagaagaattgcttgaacccaggaggtggaggttgcagtgagccgagattgcgccactgcactccagcctgggtgacagagtgagactccacctcaaaaaaaaaaaaaaaagaacaattcctatctttcaaagatatggaacatatggaactcttatacagtgtggtataagcattttagaaatctgtttagacagtttcttaaaaagctatacatgcacttaccatataactcagccattccgctaagtatttacacaagagaaatgaagacatgttctcacaaagatttgtacacaaatgttcacagcatcttgattcactgtagcctaaaaaccaattcagtgtccgtcaacagctgaatgtataaacaaatgtggtatatccatacagtagagtgtactcataaaaatgcaacaatgtgatgaaactcagaatcattatgcttaaagagagaagccagacacaaaaatacatactgtttttcatttatataaaattctagataatgaaaattaaattatagtgacagaaagcagatcagtggatgtctgaagctggaaattgaggaagaggtagtttgcaaagggcaggtggaaagttttaggtgctagaaagttctctttcttgattgtggaggtgattttgttacaggtgggtctttgttcttagagctcccaagatggtggcaggctgctcctaagatggagtgggctgctcccaagatggcggcaagccttttgttctctgacctggggttcttgacctcacggattccaaggaatggaacctagggccatgcagtgagtgttatacctctattataagctgtgggtcacggaagagaactgtggaacccagtgactaatgttcagcttgattaggatgaacctgggcacttagcaatgcaggaacaatggtgagcctttagcccagtcgagagcggcaatgggtgcctcactggatcagaaacacagcggacaccctgccagatctggaggggtggaagtcagcggcgggtctgcgacagcagcaaacagcagtggtggagagtgagccaaagctcagtttgagctataaaaatcacggaccagaagagtgtgcagttgcaagatttaatagagtgaaaacagagctctcatacaatgggaggggacccaaagggggttgcccactcccggctcaaatgcctggrgtttatatcccaatcattgtcccttcccctgtgctctcaggcgayatatgatttgacttatttctttacctcctgcttttagcctaatttgtattttagtgagccctctttactacctgattggttggatgtgagctgagttagaagccccgtgtttaaaggtgggtgtggtcaccttcccagctagtcttaggaattcttagttggactaggaaatccagctagtcctgtctctcagtamcccccaacaggaaaacccaagtgctgtaggggaggttggccaatgaccactctaactgcttcctgctgaattggggcgtagtaggggtcatgcagttgagatttcctcaggaggggtgccttcggtgtcatcaacatcatagcatgtgctagcaggctggtccaggggtccgtggtagatcttagtcatgaactgcatctggggctctatttgaagaacaatttgtagttttacagcttcacagcttctattctggaagagataaacttaacaaggaggttaaagatacagggattgaaatgtatggcctgcagtgcaaagtgcaggggattatttcttcagcacacttcayaggccctgactatctgcttgacagtttttaaaaggcctggtccagtaaataatgatttggccatctgatgggtgctatcaatgcctaagtgaaaggtttggtgaagggttttaagtaatttccattggttagctgcaggcaaaagtatttttccttcttcggcggctagccatcctgaggggaggaaactattttctcttgagattccccattctatttcttctgccgagtactggggcttggtttcctggaggggattaccccatactctaggggtccttctataagcatttctaatggatggtcccgccttgcggatcttttggcttcggtatctgcttggtggttcccttctatttcccttttctttcctttctgatgaccccagcagtgtaagactaccacctctttaggtttctgtacagccaataataatctcctaatggcttcctgatatttgataggtgttccctcggaagttaggaattccctttctctccatattgctgtgtgggcatggaggactaggtaagcacacttagagtctgtatatatatttaccctttttccttctcctaattatagtgtaaaatggcccctgcttttgctaggatgtctctccctaacaaagtggggctttcaggcataattagaaagccatgtgaaaagagtaaagttccccagtcacaacttagtggctgggagaagtatctagtgactgcctgtcctaggacccctaggatagtgacagatctggaggacagttgtccgggacaggagagtaagactgagaagaatgtgccagtgtccaggagacagttaacttcctggccrttaatggtcaagcatacctggggctctgtgagggtgatggcataggctggcacttgccctgggcaccctcagtcctgctgctggatcatctggttagtggcttctgactcaggactgtcccctagggcagtgggccttccagtgattcccttgacataatagacatggacgaaggggaggcttatttctattcggacaatcttttttaaaatgtccttgtggactgcactggaagcaagccctattaggcatttgatttgcccagcctttcgcttttccaaagcctccaaagtccgtttgcctgagggccacaactaagtggtggccttttttttttttatcccatttgtcccattctgcctgctcctcctgatctctattataaaaactgaggttgccaagttcaatagggtttctaagttttgctccgggcctaacgtggacttctgaagttttttcctaatgtctgcaactgactgagtgataaacttatcctttaagattagttgaccttcaatagagtcaggtgacagagagctatgcttcctcaatgcctcccttagtctctccagaaaggcagtctctcttcttttccttgtgttatagtggacatcattgaataatttataggcttcttcctaattttccttagtccttctggcatgcaagttagcaaatgtctgtggcaccaatctccatgttctgattctgtgtcccaatgagggtctacastgggaactgcctgctggcctgtggggaataattctctttcctctgttgtcatcctatcattgacctgactgagataccagagatcgccagactctygggctgcagttacggcggcacttctctcatttggggttagtgtctgatctagcaataacattatatctctccatgtcagatcaaaggattgtcctaacccttataaaacatcaatatagccatcagggttatctgagaatttacctaggtctattttaatttgcttcaagtctgacagggagaaaagtacatacactctgactgggctgaattctccagaatacatcttagggtcatttttgccttagggggaacattttctatctgaaaaaagaacatagggatgccagtgcctctagtcattttccaatgagcattagtcctagagtgtcctctatggtcctaatgcttattcctttccagggtgcataaccacccatggacctctgcttatcggattagttacgctcaccgatgtagcagtcctgcacctgttttcccacctttcttaaccacaaagaaaggggtatgggttgctggagtctagtggtcctttaacagcttgcccaacattgcctttgcactcagaggtgagttcctttccagggtgcataaccacccatggacctctgcttatcggaatagttaaygcttactgatgtagcagtcctgcacctcttttcctgcctctcttgaccacagagaaaggggttggggctgctggattctagtggtcctttaccagcatacccgacattgcctttgcgctcaggggtgagttctagagttgggctgggttcctgaatatttcataacaacccagctgccccatcaagatgcaacagttcttatgcaaatttatttcagagagggtgtaggtaaccttttgggttaggattgagatagagtttttgcccactagggcctttgtccttctttcctttgtaggaatgtgccctaattatcgaccttaaactttttcttgccccagattaagtccttttgggtaagaaatatgagagatgaatcctgtttatcctatgtgcctttttcctacgagaagaagagcaaggagaaaaagatgggtttgctttttttgtaagtactktaaggcttgcctgagtgtaaacagctcacatgtttgagcagaccaattttcctaactcgcttttacaagtgtttccctatcaattactgcatacccattgtgttttttccctcagtcaccctggaggaaccatctaccttcttgtcctgaatggagttcctcctaggtctggttggacctttgtatggtaattaagatttaaatcccctgttaggaaatctgctgggttaagggaattttcagtggttagtgttaaatcacctttttctaacagaatagctctatacttttagacttttgagttagtaagctacgtttttgctttttttgaattaggataattctgagctggtgaggtgtgctcacaatgaggtttcctctaaacgttacttttctactgctgctaagcaaagcagttgccattactgattgaatgcatttgggccatccgcaggttagtggattaagaatttttgataggaaggctaggtatgtgttgtcagtggtctcagtgttttcaggctacgcccttgtttacactgacaacaaggtagtattggagtgttatagagtcacggagaagatcttcaattatcaattgtaggttttaaatttaccctggcttttaaaggaatagggtatatactgttttttctttaactacttgtgtatctctctttctctcttttcctctctctctctttcccttttctctctttccctctctctcttttggtagatggattttgggaacacggtggaaggacgttagcttgttgcccccatttgccactataggaatgtgtgcctccctttaatttactcaattcgctttcatcctgatctattatgttgtcatagacycagttccagttgttaaagtactgggtcatcagttctaaggccctggccaaggagccgaggcttggagattgtattgcagtgggggaagctgggtagaaattgggggaggagagcatcttacacaatgggagaggaatcctagccatttacaaacttgggrtcctggcaagggtggtgggaaacgggtcccacataactgcccatgtcaagagctatatattgggaggggcaccagggacaagactccctgggttcatagcctagatgcctaaggacacagcgtagcgcttccttagatccctttggagatacaagcttctctaatacttgggagaggaagtgaaagtctgaagcattagtacctaggaggcagggatcagaggaaatagattcagaggtaaggagaattttgaggctacactttaaaaaagtcatgatcaggacccaggacgtatgggtcagaaggagatgtaggggcgcaygcatgggcaactgttgagtaaagacttctggctgcaccatgatctcgaccggccaatgctgggagtttgggatgacacctttctgtctctagtcagccctcagcttccccaggaaaattgtgaaagcagaagctggttccaggcagaccatcgctcccaaccagaagggttgggggttgttagaaagccttttcccaggaagcctcacacctgagtgttaagtccagcagccatgctaatcgtttttaactggccaacaggtgcctggtatttcctctgattctaaggaaggataggagagaatagcaagtgaaagtggtccaatattactcacagctttggagaatccccagacgaggccaccaaatgttacgggtgggtctttgttcttagagctcccatgatatggtggcaggctgctcccaagatggcggcaagtcttttattctttgacctggggttcttggcttcacatattccaaggaatggaacctagggccatgcagtgagtgttacacctctgttagaagccgtgggtcacggaagagaaccgtggaacccagtgactagtgttcagctcgattaggacaaacctaggcacttagctatgcaggaacaatggcgagcctgtagcccaattgagagcagcaatgggtgcctcactggatcagaaacacagcggacaccctgccagatccggaggggtggaagtcagcggcgggtctgcgacagcagcaaacagcagtggtggacagcaagcgaaagctcagcttgagccataacaaacacggaccagaagagtgtgcagttgcaagatttaatagagtgaaaacagagctcccatacaatgggaggggacccaaagggggttgcccactcccggctcaaatgcctggggtttatatcccattgtcccttaccctgtgctttcaggtgatatatgatttgtctatttctttacctcctgcttttaacctaattgtattttagtgagccctctttactacctgattggttggatgtgagttgagttaaaagccccgtgtttaaaggtgggtgtggtcaccttcccagctagtcttaggaattcttagttggactaggaaatccagctagtcctgtctctcaatttcacaggtgtatacatctgtcaaaatttatttaattgtacaatttattgtatttatagaaataatatatagtatatcatataaattatatataatgtattatatatagttatttgtataacataatttatttatataatgtatatcctgtgtgtgtgtgtgtgtgtgtgtgtgtgtgtgtgtgtatttttcttagaaacagggtcttgctctgttgctcaggctagaatgcagtggtgtgatcatggctcactgtattttttttgttttgttttttgagatggagtctcactctgtcccccaggctggagtgcagtggcatgatcttggctcactgcaacctctgcttcctgggttggagcaattctcctgcctcagcctttcaagtagctgggattacaggtgtgcgccaccatgcctggctaatttttgtatttttaatagagacggggttttgccatgttggccaggctggtcttgaactcctgacctcaggtgatcctctcacctcggcctcccagagtgctcggattacaggcgtgagccagcacacctggcccatcatggctctctgtaaccttgaactcctgggctcatgttatttcccgatctcagcttctcaagtaggtagggccacaagcatgccaccacacctggctaagaatattataatttattatatatagtgttattatatgtaagtcattcttcaataaagttaattaggtgctggatgcagtggctcatgcctgtagcctcagctacttagcaggctcaggtgagaggattgcttgagcccagaaggtcgaggttacagtgaactatgtatgttcctgccactgcaccctagcctgggcaacaaagcccagaccttgtctctcaaaacataaataaatgaataaagttgattataaaacatctaaagtacagcagaaaaaacaaaatttctgccatgaacatttttatacctatgtcttagcatacttatagaatgttcctgtgaattcaattctgccaacaggaaaacttaattaaaggctattaagattttaaaatattatggaaagtgtcaattgctctcctaaaagattgttactgattgatattccacaatgtatgaaagtgyccatttcaccccacttttgcgagtattgaatagttatcttttaaatgttttccaatgtggtgagaaaaaaaattttattgtgataatattcatcttttttattttaagtggaattgctatgaacatcttttgctrtgatactggagatttttatttatttgtgagttggttgctcatgttcttttcccacttttccattacgctgtgtttctttcttactgatatgtgagagttctttatacttaaaaacctttcttctttattttttagcctttcgggctgtcatttatcttctaattgtgttcatggtatctttcactgtagtgcgtttaaatttttttttttttcgagacagagtctcactctgtctcccaggctggagtgtagtggtgcaatctcggctcactgcagcctctgcctcccgggttcaagcgattctcctgcctcagcccccctagtagctgggattacaggtatgcaccaacatgcccagctgctttttgtattttcagtagagacagggtttcgccatgctggccaggctggtctctgactcctgaccttaagtgatccgcctgcctcctcctcccaaagtgctgggattacaggtgtgaatcaccgcacctggactgtgtttctttttaaagacaacttattgatttcattaacaccctattgattcattaacattgaactcatgatctgcagcactataactcatgcctgaatgaagcttatctaacaatgtattttctccataaggcacatcatggccttcttatgcttgggaacactagacagcactatgcttctgggccataaacagtgagatcaccaacaaaaagcacaaaaatgttaaaaacgtaacattaaatatactgcaagaggacacttgtttatagtatgagaggtgaaacaagtatcaccttgttcaacctcagctgggaacatgcacaatgacctactcaaattttcctgcatctgtgcatgtctgggaatgaccgtgaaagctccacatgtattgattttggggttacaaataaattttagtgagtaggctgggcgtggtggctggctcatgccggtaatgccagcwctgtgggaggctgaggtggatggatcacctgagatgaggcgttggagatcagcctggccaacatggcgaaaccccgtctctactaaaagtacaaaaaayagcgggacatggtggcacatgcctgtaatcttagctacttgggaggctgaggcaggagaatcacttgaacccgggaggtggaggttgcagtgagctgagatcactccagcctgggtgacagagcaagactccatctcaaaagaaaaaaaaaaaaawtttagtgagtagtcaaattcccaaatacagaatctgagtattaactgtaattcctctgtggtgctgctgccatgtgtacaatgagtcagtaaaagcttcatagtggaaatatttatcaaaacactgcagggggctgtatagcaggagatacacagaatgatacttcactcttgttcacaaatgtartataatttataatttatcttttaatttttaaaatcaaagttttaggtatacttggttttaaaacttcagaagttctgcagtgttaattatgaagaagagtaaccccttatgcctttctgccccttccctttgcccagagataacaaatttcaattctttttgccttttttttctgccaaattgctaaataacctgattataatgttattgattatttygttttttttttaaggcactatcggtagagataaagactaaatttcaggccaggcacgktgcctcatgcctgtaatcccagcactttgagaggtcgaggtgggtggatcacctgaggtcaggagtttgagaccagcctggccaacatggcgaaaccccgtctctactaaaaatacaaaaattaactgggcctggtggcaggtgcctgtaatcccagctacttgggaggctgaggcaggagaatcacttgaacctgggaagcggagattgcagtgagccaagatcgcaagcctgggagacagagtgagactctgtctccaaaaaaaaaaaaaaaaagactagctttctttcactaccatttgaacaaatatgcatgccctttccatccttccaaattatacattttgttagatcactattcagtatttaggttgttattatattgtttcatcaaactaaaatctggcctaagaaagcctccatactcacatacttgagtttttacctacaacccacaacctaatttagtaggtaagcaaactgaaaacctaacttaggggtatgcttcaataacagttgctgactctcagccagtcccagcagctggacctcaaagacttaagccaccagctattcagatcgtgttctgataaggcactagctgtttctataccttgcttctgctccctgcacatcactttcctttttctatccataagttctctcccactgcgcccactatacaagcagcgctggcggccctctaaatctgctgtgacttgggggagggtggggaggggttgtccgatttcacaaatcatttttccttgctaaattaaactgttaaattacgtttgtttaaaaaattttttgaaatagtacaattattattcatactctgattacattgctgctcatgtataccttcttatttctctttgttaatatttgtccagtttctttaattgccttctcaatatctatcctccatttatcccataccgcaatgcaagtgcaaacctctcagctattgtgttggtatcttccttgttgtcatcctgagctttcacttcacccctctgctttgttttattttattctttttgtattttattttatttttgagatggagtctccctgtgttgcccaggctggagtgcagtggtgtaatctcggctcactgcaacctctgcctcctgggttcaagagattatcctgtctcagcctcctgagtagctgggacaactggtgctcctcgccacacccagctaaatgtttgtrtttttgtagagatggggtttcaccattattggccaggctggtttcgaattcctgaccttaagtgataggtccgccttggcctcacaaagtgcggggattacaggcatgggccaccttgcctaccattatctgatttttaatagtttgtttgaatcaggctctaagtgaggctcatatactgcggttggttgacacttttcttaagtctcatttaatttggggtcttcttctacatcttgcattttccttgcctttttattttttaaagaaataaacatttccatttcctacagtgtttcaggcattctggatttttctgcctgcttccatatggtgtccttgaacatagtcctctgtstcctatagctcctgtcacttatttgtaagttggatctagagtcttccttatattcaggtggggaggaatgattttcttataaagtaattttctaaatttctagattacctttgaaagtaatttttccgagaaaggatgcatgagaggtagtttttgaaaacctgtgtgactaaaaatatatttttttctaccctcacacttgacttgtgctttaattgggtttagaattttagagagaaagaatttctcccctcagaattttaaggkttttttttttgctccagttttttgtctttcagcattgttgagaaattcaatgtcctcctgataaccaatactttatatctgacctgcttttttctccctagaaatgtttaagaccttttgtcagagaagtcagtattccagattttcacaatgatgtcttggtgtgcttgctctgtgtctttttaaaatccattatactgggccagtagagggaccttccaatctggaaatttatgcctttcagttctaggcaattttttctgaattatttctttggtaatattctcttttctgtttttgctgttcactaaagaagctcatattattaggtttcctggactgatgttttatttttcttaccttttctccattttccacttttattttatttttttgttctgctctgtaggtgattttcttatctcgatctttctgcctttctataatatttttccttctatcatatttttaagtgtcaagggccacaacaagcaggattttgtgagctgcagaaagaagttggatttcattctaagtttagtaggaagccatagaggattttgagcagggaaggatattatgttttacataaaaaaggatcattctcactgctataacaggttatctctgctgtaagccattgtattaatctrttgccatataacaaaccactccaaaacttagtgcgttaaaacaagactttatttttttctcaaagttctgtgggttgattgggcaattctttctttcttttttttttttaagacagttttgcttttgttgcccaggctggagtgcaatggcgccatctcagattactgcaacatctgcctcctgggttcaagcgattctcctgcctcagcctcccgagtagctgggattacaggcgtgcgtcaccatacctggctaattttgcatttttagtggagacagggttggccaggctggtctggaactcctgacctcaggtgatctgcccgcctcggcctcccaaagtgctgggattacaggcgtgagccaccatgcccggccagttgggcagttcttttgctggattcacctgggtttattcatgtgtctgcaaatagctagtggcttggctcggcctgggtgttccaagatggcttcatccagatgtatgggcctcagccgggactgctgcaatgatagtctcagctgaacttctctccatgtgttctttcatcttgtgcttcttcacatgaagatggaagtggtccaaaaagtcaagccccagtgtgtaagcacttatcctgcctctgctggcatcaactttcctaatatcctgttggcgaaaacaaggcagatgtccaagcccagtgccaacgtgggaggagaatgtatgaggttgtggatatctggaggtgtgatttttggggaaatagctgtaacaatttaccacattaaacattgttttagctacttccctttttctgatgctttgcctatcagtttaccttctgattataatttggttttccatgtaagtatgctgtcaagaaaataatgcaccaatcacacgcacttcaaatatttgctattgctgtgattgtgatagtaatttttttttttttgagacggtgtcttgctgtgtcgctcaggtggagtgcagtggctcgatctcggctcgctacagcttccgcctcccgggttcaaaggatcctcctgcctcagcgagtagctagaattacatgcacatcccacagtgcctggctattttttgtattgttagtagagatgggatttaccaagttggccaggctggtctcaggtgcctgacctcaagtgatccacccgcctccgcctcccaaagtggtgggattacaggcgtgagccaccatacctggcctgtgacagcaatttcttacaaaataataaattggctcatttcaaggacagaatgcctactgtatgagcttccagtatttttttttttttcgagacagagccttgctctgtcgcccaggctggagtgcagcggcatgatctcaactcactgcaacctctgcctcctgggttcaagtgattctcctgcctcagcctcccgataattgagattacaggcatgtgccaccatgcctggctaatttttgtatttttggtacagatggggtttcaccatgttggccaggctggtctcgaattcctgatctcaggtgatccgcctgcctcggcctccgaaagtgctgggatacaggagtgagccactgtgcctggctgagcttccagtattctttactagagycttgtggtctgtggactcccttgctaagaatcactgtagtccttgtgatctgtctcaagcttataatggtgtatgtgaaaatgtaagaaaattastaatgaattatcttgaaatgttttctctgttttgccagatatgaacaatataaagccattggaaggggtaaaaattctggatctaacaaggtttgtattggtttatctacattttggtgattgggtttttccctttcctcaaaaacttttaattttttgaattataagaagagacttatatgcttatgttgaaattttagagaagaaaataagaaaagaaaaattgctgtaatatcatcattctatgagacaattagtgtagtatttatgccttttcccaatgtatatttatatataatcttaaaaaacaaaaattggaaccatattgaaattagttttacccatattttaaacacaatgttatatttttaatattttcctatgttattcaaaattcaacaaaaaagtgaaatagtaattaatatatcgatgtcacataattacttaatcatcctctaatctttcacgattataaattargcttccttgtacacaaatgtttccctcagttttgatttcttcctcaggataaaattctagaaaaagaattataggggccaggcgcggtggctcacgcctgtaatcccagcactttgggaggctgaggcgggcggatcatgaggtcaggagatcgagaccatcctggctaacacggtgaaaccccgtctctactaaaaatacaaaaaaattagccaggcgtggtggtgggcacctgtagtcccatctactcgggaggctgaggcaggtgaatggcatgaacccaggaggtggagcttgcagtgagctgagatagtgccactgcactccagcctgggtgacagagcgagactccgtctccaaaaaaaaaaaaaagaaaaagaattataggatcaaaggggatatatatttttaaagctcctattacatatggccaaattacagttttaactgttttgattcttactaggattatatgagcgtgtctgtgttgacgggttgttggaaaataattaatataaacattttcaagatggtaattaatttatttatcatttttaacattgtagagtcctggcgggaccttttgctactatgaatttaggagatcttggagcagaagttataaaagtggagagaccaggtaaagctattactccctttaaaaaatagaaacaagctaataaatattttaaaataattctctaaatacccatgtttagtgtacctrtaagtgggataaggagagaattaaaatgaaatgattgtctttttcttctccatttcttgttttcctgtgaactaacactaatgatatctttttcactccttatgtgtgctaagtgctaaggctcaagccagtttcttctttgcacctgaaggcttttgttagaagctgaggctgggcacagtggttgacgcctgtaatcccagcactttgggaggccaaggagggcagatcacttgaggtcaggacttcgagaccagcctggccaacatggtgaaacctcttctctactaaaaatacaaaaaaaagtagacaggcatggacctgtaattgcagctacttgggaggctgaggcaggagaatcacttgaacccgggaggtggaggttgctgtgagccaaggtcatgccactgcactccagcctaggcaacagagcaagactccgtttcaaaaaaaaaaaaaaaaatgaaaaaaaagggactgagatgcagcgtataacaactatgataatgacacctacagtgccggggcaaagttctcaatgctttgcctgggcttatttaatctttacaacaaccctatgggctgatgctattattcatagtttataaaggagaaaatggaggcacagagaagtaaagcaacttatttaggggcacacaggtaataaggaatatccagaccctcagccatgattctggccttccttagccccagcctagctttagcattgagactgagattacaatgggcctggccaccctccctcaccgtggaatcaagggaaggccaggagaaaggaggataaaagtgaagaaatagggtacagaagaaggagagaaggaaaaggaatcacagtccctcaaaaaacaacctaaggctgggcgtggtggcttacgcctgtaatcccagtactttgggaggccaaggcaggcggatcacctgaattcggcagttcgagaccagcctggccaacaaggtgaaaccctgtctccactaaaaatacaaaaatgagccaggcatggtggcagacacctgtggttccagctacttgggaggctgaggcagaagaatctcttraacttgggaggtggaggtttcagtgagccgaggtcgtgccactgcactccagcctgggtgacagagtgagaccctgtctcaaaaacaaacaaacaaacaaacaaaaaacctcaaatactccaacctaagtcattcttttctattcctttttgtttttattttttagagacagcatttccctctgtcatccaggctggagtacagtggtgtgatcatagctcaccatagcctccaactactaggctygagcagttctcctgcctcagcctcctgaatagctgggactacaggcatgtaccaccatgcccagctataataataaaaatttttttgtgtgtgtagagacagggtcttgctatgttgcttgggctggtcttgaactcctgtctcagcctttcagaatgttggaattacaggtgtgagctactactcctggccatttttttctattcccaataaaagaaacatttccccattttataattttaaaggttttgaagcgggaaacgcctaagcttagatcagttttttgcttttatgtttttcatctgacatctttcctgttctttcttcctcctttgttcaccaaatagatatattctgtgtacacatttctcacttttgtttggtatcatcttagcattttggtgtttagttcaagctgttattgataaagttgcttagaaaagcatcattgttggccgggcatggtggttcacgcctgtagtcccaacattttgggaggacgaggtgggcggatcgtttgagcccaggagttcaagaccagcctggccaagatggtgaaacccccttctctactaaaagtacaaaaattagtggggcatggtggcagatgcctgtaatctcaactacttggaaggctgaggcaggagaatctcttgaacctgggaggcggaggttgcagtgagtcgagaccatgccattgcaccccagcctgggcaacaagagccacactccatctcaaaaaggaacgtgtcattgttttgtgccctttctctccaataagcacttaaagggcacagtccatgttttttaatgtctgctatatcatcatataaacagcttgttttattttatttttttttgagacaggtctcactctgtcatccaggctggagtgccattgtgtgatcatggcttactgcggccttgacctcccgggctcaagcaatcctcctaccttagctggaaccatagttgtgcgcaactgtgcctggctaaattttttttgttttgtttgagatggagtctcactctgtgagccactgcacccggccttattaaattttttttttttttggtaaaaacagggtcttcctatgttgcccaggctggtcttgaactcctgggctcaaacgatccttcgacctcagcctcccaaagtgctgacattataggtgtgggtaagccaccacacatggcctatgcagcttgttttagaagttttcaaaaattagcattattatttatgtttcaagatctgatcctacgggtcttaaacagaatccccaaatcagtgagactggtatagtgctgaatagtgtgtatgtatctctaagacttacaagagaatgatttataattacatcaacttagtaattgaccataagtgatagccatataaagtagaatatctttttgtttgtttccttcttttttaaaaaattttaaattttattttgtctttacagaaagtagaatgtttgatctggaagattcaatttcttgttaagtagatattcttaagaggccaaagcagttagcagaagattctctgatgagcatggggaatattgtatattagtatattatattttattactttttattatccctgacagtcttaggcagtagaagtgcctggcaagtcctgctcccagagatgatgctttgtttattcagctaatgatgttcatcgcttttagtcattgttggatacatgcggaagaatgtttattttctagctcaacatttgttttttttctttaaagcttctaatttccatattgctatctgatttcaacactgcagcactacaaccattggttttcttgcattttccattcctagatagaacattcaatgtattaataatttctcttgctatttctgttggccaccagggtaacatttgtatttctattaattttataaattgttgttccctatatagtgaggcctatttcctctttgtactttttagtttccaccatggaaactaaaccacaacagatctttctttgtctaggcctttattatgtctcatcgccatacacttggtatcgggctttgttcctagcagggatttattgtcttyttttttttgagacagacttttcgctcttcttgcccaggctggagtgcaatggcacgatctcggctcactgcaacctctacctcccaggttcaaatgattctcctgcctcagcttcctgagtagttgggattacaggcatatgccatcacccccggctaatttttttatttttagtagagacggggtttcaccatgttgaccaggctggtctcaaactcctgacctcaggtgatccacacacctcggcctcccaaagtgctgggattacaggggcgagccaccrcatctggcctattgtcctttttttgaccagttactatgactccctgtcttcacccttctgattaatacattttaatattcatattatatatttaattgttttgggtttttgagatagttattcaacacagatatgagaaaaagggattttcattaaaagcaacttggtggtattttcacatttcaatagaaaactagtttcattttatatccacttctacagttcctcaattacataaaatttggttgttgttttctttctttctttctctctttttcttccttccttccttccttccttccttcctttctttccttctttctttctctctctctccttcttttccttccttccttctctttcttttctcttttattccttcccctcccctccccttccctcctctcccctcccctcccctcccttctcccctttcctcctcttctcttctttttcttttcttttcacaggatcttgctctgtcccctaggctggagtgcagtggcgcactcctggctcagtgcagcattgacctcctgagctcaagtgatcctaccacctcagcgtcctaagtagctgggaatacaggcgtgtgctaccacacctggctaattttttcattgtttgtagagacagggtttcaccatgttgcctaggctgttctcaaactcctggcctcaagtgatccacccaccttggcctcccaaagtgttgggattaccagcatgagccaccggatctggcctggttgtagttttctgatttactattagatgagattatttttatttgtgtaaccaaagagcatattatatttatgtatactcttctttttgtagagttagccagtcagtgggtgtatctgtgtgcctgcagggccaggcagggaacctaagtgaggaaagtgagcagggaagtgagcaaggatgcagctgaaatttcagcattgtctccactaggggacacgaggccagggctgttggtcttttgttcactgctgtgtctgctctgcacagagcagtgtctgtgacatagttggtgctcattaaatatttgttgaatgaatgagtgtgtcaaaaggtcatctaagaaaggcagtgtgaatttttaaagatttccagattttgaaatcatggcagctagttaaaaattttaagaattgtgcaggtcacgtatgtttattgcggcactrttcacaatagcaaagacttggaaccaacccaaatgtccaacaatgatagactggattaagaaaatgtggcacatatacaccatggaatactatgcagccataaaaaatgatgagttcatgtccttcgtagggacatggatgaagctggaaaccatcattctcagcaaactatcacaaggacaaaaaaccaaacactgcatgttctcactcataggtgggaattgaacaatgagaacacatggacacaggaaggggaatatcacacaccggggcctgtcgtggggtgtggggagtggggagggatagcattaggagatatacctaatgttaaatgatgagttaatgggtgcagcacaccaacatggcttatgtatacatatgtaacaaacctgcacrttgtgcacatgtaccctaaaacttaaagtataataataaaaaaaaaaagaattgtgtgggtcaaataaaacatgtctcccaagctgcaggtttttccagtttatgtcctttaaccatacatttcctgtcatgtgccatggacacagagccttctgaaaccccagttagatcaggaaagcctgtaggcctccagtttagactcctgacattatctccacctgagatatgagtgcaaatatctaaaataaactactagcctggtgcagtgggatcactttgggaggcctaggcggctgggtcacttgargtcaggattgaggtcaggagttcggaactagcccggccaatattgtgaaaccctgtctctactaaaaataaaaaattagtcgggcatggtggtgcacgcctgtaatctcagttactatggaggctgatgcaggagatgtcattggtttatctccagttagaactaatgcttcttggctgggtgcggtggctcatacctgtaatcccagcactttgggaggctgaggcgggtggatcatttgaagtcaggagtttgagatgagcctgaccaatatggtgaaaccctgtctctactaaaaatacaaaaattagccgggcatgttggcgggtacctgtaatcccagctagttttagcaattgatggtacagtgaaattatagttctagaarttggtagtactatttttatttttattttcaaggtcacttagaaactgctttaaatggatgggcgcggtggctcacgcctgtaatcccagcactttgggaagctgaagcgggtggatcacctgaggtcaggagtttgagaccagcctggccaacatggtgaaatcctgtctctactaaaaatacaaaaattagccaggtatggtggtgcacacctgtaatcccagctactcaggtggctgaggcaggagaattacccgaacccaggaggtagaggttgcagtgagcagagatcgttcctctgcactccagcctgggcaacagagcaagactccatctcccaaaaaaaaaaaaaaaaaaaaacaaaccccaaagattaatagctcatgttattattttcaggagctggtgatgatacacgaacttgggggccaccttttgttgggacagaaagtacatattatctcagtgttaaccgaaataaaaaagtaagaatatcatcccttttttgctttttgtgtgtaattctcttataatagcaaaactgttgatatcattgtggcttgtttttttcttccttaaaaaaattaagatgtaactaatatttcaaataaattaaaattctattcatttaccattcactaagtagaaataatggagctttttactactctttcttacctactaagtaacttagaacatttcataagaatttataatggaaataattttatgaaatagaaaaattatttgattccttacatttgttattattagggaataattgcctaacactcggtattatactttaaaaacatctcctatcatccttgttagcatattaatatatcctcatggtaaatagaatcagtaaagatgatttaaatatttcttcatgcataaaataaatttaagaggatgatctatgatatgaatggctttcttgtcagcaataagaagaactttcatggctgggcacggtggctcatgcctttaatcccagcactttgggtggctgaggcrggcggatcacgaggtcaggagatcgagaccatcctggccaatatggcgataccccgtctctactaaaaatacaaacattagctgggcgtggtggcgtgtgcctgtaatcccagctacttgggaggctgaggcatgtgaatcgcctgaacccgggaggcagaggttgcagtgagccaagattgcrccactgcactccagcctgggtgacagagcaagactccatctcaaaaagtaaaaaaagaaaaaaagaaaaacttttatgatagtattttaatacacatacttttttttttttttactttttattttagattcaggggatacatgtgcatgtttgttatgtgggtatattgcatartggtggggattgggcttcttgtgttttggtcatcgaaataatatatatatatatattttttaatttttagagtattgctgttaatatcaaggatccaaaaggggtgaaaatcatcaaagaggtacagtatgatgtatagaaagcatcctaccacctaggttataattagggtttggaatatcagagcaaaagtgttttaaaactcaattttatgggtgatctgtacgtttgcaacaaataccttttaagtatttactttgatttgtatacttctttgtaagtgtgatgtgctttaaattttttgtatattgtgtatcattatggtgctagctactattgactgagcaccaactctgcagcaaatcctgggcttgggcactttgctcacattatctcctctaatcctcagattttaccttgtaaatgaagtattgaaatctcatttacataaaagggaattgagtttcctggtgcctaagtgatgctccaagattccctagctagtatggggaaaagctgacatttggatctgggtcacatcactggaaagtccaagctttctctaacccttactcagatgaccaatatatccagacctgatctgagcatctttcttagaggagctggaaggcacagtggttaaattaagggtggatacctttgcatgggatttgaatcctgccttctgtgcttactggctatatgacctcagacaggttacataacttctttgtgtctcagtttcttcattagtaaactggaggtaataatagtacctactttctttctttttttagaaacagtctcgctttgttgcccaggctggagggcagtggcatgatctcagctcactgcaacctccacctcctgggttcaagcaattctcttgcctcagcctctggagtagctgggattacaggtgtgcactagcacacctggctaatttttgtaattttagtagcaatggggtttcaccatgttggccaggctggttcgaactccttacttcaagtgatctgcctaccttggcctccaaagtgctgggatttacaggtgtgagccaccgcgcccagcccaatagtacctactctctagggttgttgttagaattgagttagtctttgtaaaatgtgtagacgagtgcttgccacatagtcagcactcatgaggtattagctattattattcctatgttcctgatgttggattcatcatgtgggataaaccttgtttgccatccttgttaaggtttaagttgaatctaatggttgtayagtattcttctgtattcaggggattggttctactagaacctccacatataccaaaatctgtgcatactcaagtcctgcagtcggccctgtggaacctgcttatacaaaaaattgcctgtcagggtacatgggttttgcatccagtgaatactgcattttccatccacgtttggttgaaaagaatccacctaggggtggacttgcacagttcaaacccctgttgttcaagggccaactgtacttagggctatttggttagagaaccaagtctcaaacttatttatttagagacagagtcttgccgtgtcacccaggctggagtgcagtggcgcgatctcggctcactgcaacctttgcctcctggtttcaagcaattctcctgtctcagcctgcggagtagctgagtccacaggtatgtgccaccatgcccggctaatttttatatttttagtagagatggggtttcaccatattggtcagtctagtctcaaactcctaacctcaggtgatccacccgcctcggcctctcaaagtgctgggattacaggcgtgagctaccgcgcctggcctcaaactttattttttaccaaaacattaacttagcttcaattgctctgcygctgctttatgttctctgtctcagttattgaaagataatctttaattattaagatcagaatcagggaccattctttttagttctgctggatcaatgcagccaatttagaattttcgttaactagatatattttgaacccaaaacttgaaaatcatcctgatcttaccactctttcttcccatatctttcctgtagcataacttaggtttgtttctgtttttcttttgaaacttggtttgatttttctaaattgttttcctggcctcaagcaatccgcatgcctcagccacccaaaatgctgggattacaggtgggaaccaccatggccagccaattgcttttagatagttattacaattaataagttatgtatcttactatctaaaggaaaaattattttttctctagtctttcatatttctggtacagatttctcttctggccttaagagtagcaaaaaatgccaggcatggtggctcacgcctgtaatcccagcactttgggacgccgaggtgggcggatcatgaggttaggacttcgagaccagcctggccaacatggtgaaaccctgtctctactagaaatgcaaaaattagctgggcgtgttggtgcgtgcctgtagtcccagctacttgggaggctgaggcaggagaattgcttgaacccgacaggcggaggttgcagtgagccgatattgcaccattgcactccagcctgggtgacacagtgagattccatctcaaaaaaaaaaaaaaaaaaaaaaaggattagcraaaataacccctctccatttaggccttggtggctatgattgctaatacaatgagtttagtttatagaaacagttccaaagtattacacaaggcaatcagctggatacatgagagcttcaaaaagtatgactcctttgtcagctaggctaaccaaaaacaggttgtgtaaaaactgaaactctgcctagaaaacctatatgaaacttagtattattgtggcaatatgatttgataacttctgatcatgtcttatccaatatttcagacaattttctatgttaattagttgacagttacaatatcattattatgggcatgtgttatggtcagcagagcaatgcatgagttttattttcctataacattttgttatgaaaaattaaaacattcagaaaagttgaaagaataatgaactctcatttatcctatgcctagatgaaacaaaaatattagaattttgctatatagcatgcagtttattttctttctttcttttttttttttttttttgaggtggagttttgctcttgtctcccaggctagggtacaatggtgcgatctcggctcactccaacctctgccttctgggttcaagcaattctcctgtctcagcctcccgagtagctgggacttcaggtgcccaccaccatgcctggctaatttttgtaatttttagtagagacggggtttcaccgtgtaggtcaggctggtcctgaactcctgacctcaggtaatctacctgcctcagcctcccaaagagctgggattgcaggtatgagctactgtgcctggccagcctgcagtttattttctttagtgcttgtagtagtgtttttktttttttttttgagacagtctcactctgttgcccagkctggagtgcagtagtgagaatttggctcactgcagcctccaccttctgggctcaagcagtcctccttcttcaacctcctgtgtagctgggactacaggcatgtgccaccatgcctggctaatttttaaattttttgtagagacgaagccttggtatgttgcccaggcatgtcttgaactcctgacctcaagtgatctatcmccccgactcagcctcacaaagtgttgggattacaggtgtgagctatttggcctggccaattactgtgttttttttttttttttttttttgagatggagtctcactctgttgccccaggctggagtgcagcagcacgatcttggctcactgcacctccacctcctgggttcaagtgattctcctgcctcagcctcctgagtagctgagactacaggcacgtgccaccacgtccagctaatttttgtagtttttgtagagacagggtttcgccatattggccaggctggtctcgaactcctgaccttaagtgatctgcctacctaggccccccaaagtgctgggatttacaggtktgagccactrtgcccggccaatttatttaaaaaagattttttttttttttgaagcaggttctcactctgtcacccaggctggagtgcagtggcatgatctcagctcactgtgacctctgtctcccaggttcaagtgattcttgtgtctcagcctcccgagtagctgggattacaggcatgtgccaccacacctggctcatttttttgtaattttagtagagacagggttttaccatgttggccaggctggtcttgaactcctgacctcaaatgatctgcccccctcggcctcccaaagtgctgggactataggtgtgagtcactgcacctggccctttaaaaacatttttaaaagtatgtagtcacaattgaaattttgggaaaaaaatttcccaattttttgtaaaatttctgtaaaattaaggtttacaatgctgcattgtcctctaattcccgtaacagcggtctgggcatcacaatctggattttgttcctgacagttcctggtttactgggctatagtttagtagcctgaagaaaaaaaactccagtggttcttaaatacatttaaaactctttgggaagaatgcatctgaaaggtgtgaaaacatttcagaatcctgcttaagtgcgttaagtgcatgttataatgaggaatattacataataatagggatgctgagtagtagagatattgtgtttaggtctgtttttggagacaaggtctaacagtctcccaggctggagtgcagtggcgccatcacggctcattgcagcctcaatttaccggctcaagtgatcctcccacctgagcctcccgagcagctgggaccataggtatgcaccaccgtgtctggctaatttttgtagagatgggattttgccatgttgcccaggctggtcttgaactcctgatcttgaactcctgggctcaagcagtccacctgccttggcctcccaaagtgctgagattagaggagtgaacaaccacacctggcctatttagttttcttgtaaaggtttaaaaaatgtttttcattgatttagtgtacttacattctaatttttctacctaatcttttgagaatctatttggacagaccatgtagtctagatatttattacatttgaaggatgcagaatccattctgcatgtacttacatgtacttacaaaaactttaatagccattattttactgacagtaatgctttaagtagttgactagaacttctatgtttatctaatttgcttcatcagtcctgtgatttttctgagctattacaaagggagaatcaattgtgtaaagttaaaattctatcatgtggggatttgttgagtggaagtctgactcatgttcacctcttccatcagcttgcagctgtttgtgatgtgtttgtggaaaactatgtccctggcaaactgtctgcaatgggcctgggatatgaagatatagacgagattgctcctcacatcatctattgttccatcacaggtatttcaaccccacacccttgtcagttaaaaggttttccagtttctgtgttttcttattgctataagaaaccttttgctggctttttttttttttggaagttattctgttttcctttttccaaggccgtttaggttgctgaacttacttttttcttttttcttttttttttttttttttgagacagagtctcgctctgttgccaggctggagtgtagtggcgcgatctcggcttactgcaacctctgactccctggttcaagcgattcttctgccttagcctcctgagtagctgggattaccaggcacgcgccaccacgcccagctaatttttgtatttttagtagagacggggtttcaccatgttggccaggatggtctcaatctcctgacctcgtgatctgctctcttcagtctcccaaagtgctgggattacaggcgtgagccaccacgtccggccttggctgctgaacattattaagaaacattaacctaaatgaatattttcataaatttattggctatttgtatttcttctttgaattgtctgcctatagttttgctaagttttatgttgatgttttgcaaatgtttacaaaatactgttattaactcttgcataggtgaatttacagttgaaaacaattcttttttttttttttttttttttttgagacagagtctcactctgtcgcccagcctggagtttagtggcatgatctcggctcactgcaccctctgcccctaggttcaaaggattctcctgcctcagcctcctgagtgtctggggttacaggtgcctaccaccatgcctggctgatttttgtatttttagtagagacagtgtttcaccatgttggcgaggctggtctctaaatcctgacctcaagtgatccacccaccttggtctcccaaagtgctgggattagaggcatgagccatcactcctggcctacagttgaaatgttaattggctttaagataataacataggaacccaaggtatcccttcaatatattcagaagcactaagccaaaggaaggaaaagagtggcataaagtcttccaattgttcagcccttgccagtgaacctcttatatatgcatgtatgtgtatgtttaggctaaagggaaaaagtcacggtgttacttagttttctatataagtacttaactcttaattagggatgcgatagagaaaagtgactcataacataaaatgttatattaatagtttgcatcagaaaaattcataatattttaagtttttactcagtcatccaccaaatatttactgcaagcctttgatcttccaggcaatagactcagattctggaatacaggagtgataaaaatccatctgtgctctctagagcatttatatgctaggttagggtgatagatagtaaataaataagcacttttgtttttgtttttggtaattgagtctggtagttggcaagggggtggggtgaggataagttatttcaaactggtaggtgagagaatgccctacccatatggtgacatttgagtagagacctgcatggggtaaaggagtgaaccacatagctactggcgaagagggttttaggcaggacaacaccaagtgcactagccaccacacccgggtaattttttgtgtgtttttcatagagatgaggttttgccatgttggccaggctggtcttgaactccttgccttatgtgattgtgttattctattcccagttccacctgtaatgcagagcacatgataggggttccacagccaacagcagtttcttttttggaggcagtgtatctctctgttcctcaggttggagtgctttggtgcaatctcagctcactgcaacctccacctcctaggttcaggtgagtctcctgcctcagccacccgagtagatgggattacgggcatgtaccaccttgcctggctaatttttgtatttttagtagagatggggtttcaccatgttggccagactggtcttgaactcctgacctcaagtgatccacccacatcagcctcccaaagtgttgggattacacgtgtgagccactgtgcccggccctgatgattaacttttgtactgaatgacaggttctgtacttggtagatgattcttggccactagatctcactttttaaaatgtgctgttttatagatccataatcatattttcatttttctgtctaaacaatatttatatgtgtgacagagtgagggagagatttttttccatcagaatcttgtaatctaatggaaatgttgaggtttaaaatcttaatataggtaaattatcttctgaattatcatattaccataaaaacgctgcatagccaacaaatgcaaaatgctatatgacaataagcatttatttctgtttcccatgtctgtggttggctgggattcagttgatacagactggttaggtttggctccaagttgtgcattgggggactggtatgctctgcatgtctgttatcctccttggatcagtggccaccaaatgcatctcccctcatagggaaaggtggagtgcaagagaacaagcccattttcaccagtgtgtttaaagcctgtgctcccaatgcatctgctaacaaatggagtatttgtcaaagcaagtcacatggccaagtccaataccaatgggtggtgaaatacattctgtttcagagggaggaactacaaagtcacatggcatagggtgtgggtttcgagcaggatgacaattgagaataataatacattttatcacatcatcgagtcaaaaaaaatgttagtctacttgggaagcccacacttcctaatgattcacatttataactaactggttagggtcaaaagttcttctgggccttgacttaatgattggagagtctctaagttttcttacagttctcaaattctgtattaaaattttagtgtggtgaaatggcattggagatagattatatwattcagtagttctcagacaaggaagaatggttctatcatgtgctttttagtgatattatggaggaatgagagggtgataggcagatatgtgtagtctgaaaacgtacctctcattattctataatctcctaattcccacctcctgacagttattagaataacatctatatactccgttctcctttatttcctgataatgaaacagatccagacctaaggtcacacagctatttaatagcagatgggtttaaaactcaggcttcttgtcttagtagtaagtgcctctatgctttccatacttagacatatcaataagtaatgacagattttgtaattaggtgacactgaacagtgctacttgagaataatatatttttgccattttctttcgcttgttaattttatttgcaatagtggaagtcatgaacaaatttattagtcagggagtctaaatttcaacagattcttctggaagccaaagtcattcatgagttgtgagtttgtgtgcatataaagcaaggttcatctctttttttaaaatttgattttcttggctgggcgtggtggctcatgcctgtaatcccagcactttgagaggccgaggcgggcggatcacctgaggtcaggagttcgagaccagcctgaccaacatgacaaaacccccgtctctactaaaaayacaaaaattagctgggtatggtggtgggtgactgtaatcccaacactttgagaggccaaggcgggcggatcacctgaggtcaggagttcaagaccagcctgaccaacatgacgaaaccccgtctctactaaaaatacaaaaattagctgggtatggtgggtgactataatcccagctacttggaaggatgaggcaggagaattgcatgaacctggaggcagaggttgcagtgagccgaaatcatgccattgcattccagcctgggtgacagagtgagactccacctcaaaaaaaaaaaaagtttgattttcttggtaatcagtgtgtctgtgtgtgtgtgttttttttttaataagactgattacatcagtctaaagttgcacatgttgtgattgagatcctagactttcctgatatttcccaatggtattgctctcttgtcagtgctgtccaagcccaaatagtttgttctcactcacatgttggccctattgctgatgagagtaatcttagaatggctgggagattgactttaatgcactctgacagttgtgtggttgaaattgcctcagtctatgaaatctggtctgcaggacaaaaatgctagagtgatcacaagggaggaaggacctgattatttttattagcatggtcctcttatcatttcagaggaagctgagtatgcacattagggggcagtgtttaaacagctattattcactaggaattatttttgtgaaaagggcagtgtttcctgtgtaccactgggtaggaagattctctgaaggacatatttatatttgtgaagtgaccactctatatttctctatacttttagaagtacaatggtatttcccctaacaatttaattttaagttgtaccttctttccctcgtatcttctgaacatgttattaattataaaaatttagcagtaggaatcctckccactacattttaaaatgttatttctcctgttcttgttaatttcattactctttctttctggaaggataaacatttcattatattattgactagactgagtttgtagtgggaacactgtacatgtcatttaatgaagtttcttttttttttttttaaaggaagagggtttgaaaagtgccttttttatttttgtgaattcctcagggacatttccttaatctctatttatatagcattacatagagttaaaatcatacaaaatatatgtgtttaaaatatgaagacatacaaggtaatgaatagtacaaaattcaagagaatgattaaccctggggagtggggaggtaggatatgggacagggaagagagaaccacagaatttcaattatattcacaaaataaactgactggctggtacatgagtattcgtcattctgtattttatgatttaagtgagaataaaagattcagaaatgcccaaatagctcccctccttatttccttcctttcttccctttcctacccccaaacaactatttcttgatcttctgtatattcctggctgtgttgagtgctcagggcaaacaatgtagacattgtccttgcatttttaaggagctgacagcctaggtcagagacattctataaacaagttaaaacatataataaatacaacatgtattagcaaactatactattatgaaagaatgaaatagtactgtggtggagattaacagaggaggggttgcatgctgyaaatgggcttgtcagggaaggtttttttttgrggggggtaacatttaagagacctgaaggatgacaaggagccagccatgtaatgagcaaggggagaagtgattgaggcagagagaataccatgtgcaaaggctccgtggtaggaaagatctagacgcctttaaggatctaagagaaagccgaagtgtttggaacactaaaaactgagagcagtatgcttgaaaagatactgcagaggtgtgcaggggccatgacatgctaggatgggtctgagcagtggaggggtaggatcataatctttaaaagaagtaggatttttcagtagaatgcagattaaaaaaaaagaggtagaattcaattcctggttgactgacttcattataggcattggagattgaaatggggctcaggtttcacagagtagctataaagataattttttaaagattattaaaggccctcatagtgtttcagagtcaatagcagagaatggtgagcccaaatggatgaggcaaattatttagcaactgcattctacattcatatcacagcaacgggaatacaaaacaaaacactgctgcagttggattcttacggcatgagttagtctgtgtgtgtgtgttcttattttcggcatattcaccacataactatagctttaaaaaaagatagaataattagaataggatctgcaaatccatactgcaaattcatagatgttttgaaggtgagaaaagacattaagactagagagagggaaaataagaaaggaaggaagagggaatgaaggaaaaaggaaggagggaatgaagaaaggaagaagagaaggaagaataaaataagagaggcagagtggagtaaaatgggataacaatcagcaagattttttaaaaatttctaaagacagtagtctagttcatctggcgatgttcacactgcattaagtatcatttttagactgaataaataatcaatatggagatgatagtttaatagatgatattaaagggaaccctcatagtcaaaacaattgaaaactactggtctaaattatgagtgtctctgttgcaccctcttatatcaggaaatattttttcaccagagtttcaggatattgtggccatctgtccaactgtatagacagtgatctttagtgaaagtgtggtttgacatatttaccatttcatattaagctcattatttaaagaaataatgacaccatctctgcaggggaagagaaacttagcatataaatatagggtttcaaaacacagcccttggagctaaggactgagattatattttgtctgtagacatggactgattccagaaaatgactttatgcctttattttattccccaacagtataaccttttatctttaaatatttctttttacccatacacatataacagatgtgttacatgagttggacttactggagtaccaccagatgctttcttctctcccagcccacctctgcaaacctgcactgtccacttattctctttgctcatagatgaaatcccaggcaagtcctatagattttttttctcctcagttatttcttttcttttcttttgaaacagggtctggctctgttgcccagtctgtagtgcagtggtgcgatctcggctcactgcaacctctgcttcccaggctcaaatcatcctcctcctcagcctctcgagaagctgggactacaggtgcatgccaccacgcccggatagtttttgtatttttggtagagatggggtttcaccatgttgcccaggctggttttgaactcctgggctgaagtgatcttcctgcatcggcctcccaaagtgttgggattatagacgtgagccaccatgcctggcagttatttcgtttaaagtattaaaatgttcagtccagtctaatatcaaaacctcagactcttgtccagtttatgacgtctccttttccccaacttcaggctactttcttgggaatgtgaagaggatgtgtgtgtgtttgtattacaggtgcacatatgttgcatgtgtgtgtgtttgtattatgtatgcacatgcatgcatgtgtctgcatgtctatgtgtttcggaagagcctagtcagtttcttcattatccatcttttcctattgttagctgctatttgtggtttttttcagaatcaggccctcccagggaagggaagcaagttaaagggtgcaataagggtatgacttgactggtgtagttgtaacctgcagtggagccttctgtgtgcctgaagttctgtaggtggctctctttatggggagttttgtagtctcctcagagacctcagattgtagttctcccayttcagtccctgttttttgtggttgtctatacacagagtctatctgttatgatcaccttgtcctataggcagccctcatgggtagaattccttttcagataaactccttctgctttcctcatggtgaacttggcccatggggaaaaatcctccctcctccttggccattggcaggtgtacagtttattccgaactcttrgctctgttgcttttagccgatgtagccataaccccttgcctttggtattctttcagacacatgccacaggtgcttaggtaattccaaattcccagaattcccaaattcccttagcttgtatcaaggtctctgacgcttttttggaagtctctcttgtgtggcttaagttaaggggaaaacagcttgctcctctcttatgacagaatgagatgcctagcatacaataacaactctttccaaggaaattcagctgaaggttttatttagcttttcaccttttctcacatatcctcaaatggatgataagctaatggcagcaaaactggtttcataatcttttagtgttatctgtgctagtgttctggcactaggacattttttgggggtttgaagcctcagatgaaactgagagaaggagtctctttgcaacattctttaaagcaaattttgctgaagaaatatgtttttcaggtagtaaggattaacattaagtcgagtgaacatgagatagctgtcttcaaagtttctaactatggaaatagaatatttatttaagccgggcacagtggctcatgcctgtaatcccagcactttgggaggccgaagtgggtagatcgcttgaggtcaggagtttgagacctgcctggctaacacggtgaaaccccgtctctattaaaaatacaaaaattagctgggtgtggtggtgcacgcctgtaatcccagctacttgggagactgaggcatgagaatcggttgaacctgggaggcggaagttgcagtgagctgagatcgcaccattgcactccagcctgggcatcagagtgagactccatctcagaaaaaaaaaaagaaagaaaaaaaagaatatctatttaataagataaacatattttggctaatgttgtagattttcaactatttaaacccaagtgaaaaggttaactttttctgtatatataatttaaaaatatattttcctgctataaaaaatcaattgaaaggtgatattgaattgttactgggtataagaaacattatgacagttttccttgtgaattttttttttttgagacaaagtctcacttagtcacctaggctggagtgcagtggcatgatcatagctcactacagctttgacttcccaggctcacgtgatcctcccgcttcagcctcccgtgtagctgggatcataggcatgcaccaccacaactggctaattttttgatttttttggtagagatgtggtctcactatgttgcccagactagtctcaaactcctggcctcaagtgatcctcctgccttggtcccctgaagtactgagattacaggcatgagccagccactgtgcccagcctacttgggaattttttttttttttttgatacggagtcttgctctgtcacccaggctggagtgcagtggcgcgatcttggctcactgcagcctccacctcccgggttcacgccattctcctgcctcagcctcccgagtagctgggactacaggtgcccgccaccatgcccgactaattttttctatttttagtagagacagggtttcactgtgttagccaggatggtctcgatctcctggcctcgtgatctgcccgcctcggcctcccaaagtgctgggattacaggcgtgagccactgcatccggcctgggaattctttatgaaactgtgggattaagaaaatcttggagccaggcacattaactcatgcctgtaataccagcactttgggaggccaagacaagaggattgcgtgagggtcagtagtttgagaccagccggcgtgacatagtgagacctcgtctctagaaaaaatttgaaaaaaaaaaaattagccaggcatgatgacacaagcctgtagttccagctactcaggaggtggaggtgggaggatcatttgagcccaggagtttgaggctgcagtgagctctgattgctgcagtgagctctgattgcaccactgcactccaacctgggtgacagagtgagaacttgtctcttaaaaataaaaagagaagggcccggtgcaatggctcatgcctgtaatcccagcactttgggaggctgaggcaggtggatcatctgaggtcaggagttcgagaccagcctggccaacatggcgaaaccccgtctctactaaaaatacaaaaattagccaggcgtggtggcgtgtgcctgtactcctagctactcggggaggctgaggcaggagaatcgcttgaacccaggaggtggaggttgcagtgagccgagattgcaccactgcactccagcctgggcgacagagcaagactctgtctcaacaaaacaacaaaacaaaaataaaaagrgaaaaggaaaaaggaaaatgtattggattggaacatggatgaagtgatttcccattctgttaaaagtgacaaaattggccgggcgcggtggctcacgcctgtaatcccagcacgttgggaggccaaggtgggcagatcatctgaggtcaggagtttgagaccagcctggccaacatggtgaaaccccatctctactaaaaatacaaaattaaccgggcatggtggtgcatgcctgtaatgccaactccttgggaggctgaggcgggagaatcacttgaaccctggaggcggagattgcagtgagctgagatcatgccattgcactccagcctgggtgacagagcaaaacttcatctcaaaaaaaaaaaaaaaaaaaaagaaaagtgacaaaattgttcatcttagaagagctctgctgggtgtaattagggatatgcaagtaccctctcatgacacagctttgtacataaatgtatgtggtctacttcaattcccagatatttttayttttctgatactattgatttaaaaaagagaaacccaaaactttaacaggagattgagctgtttttctacatattctaaaattccagaagcaaagagatcgcctgggcctagaaatacagtataaatttagtatagatcattacccactaagaatcagttgatttcatctttggtctctaatttctgatatatggttagaatagtttccaatttaaagaatctcttggagactagggaccagtaaaaggaaaaagatgacaatactagttaatgtcacagcagtagttatttcaaaactttcacaaattgaatgttttatagatcgtgccagataaacatgccaggacttagccaccatccaaaaaccctgtcatcaaaactgaattgtttccccttatggtaataggcctgggaaataaatccataaatttaaagaagcaatgttagataagaaaaaaattttatacttaaaaggataaaaacatacatgtyagatagtgtttagatagcattcatctcgctaattattttttccattctttgcatgtttcttcaagctagcattagtgcaataccacaactttcagccttttatttgaacctcagtatatttaatcacaaaggttaaaagtatgtggagtaggtaatagtttgaacctggaaagatcagggattttgatggaataccagattgtggaatcagtgaaatccaacttgtaaagaatatattatgcacaaaggtttttcaagtgaaaaatatcaaagtttaagaaatttggcaaacgtacagttaagtttatatgagggattagttccaggaccttctgtggatgttcgaatctctgatatgataggcatagtgtttgcatataacttatgcacatcctcctgtattctttaaatcatctttaaattacttgtaatacctaatataaagtaaatgctgtgcaaatagttgttatacctattgtttaggaagtaatgacaagaaaagaaaatgtacatcttcagcacggatgcaagttttttcctaatattttcaatttgtggattggttgaatccatggatgtggaacccatggatacaaaaggcagattgtatttgattataagaaagactagtctggtcaggcacagtggctcatggctgtaatcccagcacttttggaggctgaggcaggaggattgcttgagcccaggggatagagaccagcctgggcaacatagtgagactctgactctataaaaaataaaaaaattagccaagtgtggtggtgcgcacctgtggtcccatctccttgggaggctgacatagaagattgcttgagcctgggaggttgagactgcagtgagctatgttgtgccactgcactccagcttgggtgacagagcaaagatctggctcaaaaaagaaaaaagaaagactagtctagcaagccaccaattaggaaatgggcaaaggacttgaatacacattgcttcaaagaagacatacaaatggccaataagcacatgaaaaatgctccacatcattagccattagggagatgcacaccaaaaccacaacgagatacctaccatctcgcccccattaagatggatactatcaaaaaaccgggaaacaacaagtattggtgaggatacagagaaattggtacccttgtgcactgttggtgggaatgtaaaatggttcagcccctatggaaaacagtatggacattcctcaaaaaaattaaacacrgaagctgggcgtggtggttcacgcctgtaatcccagcactttgggaggccaaggtgggtgggtcactcgaygccagaagtttgagatcagcctggacaacatggtgaaatcctgtctctaccaaaaatacaaaaattagccaggcgtggtggcgggcacctgtaatcccagctgctctggaggctgaggcaggaggattgcttgaaacccagaggcagagactgcagtgagctgagattgtgccagagcaagactccatctcaaaaaaaaaaaattatacacagaattagcatatgattcagcaattttatttctaggtatataccaaaagaattgaaagcaggacctcgaaggattatttgtacacgcattttcatagcagcattattcacagtagctaaaacatcaaagcaacccaagtatccattgacaggtgaataaataagcaataatgatggaatattattcagccttaaaaaggcggggaattctgacacatgctgcaaggatgaaccttgaagacattttgttaagtgaaataagctagtcagaaaaggtcaagtactgtatgattctacttatatgagattcctagagcagtaaaattcatagagacaggaagtaaaatggtagttgctagaggttgggaggaaggagagactcgggagttagtgtttaatgggtatagggtttcagttttccaagatgaagaagttctggagatggatggtggtgatagttatgcaactatgtgaatatatttaatgccggtgcactgtacacttaaaaatggttaaaactaatttttttgttatgtatattttgccacaattttaaaaagtagagaaaaaaaggaaagaatagtctaaactataaggtattccatggaagaaattcagattactatgtcacaagtagtagaaaatgttttaatatgtcttggatcatggtctacaaatacaaataaatatttgacaactaggtattgaatatgtaaaatattctcttgttcaagaataaattgattcttttttttttttcttgctctgttgcccaggctggagtgcagtggtgcgatctcggctcactgcaacctccgcctcccgggttcaagcaattctcctgcctcaggctcctgagtagctgggactacaggtgcacaccgccatgtccggataattttttttattttagtagagacggggtttcaccgtgttgcccaggctggcctcgaactcctgagctcaggcaatccgcccgcctcagactcccaaagtgctaggattacaggcgtgagccactgcacccgactgattcttacatgtttaagttaaaagccctttattttaaggattttgtttttcttttcaatctgctgcaattagtacagtataggatacatacttgttatttgcttaataataaattttgaccaatatttcatgtttttatcctcaaaattctattccatacacatcttcagattcttactgctattcaccatattttgttattccattgtaaattgtcattcctaaaattgtctaagaartactcagaggaatgagtgatgggagtttcagttggtgctttctggagagaagacttgtctaatagaatgaatagttataatcaggagagttctaggagagttgctgatgttacttcaaaataagaataaagggccggatgcggtggcgtgactcatgcctgtaatcccagcactttgggaggccgaggcaggaggatcacctgaggaggtcaggaattagagatcagcctggccaaatcccatctctactaaaaatacaaaaaattagccgagcgtggtggcacttgcctgtagtcccagacactcagaaggctaaggcaggagaactgcttgaaccgggaggtggaggttgcaggagcccakatctcgtcattgcactccagcctgggctgcagagcaagactacgtctcaaacaaaacaaaacaaacatgccgggcacggtggcacatgcctgtaatcccagcactttgggaggccaaggcggctgaatcacctgaggtccggagttcgagaccagcctgaccaacatggtgaaaacctgtctctactaaatacaaaaaattatccaggtgtggtggcgcatgcctgtaatcttagctatgtgggatgctgaggcaggataattgcttgaacccaggaggcggaggttacagtgagccgagatcgtgccactgcactccagcctgggtgacagagtgagactctatctcaaaacaaaacaaacaaacaaaagaataaagattttataattatttttaaaatttcaatccaagaaatgaaatattttggcccaagtttttctaggaaggcacatttcccctacatagttcatctagaaagttccatcatgtttcttacagctctccaaggaaagccaaatagtagtgtgggacaaatcttcaccttagttagatgcatccagaatctgacatgttctcttatcatcctcataccttgaattttctatttttcttttttttaaaaaatttaattttatttatttactttttgagacagagtcttgctctgtcacccaggctggagtgcagtggcatgctctcagctcactgcaacctcagcctcccgagtagctgggattacaggcatgtgccaccacgcccagctattttttttgtatttttagtagagacagagtttcaccatattggccaggctggtctcaaactcctgaccttgtgatctgcccactttggcctcccaaagtgctgggattacagatgtgagccaccacgcctggcctacttttctttctttaccataccttggtttttgcctgctatacaccctcagttgtgtttcaaacccaacatattgatacaatgattccattaagctgtatgtgcatatatatgtgtgtgtgtgtatatatatatgtgtatatatatatatattttgagacagtcttgttatatataaagttttggtgctgtataagaaatagcactcgaatataaaattttcttttcaattctcagcaaggcaagttatttatatatagaagggtgagcccttacagatggaacgatggtgagcgcacacctggataaggaaggggaaggggttcttattcctgacgcatgtggcccctgctactgtgtcgttcccctatttgctagggttagaccacacaggctaaactaattccgtttggctaatttaaagagaatgacagggtgagtgctttggcgggagtcagggcaaagcaggtagcagataattggaatgagttagggtggagcaggtgattggaaggtagggtggagcaggtgatcagaatgagtcagggtggtgtaggtaatccaaaaaggttgctttacgaggaagtttaaaagtagaaggcaaagaattgaacatactgacatattaattctttggaaagaaatttagaactcgtatctaacagtctgtcacccaggctggagggcagtggtgtgatctcggctcactgtaacctccacctcctgggttcaagcgattcttgtgcctgtctctcgagtagctggtattacaggcacctgccaccagccgagctaatttttgtatttttagtagagatggggtttcgccatattgcccagactgatctcaaactcttttattggttggttgattgatctgattgattgagactgagtcttgctctgttgcccaggctggagggcaatggcacgatcttggctcactgtgaccttcacctctggggttcaaatgattctcctgcctcagcctccctagtagctgggattacaggtgcccaccatcatgcctggctaatttttgtattttttagtagagacagagtttccctatgttggccaggctgatcttgaactcctggcctcaagtgatctccctgccttggcctccaaattgctgggattacaggcatgagccaccttgctggccttagacttgaattatttattacatacacgaggcatggagattattgaatataagctttttgatccatcattattaccaccttgagacctgtagtatctaagacaacaaaagctaacgtggaaggcacagaacactggacgtgtggcccagacacatctcagatgaagatggtggagagaaagcgggacaaggcccaggtggaatctgggcttgtgagtgacatgagtggagcttaatatgttttcttctcatgccccacctctcacaccaccacattcccagcatttctttggattctttgcagttcccaaatttacttatctagagcaggggcctggaagaattatttccattcttgggaatgtgggcacaagactcacattcttggcttttacatcatagtgcattttctatcctaagtatcctcagggcctagatttttgaagctcaaaagggaacaaataatgtaccttttttctctacatccttggtgttatccccacctttaggccatggataccaaatactctagatctggggcctgsagactttttctgtaaagtgccagagagtaattctgttttttttttaagacaggatctcactcttttgtccaggctggagtgtagtggcatgatcgcggctcactgcagccttgatcctctgggctcaagtgatccttccacctcggtctcccaagtttgtcaattctaaagagcctgggcaacatagtgagaccccatatctaaaaaaaaaaaagaaattagctgggaatagtggcacatgcctttagtcttatttatttgggaagctgaggcaagaggattgcttgtgccaggagtttgaggctgcagtgagctatgatcaagccactgtactgcagcctgggtgacagagcaagaccctgtctcaaaaaccaaaaaaaagatatatgccccaaatagtatggccacattatatataagagaaaaaatgataaaactataaggaggaacatgtaaattgatgattatagttcaatattttttttttgtttgtttgagatggagtcttgctctgtccgccaggctggaatgcagtggcgcgatctcagctcactgcaacctccgcctcctgggttaaagcgattctcctgcctcagcttcccgagtagctgggactacaggtttgtgccaccgcatccagctaatttttgtatttttagtacagacagggtttcaccatgttggccaggatggtctagatctcttgacctcgtgattcacccaccttggcctcccaaagtgctgggattacaggtgtgagccactatactcagcctatagttgaagattttaatgcgtctttctcagtgattgataagaaacaaaaatagtaactgtgaggtgatggtacattaattaacttgatgatggtaattatttcacaatgtatatgagaacgtcgtatcatatatcataaatgtaaataatttttgtcaattatacttcaacaaagccagaaaaaatttaaaactaaataaaatttttgaaggttttctttctataggtcaagattattaattatactatacaagtctttcatatttttaatgtttttttatgttgtcttatcaattatcttatcaattactgagaaagacgcgttaaaatctttattattcaaatttgaccaacttttccacttaatgtccttttctgtcccaggatccaatccagcatgtggtactgcatttaatgattatacctccttcgatttctccaacatgtaacagtttctcagtctttccttgtttttttgaccttgacagttgtcagagacttgtcagatattttgtagatgtccttcaaactgggtttgtctgatgttttcttaggaactgagttgatggcttttgggaagactattacagaggtgaagtacccttctcttttcatcatgtcagggactatctgatgtcaccatgacatcactgatgacgttaactttgatctcttcgttaggatggtatctgccaggtttctccactataaatttactacccttccttttccatgtgatattcttggaactcaagttcagcctcctctctgctgaaggggaatgaagcttcacctcctgaggaggtgtggagtatctctattatttgtaactgttctgaaagcaacatttgttccttctttcccagttgtttgtttattcaggtatttgtttatgtcagtattgacttatgtatatttgttttattcttcaagttgtagtccaatattattgttttttgttttgttgctaaaatttctcagctttggcaaagggttgctctttcaggttgacttttgtgtctttctgacatgcctctatcctttcaagattttcttttcttctctctcctccttttctccttcctcctccttgcatcagccctacaactcagtgcttgttttgataaattatctcatggaatcctcaagatagccttgcaaggtagatagatattattatctccatttttagattttgaaactgaagtcacacagtgcttggcatagtcagaccatgaactcagcggtttgaaccacactattatcaactgctaagctatgtactctctcctttttctgacaagttcgcattcaaagagagaggttagttgaggaggttcttactgatagagtttaaaattttcttataaccgttgccctgccttccagactcttctgtcactgagaattcaacaatgagcaaaacaaaaaaattactgtcctcaaggagtccttattgtagttggataatgatagcaatgactgaatatttattaaatgttagtcactgttcatcactttatatgtattacctgacataatatttataatatattacataatatttacagcagccccatggggtagcttcaattatcattttaaagtgagagaactgaggcacaaagaggttatgtcacttgtccaggattactctgccactaaactaagggttgtgattcgcacctctttgtgtgtcagaacttagggactgggagcagagagttgtagttgtggtgatgttctttatgagtggtattgtgggtctaaattgagattcagtgaaagtagaaattatgggctgggcatggtggctcatgcctgtaatccgagcactttgggaggcttgggggtgggggtcatgaggtcaggagttcgagaccagcctggacaatatggtgaaaccccatctctactaaaaatacaaaaattatctgggtgtggtggcatgtgcctgtagtcccagctactcaggaggctgagccaggagaatcacttgaacccgggaggcggaggttgcagtgagccgagaccacgccactgcactccagcctgggcaacagagtgagactctgtctcaaaaaaaaaaaaagaaagaaagtgtggataaagaggaaagagtatgtgtatatgtatagaggagagaatgcgtatgtctacatgagatcagtcacataggcattccctctatggagaatgagagaaataactgagaaagactcccagagtttatagcatggcagatacgttagggtctatcaaaattaaagatgtctccctttttctgggccacgttatactttgaacactttttttttgtttgtttgagacaaagtctcattctgttgctcaggatggagtgcagtggagcgattatgactcactgcagccttgagctcctgggctcaaacgatcttcctacctcggcctcccaagtagctgggactacaggcgcgtgccaccatgctcagataatttttgtattttattttatttttttgtagagacaggattttgccttgttgcctaggctggtcttgaactcctaggctcaagtggcccacccgccttggcctcccaaagtactgggattaataggtgtgaaccacccactctcctcttgaacattttaatcacagtaatgcagaactttgaggatactagcaaacaatggctagtgagtttcatatatcatttacttcttatcaaatacaattaatgttaagagcttaatattaagagattaggccgggcatggtggctcatgcctgtaatcccagcactttgggaggctgaggcgggtggatcacgaggtcaggagatcgaaaccatcctggctaacacggtgaaaccccgtcgctactaaaaatacaaaaaattagctgggcgaggtggcgggcgcctgtagtcccagctacttgggaggctgaggcaggagaatggtgtgaacccgggaggcggagcttgcagtgagccgagatcgcgccactgcactccagcctgggcgacacagcaagactccgtctcaaaaaaaaaaaaaattaagagattaagccattaagctaattaatattaagagattaaggtttggaacttctatggcatgaatggtttgggatttcgaaattgtttctctattggtaagtagaggtagatgaatatatcctgcagcccagaccttttagtaaatatttgagctattattaccttatatagaacagaaattattgatatgaaatgcaatttacttacagctctcatccacagagaaaggcttttttttttttttttaacttgttttgggaaataaaaggtgctttaaaaagaattttcttcattttgtcttggggcagattcacaaatagcttacaagaaagcaagatggggctgggcgtggtagctcacgcctgtaatcccagcactttgggaggctgaggcaggcggatcacctgaggtcaggagttcaagaccagcctggccaacatggtgaaaccccgtctctacaaaaatacaaaaattagctggcataatggcaggtgcctgtaatcctagctacttgggaggctgaggtgggagaatcccttgagcccgggaggaggaggttgtagtgagccaagatcgtgccactacattccggcctgggcgaagagcaagactccgtctcaaaaaaaaaaaaaaaaaaaaaaagaaagcatgataggacaaggctgcttaagcttgcttaagaagagtgttggccggacgcagtagctcacacatgtaatctcagcactttcggaagccaaggtgggtggatcacctgaggtcaggagttccagatcagcctggccaacatggtcaaaccccacctcttataaaaatacaaaaattagccaggtgtgatggtgcatgcctgtaatcccagctactcactttgggggctgagacaggagaatcgcttgaacctgggagggggaggttgcagtgagctgagagtgcgccattgcactccagcctaggtgacagtgagaaattccatctcgaaaaaaaaaaaaagaaaagtgttgtaatttattaataccctctccatataagaaagaataaaaatcattacaggcagtcaggatgttcagggcaagtgtaagtattttctttgtggtgttctttttactctgttcatttggatgctggcatttcccccccctcagtcttatattgaatggcaaattgtttatggagtctgtatctgaatttagcaagagtttgctgcactgaggtttctagtctgttgtcttaactgcctgatactgtgattaagctagggccacagataccatttgatgtttacccttctccgttgcccaccaacctgtcttgaattgattccagaattattmttcttcttcttttttttaagacagggtctcactctgtcacccaggctggagtgtcatggcgccatctaagactggctgcgacctctgcctccgggactcaagtgatcctcccacctcagcttcccaagtggctcggactacaggctcgtgccactacaccaggctaatttttgtatttttttgtagagaaggggttttcccatgttgcccaggatggtcttgatctccaaacctcaagcaatctgccggctctggtctcccaaagtgctgggattacaggaatgagccaccgcgcctggccaacttcctgaattatcgttgtctccacacctgcttacagtgctgttcctcaggtatcaaagcatcccagcatgttgtgcctttctccccatcctcctctactttctcctctgttgtgtactggtaactcggaatctctgaatggctgtagaaacagaaaagtggatgggactgatggaaaacccaaatttgggtttcagaaagctatctgttgtttgacatgcagtctagaattaatgactataccaggttacccttggaacatcttgcatttgtgggcagaaacatttggctacttgccacggggttatcctgaaaaaagatgggcttgaaaaactgtcactagtgtcacttgaattggtcatccatggttggggagttccattccaagaggataatttacacaatttaaaataaagggggccaggtgtggtggctcacacctgtaatcctagcgctttgggaggccaaagcaggtggaatccttgaggtcaggagtttgagatcatcctggctaacatggtgaaaccctgtctctactaaaaatacaaaaattatctgggcatggtggtgtgcacctgtaatcccagtttttgggaggctgaggcaggagaatcatttgaacctgggaggcagaggctgccgtgagctgacactgtgccacagtgctccagcctgggtgacagagctagactttgtctcaaaacaaaacaaaaaaagtaagtagaataaagggagtgaaagcaagaggtgctcttcaaaattattatttgctcattggagaaatacacgcatgtactactttgtagtagtaacattttcattaaacaatagaagcctggctcccacttctccaaatgaagtggggggaaaagtgttgtaactggatgtcatgatcagtcatctcaattataaaagttaggtgacattgtctctttgggacgttgttgagcggtgaagccagctgggcttctgggtcgggtgaggacttggagaacttttcggtttagctaaaggattgtaaatgcaccaatcagcgctctgtgtctagctaaaggtttgtaaacacaccaatcagcactcagtaaaaacgcaccaatcagtgctctgtgtctagctaattgggtggggacctgaataacttttctgtctagctagaggattgtaaacacaccaatcagcgctctgtgtctagctaaaggtttgtaaatgcaccaatcagcactctgtaaaaacgcaccaatcagcattctgtgtctagccaaaggtttgtaaacgcaccaatcagcactctgtaaaaatggaccagtcagcactgtctaaaatggaccaatcagcactctgtaaaatggaccaatcagcagcatgtgggtggggccaaataagggaataaaagctggccacccgagccagtggcggaaatccgttggggtccccttccaagttgtgccagctacattctttcgctccttgcaataagtcttgctactactcactctttgggtccgcactacctttatgagctgtaacactcaccacgaaggtctgcagcttcactcctgaagccagcgagaccatgaacccacctggaggaacgaacaactctggacgcgccacctttatgagctataacactcatggccaaggtctgcagcttccctcctgaagtcagcgagaccaggatcccaccagaaggaagaaactccagacatgtccgaatatcagaaggaacaaactccagacacaccatctttaagaactgtaacactcaccgcgagggtccgcagcttaattcttgaagtcagtgagaccaagaacccaccaattccggacacatttaaatacaaattagtaagtagaataaagggagtgaaagcaagaggtgctcttcaaaattattatttgctctttggagaagaaatrcacacatgtactactttgtagtaataacatttttattaaacaatagaagcctggctcccacttttccaaatgaaggggggagaaagtgttgtaattggatgtcatgatcagtcatctcaattgtaaaagttaggtgacactgtctctttgggacgttgtgaccaggccatgtgaatggagattgttgaaggataggcctctctccaccaggtatgccaatcacgggggtaggggtggtgactcttctgtttggatgtttaaaatgtacattaaacagacaaaataaaatacgaattaaaaaaaactaaaaaacttcttatcaccaaagggcagaaaaaaacctgtgtaaataataccttaaattaaaattaagaaattaaaaggcaacttgttaataaaaaatcttttgatccaacttttttccttagaattctaaatcttatgttcactcccttataacaagtgtcaattaattagaagctggtaaaaataaggaagtttaccctaattgctggctggtkttttttagtataggagtatgtgaagaaataaagcttttttcccaactcgtttgaaggcagtttgtactgttttgatttgagaataggagacacatgatttatcatttaagaatgtgcttcttaatcctttgcaccaatgatgctttttgtggaaattctctactaaacatggtatgtgatgttatcttccctttaaagtgtttttccccactttggccagttttgatgtttatcatctctctctataagtgttttgatgagatgttgagaggcgtactggtatggctgtctgctgccatgctgacccagaagtaggaactacttttgctgcattccctgatattccatctggctgtaatgatattcccagagtgttccagatatttatatgcatctgatacaaagttattatgaattaaaaacataaacctggctttgcaacttgactatatcaggaggaaagttgttattggttcatgactttttgataagtctgttaccaagtatttttaagccattaggccttcaagccaagtgatagtccctgagtaacaatggaggaagcaccacttaatctaagttgcatgtggaggtgacaaaatctgagagcttttaatgattcatccaccccatttaacttagggctacaaggaaaagtactctttatgcagtagtttctcatgtaaaagtgggaaattttctcttcttggcacaattccacaaatacatagatatatcccttttcaagaaaataatgccagcctcaccttaagtttcttattttaggattgcaaattctaaattatttatttttggagtagccacagaaaaattctgaacctgggctgactcacccaacacaaaatgttttgacataatcttccttgtttggattgttgaaagagaatgtaaatttatcttactattagcttagctcaaacaatgaggaagttaagttaattggtatgaagccacattttctgtattgaagatgcattcacaggacaatttttgttttagctttttagagtcagtgtctttatcatcagtggagatacaaaatatatgaatatggttagatcccgtctaatttgtcatgcacttagcaaaaacaacccgaaaaacaaaaggcagttttcatttatattcatttggaaaatacacttttaaattattattatcagaaatctaattatagcctgtaatcccagcactttgggaggccgaggcaggcagatcacctgaggttaggagttcaagaccagcctggccaacatagtgaaacccagtctctactaaaaatacaaaaattagccgggcatggtggtgcattcctgtaatcgcagctacttgggagggtgaggcacaagactcgcttgaacctgggaggaggaggcttcagtgagccaaggtcatgccactgcactccagcttgggtgacagagcgagaccctgtctcaaaaaaaaaaaaaaatctaattataaaataaatcatttgtttacattatctattttttaatttagaaagctgttattggtcttttttttttttttttggcagagtttcactctgtcgcccaggctggagtacagtggcatgaacttggctcactgcaagctccgcctcccgggttcaagtgatacttgtgcctcaacctcccgagtagctgggattacaggcgtgtgccaccacgcctggctaatttttgtatttttagtagagatggggtttcactatgttggccaggctggtcttgaactcctgacctcaggtaatctgccctcctcagcctcccaaagtgctgggattataggcctgaaccactgcatttgaccccataatcatttttaattaataaatgttaattgaatgttcatagtttcagaaggaacagttctataaaatttataatctgatggcaaaagaaaggggcttcactgggacctctgtaagatttttgtttcctgaacttggtggatgagtggattaatatatgattcacgcctgagatatttagagactaagagaatgtctggagggctgtggtttgggatgccactgcagttctgcaaatatttcctgtggattggggtaagagagagaagaacattgtgtgctggttttagagcctgcgcaagcaggcagaaggaagctggtggtgtgctgatggtgactggggctgaggagggacttagaagtgaccaggtggaaaacagatagattcatcagtgtaaaaaagtctggtggtgagatatccccagtgatggagtggaagagatcttggaagaacctattacaatgccccgtgttacaataagtaggctttaaatccccgtcaatcacagggagcagcaatgctgggtcaccagagtaatacaattaaataagaccttcactactgcccatacctcttctctgtgttctccagtccctcaaccttatatccagccatggaggcattagaagctaggttttgcaaaatgaggtgctacatggatttgcttctgtcactattgaacactgatggtttttcttaagtgcttctgatttttttggaagtactgtctgcacatggtagctactcagatatttctcaaatcaaaattagtggaatagactgggcgcggtgtaatcccagcactttgagaggctgagatgggcagataacctgaggtcaggagttcaagaccagcctggctaacatggcgaaactctatctttactaaaaatacaaaaattagctgggtgtggtgtgtgtgcctgtagtccctgctactcgagaggctgaggcaggagaattgcttgaactcaggaggtggaggctcctccatgcccagctaatttttgtatttttagtagagatggggtttcactgtgttgaccaggatggtctcgatctcttgaccttgtgatccacctgcctaagcctccctaagtgctgtgattacaggcataagctaccatgcctggccagcactttcttaatttttggcacaagcacacatcttattttattttatttttcatttctttccttccttccttccttccttccttccttccttccttccttccttccttccttccatccatccacccatccttccatttctttctttctttttgaggtagtctttctccgttgcacaggctggagtgcagtggcatgatctcggctcaccgcaacctccgcctcctgtgttcaagcgattctcctggcttagcctcccaagtagctggggctacaggtgcccaccaccatgcctggctaatttttgtatttttaatagagatggggtttcaccatattggtcagatgggtctcgaattcctgacctcaagtgatccacccgccttggcctcccaaagtgctgggattacaggtgtaagccactgcacccagcctgtttttatttcttgccccagttgtggaatcaactgtttatccaagaagccctgattccattgagtgacgaagggtatttaaaaccaagatctgagaactagatgtgcttataactgcaaactttttaaaccacccattagatagttattctataaatgatcattttcaccagggccaccacatgttttacatgccattacatgctctttctcctgatttcatattcttttctgctctgggatttggagccactgtgtatgtttgcctatttaggaagcattgcttgccctgaagtctgcacttttgaaaagactttaattgctctcactttgggcagttcaaaggttactggattttatttactatcttatttacttgagttacttttattctgttctttcatttatctctattaaataaagatgtagactgtacttaattgtgttttcctcttggcgatgaaacaaggctaaaaggtgattcttgttaatttgttactcatttgggttatccatttatctggatttgatttgagatgttgtttagtcttggtttgtaaagagatctgtactgaacatttctgtgttctttgcctaaaatgtcctttcacaggctgacgtagtgctgctatttggagtgtgggaatccagctatagggaattggttttatgtgagagtctggctgagtttttattttcttttctactcaaagattatgttttatattcctgtcatttgaaatttgattttgctcctgacaatgaaaaatatttaacaatggtaattctcttcattctttaatgattctatgatccatctgccagaatgtgagctgcattcattttgtaaaaaatgtttgatctttgggacatagatctaattgctgacatagtttctttagattccatgaaaatatatttaaattcttaatatgaagacaaattttgcgatttattttcatttagtctgtgtggtttataatagttttttttccctccttatttgaataagtcttctaggatttaggataatctgtgcgtktgtgtgtgtgtgtgtgtgtgtgtgtgcatgcatgtgtataagtgtgtgtatgtgattgtgagtttagttaaggtcacttttagcaagatgcattgacatggtcatcagagcctttgaaattgtagactccatttgaataatagttttgaagactttttttccttaaaaaacagtgtatgttgtaggcaagatagtatcttgattcctagctcctgtcaatcttctgaaaacatttattttgatagtttatttgaaaaacatcataggcatgcatggaatactgtaaatggcaaaaatatgcaccagtcaggtgaaaagtgtttattaaattcccgctatactactgtttcctgtgtcccagtgttccagctattcagatcagaccggacctcttttcatctgtatggatgttgatgttccaagtagggaggaattgtgactctgccttttgtgttggcctgaatttggggagtgctcctcctgtggggccgcaatcattctgaattgttccaggaaagctgtctataggggcatccacactgcattcccatgggagaagccccagctgtgtctgcagtggggtaccatgagggaacaagacctttcggtatcacagaggctgcctgcctgttggggtagaaggtgctgtctagttgaggaaaatgaaacgtatgcatatgaaacaattgccagacaaaacatacctttatatattagcgttcccaagttggatatagtaaaacaaagtgggaattctgtaataaagacagataccagtgtaaacatttttctttttttgttcagtatgcttttgctgcatcacaggatactgcttaacttaccaatttatttacctttggtgactagggacatatgcttcttagtrttacatttcagaagttttagatgctgtgtaattaatcagccagttttgctgcctttctgtggtagagattgaggggtccaacttcaaaggttattgatgtagtaaaccatattaatcagatttttggtctttgaataatatatgatttttttttttttttttgaggtggggagtcttactctgtcgcccaggctgtagtacagtggcatgatcttggctcactgcaacctctgcctgccgggtataagcgattctcctgcctcaccctccaagtagctgggattacaggtgcatgccaccacgctcagctagtttttgtatttttagtagacacggggtttcaccatgttggccaggctggtcttgaactcctgacctcaattaatccgcctgcctcagcctcccaaattgctgggattacaggtgtgagccactgtgcctggctaagatcgatgaattgttgatactcatggaagtattttgtaaaatattactcatagtaatgagtgtttacagtttagtaattatagaatcatagaaagtagctgtgtatctttgggtaaggcacttagtctttcagaacctcaattttctcaataataattaaactaggacaataamatttactttgtatagttcttgtgagacttaaatgagatgacacatatgaagcaccaacacagtccctagaacacagaagtactctgtacatgttgactattattattataaccctaaattactgctattagttgaccttatggagtctttgggttatatgttaatttagattggctagcaggtatattgggaggtctcttgctgtattgaaatttacataaatcttattggaatcctgctgaggttggttttggaatcttgcatgtaggaaagtaactatctgtaggttggagatgctgtatctgtaccataagggcaaaagagaaaaggaaataaagcaaaatgaggtagaactgtgtgaatctacattattatacacatggcagaaggacaaactactaaattgacagtatggttgtggcaaaacttctttccaagtaatgggaaggtttttcaccaggtcaatagaaaaaatgaagtgaaatgctgtaagactgtaaaactttggaccatttgctgaccacgtctcatttagttctcacaagggtactgtctgcaaaacaaaaaaacacaaagaccaaaaacgctagagaactggctcttggttttgtttctgaattaactctataaaagtaaaaagtggctaagaagaatcttcagaatagaaaactaactcttttttttttttttcaggtgtagggtatccaaagtggaaaactgaaatgagcattagttctagttttgttattgcttggcttcatgactttggccaagtcacttaacctatctggtcttcagtttttttcatctgtaaagtaagaatttttgccccagacccatttagctctaaaattccttggtgtacttttagacatacaaaatgaaatttgcatatcacttaaaaatttattggcccagcgtggtggctcacgcttgcagtgagctgaggtcctgccattgcactccagcctgggcaacaaaagcaaaacttttgtctcaaacaaacaaacaaaaaatttattaaataaaaagttaattattaataattaaataaaaactaaataatttttttaacatcttattgtggaaaaatttaaagtcacctaaagtagagagaatagtttaatagatctttttttttttttttttttttgagacagagtcttgctctgtctcccaggctggagtgcagtggcgctgtatcggctcactgcaaccatcacctcctgggttcaagtgattctcctgcctcagcctcccaagtagctgagactacaggcacccgccaccacgcctggctaatttttttgtattttcagtagggatgggatttcaccatgttggccaggctggtctggaactcctgacctcaagtgatccacccccgcttggcctcccaaagtgcggggattacagatgtgagccaccacacctggccagtataatagaccttgagatcttaagatcccagcccaataatgataattcatggccaatcttactttgrtgatgggatcacaactcactgcagcctccttgaccccttgggttcaagaaatcccctcacttcagcctccccagtagctaggactacatgtgtgtgccaccacatctggctaatttttaaatttttttgtagagatggggtcctgggctcaagagatcctcttgccttggcttcccaatgtcaactttattttataaaaaaatttttaattgatatataatagttgtatacgtctcaattattttaaagcaaacctcagatttcatcatttcatttctaaatatttcgggatatatctagtaggaaaggactctttttttaacacatgaacatccaggccaggtgctgtggctcacgtctgtaatctcagcactttcggaggccaatgccattatcacacataagtaaaaataatcataattcctttattttatttatttgttatttatttatttatatatttatttatttatttatttttgagatggagtttcgcttttgttgcccaggctggagtgcaatggcaccatctcggctcactgcaatctccgcctcctgggttcaagcgattctcctgcctcagcctcccaaatagctgggattacaggcatgcgctaccatgcctggctaattttgtatttttagtagagatggggtttcaccatgttggtcagtctgttttggaagtcctgacctcaagtgatccatcccgcctccacctcccaaggtgctgggattacaggtgtgagccactgcacctggtctttctttctttccttttttgtcattattccttaatatcattaaatatacagttgtttttcagatttttcccaattctctctctcttttgtttagttggtaatttgaattgggatccgaataaagtaatcatagtagttgagttatatatttcttaagactttaaatttatagttccttctcagtcttttttcttgaaatttgtttaaaaaaccagttaatttattctgttgtgttttttgattttgctgaattcctgtgatgttaatttttttttgttctttataaactgatctataacttgttcaggtttgtgtgtgtgtgtgtgtgtttttgttgttttgtttttttggccaaaaatacttcatagaaggtggtgtgcagttccactaagaggcatataatggctgggcattactttctctgtgatgttggcaggcattgatgatgatttcccagatctgtgaatttattaggaattacaaaatgtgctattctagttctatcattccttcttcatatattagttgggaaacttttgtaaggggactctttctctgatcagttatttgattaccctgaggtataggcaggagagatgcacattccctttatttaccaattgccataataatgaattttcccctaggctttaccagtgatggctattttttttttgtaatatcattatgaacccacaatattgagcatatttgatgtgcttcaatttattgcaattattatccttcttgatgctcacattctcaggccagtaaaggcctttcygggttggcttctgcgtctttttgacatgaccaataatttttgatagcttccttgatttctggtaaaacaagatattccaggaacattttgtacctttcctgccccatcctggaatcagccatttcttcaaggactgttagttcctcttagtgggaagtggtatttacatactactgtctgatagtaggaatctcagtgatactgggttagtctttgattctaggcctttttagtggatggataagaaaataaatattaaaaaagaatatgcgctgggtgcggtggctcacgcctgtaatcccagcagtttgggaggccaaggcgggtggatcacctgaggtcaggaattcaagaccagcctggccaacatggtgaaaccctgtctctactaaaaatacaaacattaaccgggcatggtggcatgcgcctatagtcccagctactcgggagactgaggcaggagaatggcttcaacccagcaggtggaggttgcagtgagccgagattgcttcactgaactccagtctgggcaatagagtgagacccygtctcaaaaaaaaaaaagtcctggtgcggtggcttacacctgtaatctcagcactttgggaggctgaggcaagtggatcacgaggtcaggagatatcaagaccatcctggccaacatggtgaaacctcatctctactaaaaatacaaaaattagctgggcttggtggttgcgtgcctgtagtcccagctactcgggaggctgaggcaggagaatcacttgaacctgggagttggaagctgcagtgagccgagatcgtgcaactgcactccagcctggtcacagatcaagactctgtctcaaaaaaaaaaaaaaaaaaagcatcaggagtttatacctcctatcattttaattcagaaacatcctacactagaaaatgagtagagaaataaacagaatccaggtatgtatgtacattttgaagaattacattrcttactatgaaacattttattgcattttattctcctttsaggtaaacagtctattgttggagtttctgtagttgcttagaatattaatcttaaccttctagctaataacaatggtattacttttaaatatacactgtttttgaactcattaccaggataggtcttagtcctctttgaaacctgcttctttcttgtctctagtaacctatcattgaccaggtctgtatcttaaagagtgctaggtttgagctgtccttgaactgacaaacaatggagatgaggatcacaagtgaaatggcatgtatagaggcccagaggaattaaagagtttgcatgtctgaagaacggctattctaagtatgcatgtcacgtggtggccagagataagatataggtagtgagtgggggctaggtcacaaacaattcagtatgtcatgctaaggaactgttatttttatcctacaggcaatttcgtaagaatttcaataaggaaatgtcttgattagaattacaaattcgaaaggcttttgtagccacatgaagaataaactgagacaggggaagtggtaagcaggctatcgcaggacatgagaggctggatggatttgggaattacttggcaggtcaaataattaggaattagtgatctattggatataggcaggaagtaaaagaatagagtccaggatggcccttaggtttccttcagtttgaattagtgaatgtagaaggagcagtctgggttggtggcatatgaatgtgacttaagtgggataacttcttcttaggggttgtcagcttgcattcccttggactttctggtggagatgtccatacatgcataaatatatataaacatctttttatttaaggacccagacttgggttcaaatctaagctctgttacttcctatttgtgtgaccttgagtaggttagttaacctttccatgtctcagttatagttgtaaaaaggggataattcatagagttgttatatgaattaaacaaataattgacaaaagtctaacagagtgtctaatacacaataacttgataaatgttgtcattgttattytagatacgggaatttccagtatcttgtttagaagggatgagattcattagagagatgagaatgagaagagagaggaccaaatatggactgttggggaatgccaacagttgaacctcagaaactcagttgccaggagtcctctaccctcaataggttatttcagacatcactggagggagcagaggtttatctctgtcctatagccggttgtaacaagtgttgtttttattcccagacttatatattcacattcactcatttattaaacatgcttttgctaagttactggtagacgtaattctaggtgctaaagwtattgcagasaacagtcaccttggtcacaggcctcagggtactaacattctagaggagagagatatccatcaaaaatataaaagtatccactagtgataagtactttagagagaatgaaaatatcataaaatgctagagaattcctaggagtctatgttagattgggtggtagagaaagcttctctgaggaggatgtagtagcaagccatgtgaagattggagagaaatacatcctaggttgtgcaaaggccccaccttgggaataagctgtggagaacactaaaaacartatcagggcccaagatagggcattgggaaaacagacgagctgaggccaaagagtaggtagtaaccaagccatgtggggccctctaagccaggataaagagtggaggtttattttaagtgacttggaaagcccttaaaaagctttaggcaggaaagtagtgtactgatttaccttttcaaaaggtcactgtatggttgagcgtggtggcttatgcctgtaatcctattactttgggaagctgaggtgggaggattgcttgagcccaggagttgaagactagtctggacaacaaagcaacaccacatctctacaaacaattttaaaaattagctggatgtggtggtgcatgcctgtggtcacagttacttgggaggctgaggcaggtggattgcttcaacccaggagtttgaggcttcagtgagctaagatcacaccactaccctccagcctgggtaatagaacaagatcctgtctcaatcaatcaatcagtcaatcactgtgatcacaagagtcaaaaatgaggtagggagagcagaaacaggtggctaatggaatagtctagatgagagatactttattttgttctcttttttccttttattatcaagtgaaagcctcatcctgagtctcttggttgcttggaagcctcaaagctgtccttgaacagatccctgtcgggagagttgttttgataattgaggttctccaggcctagagcagtgatgacytactgaaggtcgttaacctgactcttaacccagggcaacaggggttaatgagtggggttctaagagtatgagcatgtattcaattactttcttctgaggagagttcatagcttcttaccagtttgtcaragggacctgtgacctccaaaagtataaccattaacaagacagtgtgttgagcactgatgggagagagggaaaacacaaagtcagacataattaagaagaaaaatggggtaggcaggccagatcatatggcactcagggaaaatattaagagataataaatcttttccccttagcttcctccctgtacgtttttaccaacgtctagaaattcacgttttgctttcagtgtccataaatgccacaagatggcgaggttgctccttaaaatgaatgtgaattaccaagtggaagagagggagaaagagaaagaaaatgtgtgttgggtattcctctctgattttccataacttccctgatttttcttagctctttacttgaatataaagtagaatcgatatgcatacatttttcctctttaatttagattttaatcatagttgtttttggaattgtaaagctaaaaataaaatttaaaggaactatctggatcccaggcttaacattttttctacctcttcattaaattattaatgaataatttcattctgcacatcaccaacagagtaatcttagtaaaataccattttgatgttcattctctgctttaaaattttatttatttattctcataaaatttattcatagtactggtagtcagtatttaaatagttacaagtataaggtgaaaatgtggaataatttttgactcctattatggaatatatatgtttattattattattattattatttttgagatggagtcttgccctgtcgcccaggctggagtgcaatggcacgatctcagctcactgcaagctctgcctcccgggttcaagcaattctcctgcctcagcctcccaagtagctgggattacaggcatgcgccaccatgcctggctaattttttgtatctttagtagagacagggttacaccatgttggacaggcttgtcttgagctcctgacctagtgatccacccaccccggcctcccaaagtgctgggattacaggcgagagccacgtttattattattattgtcagcttcttcgctattatgaacaagtgcaagattccacgtacaaaatatcttaatttttatggtttattaaacaacataatttaaatgcttagatgtctattgtcatcatttgacatacctcagggtagttttctttttgttattctcaacattttgtagaaaaggtaagctaatatattatttatacattgattaatgcatctttagtaattatgtatatttagctcttgatataaaattcattttgcttgtgttatctaatcaaattaaatcctcataagaaatctatgagataaatgtgaatattgccattttacagatgaagacattgaggcttaggaagattgaatgaattgtcaaagatttaatagttggcagaactataatttgaatccagattttttttaatcctaaaactcccctttttccctatactttactgcttccaatgagagcaactattccttttctctttaatagaaatacttagaagttgtaatttaaagtaattaggatatttgtgtctctcccttgttctaagctgaacaaaaagagaatttttcctgcaggcctttatttagaagagtccttttagagttgcactgatggtgagggacctgggtttgtcccatttgagggatttgggctcctggccagaagcacctgattttccgaacctagagttaactgaaacttaatttcttttgttgacttcctgctgagataacaggtggttcacagtgcacaggccttcctgccgatggtggcagcttctttctgttcctggagacttgttttgtgctggggactaccagtggtttgaaaaccattgctttgaaggctggaatcccgggccagggtgccctctacagcagcacactacctgccctggaactcattctctaaaacttggcgttatttctgcacagagaatgttggcttatagtttatttctctttatttgcttcatatcccatttttgttcttctaaagactgagaaagtaatagttaagaatttatacattttgttattgatattgggagataaaactgtaatttacctgaatcaagacgtttgggtttttcagtatggttttatgtggccgggcgtggtagctcatgcccaatctcagcacttcgggagactgaggctggtggatcacttgagctcagaagttcaaaaccagcctgggcaacatagtgaaatcccatccctacccaaaatgcaaaaattagctgggtgtagtggtgtgtgcctgtagtcccagctactggggaggctgaggggggagaattgctggaacacagtcagtcgaggttgcggtgagccccgacggtgccactgcgctccggtctgggtgacagagtgagacccagtttcaaaaaaaagaaaaaagaaaaaaaaaagaaaaagataatggttttattttttcttcatgtaacagttctaattgaaagataggcatagtggaaataaaattgaccatgaataattattgaagttgaccgatgggtttattatatattctatctatttttatttgaaattttccaagataaaacataagcagagacatgttttaacacctttttttaatcatcaataattataatcttgaattattttaattccttcatattaagtgataattttatctgtggagtttgttttacatactcttatttgtgacaaagatcatttctggtggcgaatgcatctgggtagattaattggtgattatcactcacttttgtggttttatttatttactttttatagattgtttttgaaaaaaatttttgttatttttattttttgagacagactctcactctattgcccaggctggagtgcagtggcatgaacttggctcactgcaacctccacctcctgggttcaagcgattctcctgtcttagcctcccaagtagctggactacgggcatgcaccaccacgcctggctaatttttgtaatttcagtagagacggggtttcaccatgttggccaggctggtttcaaactcctgacctcaagtgatctgcctgcattgatctctcaaagtgctgggattataggcgtgagccaccgcatccagccaaaaaattatttttatataaaatatttttgcactcattcattccttcaataaatgttattgaacactgttctagaggctggggatacagcagtgaaccaaacagaaaaacattctggagtatacactttagtagggaggagacaaaataaatctaacaaataatggtattgtgtttctattgtgataagtgctgtggcaacatatataatgagggtgctcttttacaaaaggttgagggagagtcttccaggtggctggagaaacaaggcttgcaggcaaccctttcatggccttcctaaagcagcatatgcagggaatatcagcaagtagctgatgtgtatggaaagctcttcattgggtcactctgcttgatatgaaggatttggagacaaatttatgtagcttctgatacaacctttatttatttttatttttgttattattttttgaggcagagtctttctctgttgcccaggctgcagtgcggtggtgcaatctcggctcactgtaacctctgcctcccgggttcaagcagttctcctgcctcagcctccccagtagctgggattacaggcgcctaccaccacacccagctaatttttgtgtttttagtagagacggggtttcactgtgttggccaggctggtcttgaactcttgaccgcaggtgatcctcccgcctcccaaagtcctgggattataggcgtgagccaccacgcctggcctgatacaacttttatgatgtagcaataagcatcaggactgaggggagtagaagaaaatctttcctgtgttctgttgattctttctgatggcaaaaaaaaaaaaaaaaatttgacaccttctctaccttctctttgtaatcttaaaaatcacttagttgatgttattgtttatttatgtccaaatcttaaaatcatttaggttttctttgtttacttgagaaaatacataaatagaactcagggagatattgttctgcttaactttgtatattagcttaactttgtatattactgtgtacaaagcaagggtagcaaatacctgttggagtcagggaagtacttgaaacccggctgaggcatatggaagtagagtggtggaccctgtggcaaatcagaggatttatgccctatgtagaggggagaggcaatactcgactctaattgattattgcatgtgagaatgtgggcctggttttgaattatttcctttttttttgttttaaagggagtctccctgcattgtccaggctggagtgcagtggtgcaatctcagctcaatgcaacctccacctcctggttcaagtgattcttgtgcctcagccttcccagtggctgggattataggcatgcaccaccacacctggctaatttttgtatttttagtagagatggggtttcaccatgttggccaggcttgtcttgaactcgtgacctcaagtgatccgcccacctcagcctcccaaagtgctaggattacaggcgtgagccaccgcacccggcctgagtttttttttaagaatagccagggtaggccaggcgcggtggctcatgcctgtaatcctagcattttgggaggctgaggcaggtggatcacttcacatcaggagtttgagaccagcctggccaacatggcgaaaccttgtctttactgaaaatacaaaaattagctgggtgtgatggtgcacgcctgttatcctagctactcgggaggctgaggaaggagaatcacttgaacctgggaggtggaggttgcagtgagccgagatcgaaccactacactccaccctgctcgacgggaacgagactccatctcaaaaaaaaatgagtagccggggtcgagcactataatgaattcttactgccttcttcaaggaatggtatagatctaatagtctcgaaatgctgcaggatttctggatacaaatgtttctaacacactatattgtacagtggttttagcacaccctgtgtggtgctgaatatgtttatttttgttgytttagggtatggtcagacaggtccaatttctcagcgagctggttatgatgctgttgcctcggctgtttctggtctgatgcacatcacagggcctgaggtaggtatccttccttagaatattcataatttcttcccttacatattccaaaaggattttactctgcactaacccataggattaaatgagttgttaggttggggcaaaagtaattgctgtttttgccattgaaattaataattttagaaagaaaccagggaaagtgaatgcttatgaaagtaaaacaggaagtgttcattacaaatgtattgagtctaaacatcaatttggccacatggaaaagagcaatgtttttagcaagaagccatagatcagatggtgaacacactttccacatttattatgttattcaagcttaatataggcacctttgtgtgatttaggaatattccctctttgaaataaaacagttgactagactagaccacggatgtccatttctactagagtgccttcatctgccatgtgtacatagcagagggtctatttttccttttggaaaaatataggtagttatgtatttgaaaatttgttgcttaaagcctccctcaggtttaaatgtatctaatttgtcatgtgccttagattctgacagtgaaataattatttgattttataataattcctctccattgatagtggtttgggaagttcctaacaagtatttagatggccaaaatgtggttggttagattaaaaaaaaggctctcggggaaagcaatatgaatgacgttaaacaaagtgaaaaaaaktgtgaaagcctagtaaataaaaatgctaaaacacacccatttcaaaacaaactagattgatggccttaaaaaacttgtttcagtgggtgttcattctccaaatcacttcttctagttaattcttcaggaaatattgcttgctgtagtgttggaataaactgagacagagtgacctcaagtcttttgcagtcttccttttatttaattttacttattaattaattaattattttcctttgcctctattttctcatgatgagatttactttttattaatttcaaagcaactgttggggttttaatttctggaaatacaaagttattgtactttcatcttcgtttcattttcacaagtcttagaaaaaaatgtgtgtggcctttgcttttttttttttttttaagtcagagtcttgctctgtcgcccaggctagagtgcagtggcgtgatctcagctcactgcagcctctgcctcctaagttcaaaggattctcctgcctcagcctcccgagtagctgagattacaggtgccagctaccatgaccagctaatttttgtatttttagtagagacatggtttcaccgtcttgaccaggctggtcttgaactccttactttgtgatccaatcccagtgctaggattacaggcatgagccaccacatctagcctgttttgttttatttgagacagggtctccaggctggagtgcagcctccgtggcacactgcagcctcctgggctcaatagattctccaacctcagcctccaacatagcttggactacaggtgtgtggcaccaaacctgactaatttttaaattttttgtagagatggtgtcccattatgttgctcaggcttgtcttgaactcctggrctcacgacatcttggcctcctaacgtgatgggattacaggcatgagctgctgtaccctgctggccttcccttaaaatattcaagagcaccagttttctttccatccattgagagaatagagcatggacatttctctcattgctcaattccataggctctcatgtggccaagacattctttattgtgaatggttttatttaagggtgttgaactcaattaggaatatgtgaaaagatctgggatttaaaaatttctatattcaaatggtaaaatgaattaaatgaaaaactgttgagctgggggattactgtagttcctttagtacattgcactgtggtctaacagggataaycacacagtatatgctcaaccttataatttctcagtcaataacagcttttatctcttgtgttaccctactcaggtgatttttgttctaggtgagcaaataacatttattgagtgcttggtatgtgccaaacattgctttatatactttccatgtattacattaagtaagcttaactctcacactgtatttctttcacatggacacatctttcattccttaattaagttacacatcaacctagtaagtagttaccgcatctgtttcctactgtacggtgggaatggtggtaggcgctggagattaagcaggcaacaggacaggcacagtccttatcttcctatagctgttaagtagggaaaacaaacattagcagaaaatatttattacatgcaaataaaaagaactgcgaagaagagtacagggtgctatgaacatatataaataacagtgtgcctcaggccattattatgcttctaaagatctccataaagtgtggtttgacagctaaagataaaagctgattgaaaagaatcaggccagcttggcacagtggctcatgcttgtaatcccagcactttgggaggccaaggtgggcgggtcacctgagttcgggagttcgagaccagcctgatcaacatggagaaaccccatctgtactaaaaatacaaaattagccagatgtggtgttgcattcctgtaatcccagctactctggaggctgaggcaggagaatcacttgaacctgggaggcagggattgcagtgagctgagatggcgccattgcactccagcctgggtgacaagagcgaaactccatctccaaaaaaaaaaagaaaagaatcagaagaatcaggccatgctgggagtcccccttaagagagttgttttcccttatcttatcagcaatatattaacaattccctaagcctctcagcagagattgtacgggaaagcacttctgaaagccttggctaatatttttaaccagccagtgcacacacactattgccaattatatccattgcatatgaacttttctgtaactgcacagccatgtatctgtgctgtagcataactccatgttgtcagatgagtgattggaactcaggcttctctgacatcaggaggcttctccacatcaccctacgcggtggagcccaagtttatcagggttgtcggtcagggaaggcatctctgagggcatatatttagggtgggatcctgttaagcattagccgattagcattagagagtaatgcatggtattgcatgtcatctagatgctggagagtctggtagttttgaagagccaaaagaagggcagtgtcactggattattgtgaactaataaggaagtggggccaaatgtggttggggaggtaaggaacagtggctgaacttattgcttgtggatttattaccttacttaatagtttgatgagaaaatacattattatatgcaaatatatttttagtgataatctcatatatttctctcttgaaatcgagtgatattccaaatatatagactagtgttataatgaaaaaactcaaagtgcaactttttttcctatagtgttataataatgtcatttttattcaaaactgggcatatctaaatgtatagtatagggactgggcatggtggctcacgcctgtaatcccagcacgttgggaggctgaggcgggcggatcacttaaggtcaggagttcaagaccagcctggccaacatggtgaaaccccgtctctactaaaaatacaaaaattagctgggcatcgtggcacatgcatgtaatcccagccacccggaaggctgaagcaagagaattggttgaacccgggaggtggaggttacagtggcccaagattgcaccactgccctccagcctgggtgtgaaagagagactctgtctcaaaaaaaaaaaaaaaaggaaaaagtatactgtagggaaaattttatgaaagaagtctttatggcctggcgttgtggctcatgcctgtaattccagcactttgggaggccgaggcaggcagatcatgaggtcaagagatcgagaccatcctggccaacatgctgaaaccccgtctctactaaaaatacagaaattagctgggcgtggtggtgtgcatctgtagtcccagctacttgggaggctgaggcaggagaatcgcttgaacccaggatgcagaggttgcagtgagctgagatcacgccactgtactccagcctggcgacagaccaagactctgtctccaaaaaaaaaaaaaaaaccgtctttatcatgtgattttgggtaaactaattactgttgacctttactaaatctaaaatccagccttttacgtatgctgtggtgttgtcagattagattatatttgattacggacaaagagagaatctattttgaattcctacactatgccagacagatgatagacattttacatatgtattttgatcctcacattggtacttccaggtatgttttgacaaactctttttttttcttttcttttttttttttcagatagagtcctcactcttgtcacccaggctggagtgcagtggcacaatctcggctcactgcagcctccacctcctgggttcaagtgattctcctgccttagcctccccagtagctgggattataggcatgtgccaccatgcctggctaattttttttgtatttttagtagagacggggtttcaccatgttgagtggtcttgaactcctgacctcaagtgattcgcccacttcggcctcccaaagtgctgggattacaggtgtgagccaccatgccgagcctcgtattgacacattctataactgaagcttagaggcttacataacttgatatgtaaagtactaaagcccaactttgaatccaggttttctttacttctgtagcctgtactctttccactccccatgatacctgcagaatgatcctgatgtctgttgtatttgcaccttgcttctgcatgctgcttgatatttgttacgatgtagtaaatagtccatttgaaagagtgggagagcactcaaagagtttggggttctggctctaattcactgctgtctgttcactgactgcctaaaatgggcctcagtaagatgtaagcctcataggaaagaccgtggtccttgatttggtcactactttatgcatagaacaggcccttagtaaacaattatgttgagtaaatgagtaaatgaatatctggtactgtgctatgtggcatatatatatatatatatatatatatttttttttttttttttttttttttttttttgagacaaggtctcactctgttgcccaggctggtgtaatcatggctcacagcagcctcaacatcccggggctcaggtggtcctccccactcagcctcctgagtagctgggaccaaaggcacatgcaaccatgcctgcatccatctctctctctctctatcatctgtttatctatctatcatctttttttaatgcatacagaatttgaagagattgggaatgaaatcaaagtatgagagattctggaaagtaaatgactcagacatatgtgatatgtgttctgagtaataattcaactgtaaatattggcacagttaaacatcaagaagaattatactgagcaatcaaatgaacaaagacgtattgaccatatgtgtaatgttgtattaggtaccataataagttactctgtaaggaattttttccttccctagattagatgtatatgcatggaaaaatgagaaaataaaaataacagaaaactgaataaaattagtggtatgttatgttgcagataatacatcagattggaaggtaaagcatctttaattttcttcttgaggattaacaacattggaaaactcatgagttggatgatcctagaggcttggggcttgggagtgtgtgtctgtctgtgtgtgtttgtgtgtgtgtatgtctatatatgtgatgttgacaacgaaggcagttctttgcaagcagctgagagtggcagatgtatgagggcaagttgatatggtggcagttgttagatgtttctgtgagaacttccatggtagggatagccaagaattcaactctgtgtcctagtttccagtgcaataaatgctcctcacaatttaaaaaaacttaataacatcttcagaatctatttatggcttacactgaatctgttggagagaagtttttattgtaacttgatgatgtataggcagagtgcggtggctcacgcctataattccagcactttgggaggctgaggtgggtgggtcacttcaggttaggagttcgagaccagcctagccaacatggtgaagccctgtctctactaaaaatacaaaagttagctgagtgtggtggcaggtgcctgtaatcccaggtacttgggaggctgaggcaagagaatcacttgaacctgggaggtggaggttgctgtgagcccagattgcgccactgcactccagcctgggtgactgagcgagactctgtctcaaaacaaaacaaaattaaaaaatatatataaagtataaatgtggttcagggtaggactttaaggaagcggtgggacttgagatgcatggtgcctggaaagatagatagaatgtggatggattaagacattcctagacattcccaggggagatcacacagtggaaaacaaatgcagagaagcaggaaggaatcaggcggtcttagggaaaacaataggccagtcacagaggcgctgagagttaaggtttcaggacataaggggaaggttgctttaggccttactttggcaagtcttcaaggtcaagtaaagaagttgggaggttgtttgctcaaagtgaagttcagaagatgtttcagaaggggagtgatatgatgaaagctgtgcttcgtaagaktagtttggcccaagtgtgcaggatggattaaatcaagtttacaagcattgttccttagatatttatctcctcctttaaaaactaagaaaacacaaaattacacaaggagaaattgctcttacattgctgtcaaaaggcaccgtattattcttagtttttattttatttatttttcgaagaggtaatacattcacataatactaaatccataagatacataagtaggtggaccgtataattcatcatacaaaccaggacagttttgagagagagagagagcaggaaggtcctctgtatgattacgttgggacataaactgggtctttttccttgagtgtctaacggtccacaatataaatctcctttcctctgtgcccatcccaccttattctcttcctcagatgaaatccatcttagcagttcttttttgtatctttccagagatattctattcaaaaccaagcaaaatagtcttcctctttaaacttttttttttgttgttgttgagacagagtcttgctctgttgcccaggctggagtgcagtggcatgatctcggctcactgcaaccttcgcctcccagattcaagcaattctcctgcctcagcctcctaagtagctggcattacaggcacctgccaccatgcccggctaatttttttttgtatttttagtagagatggggtttcaccgtgttggccaggctggtttcaaactcctgacctcaagtgatccgcctgctttggcctctcaaagtgctaggattacaggtgtgagccaccgcacctggccatgaacttttttttttattttaaatttttataggtacgtagtagacatatatatatatatatwttwttttttttttatttttttatttttttatttttttgagatggagtctcgctctgtcacccaggctggagtgcagcggcatgatctcggctcactgcaagccctgcctcccgggttcatgccattctcctgtctcagcctcccgagtagctgggactacaggggcccaccaccacgcccggctaattttttgtatttttagtagagacagggtttcactgtgttagccagatggtctcgatctcctgacctcgtgatccrcctgcctcggcctcccaaagtgctgggattacaggcgtgagccactgtgcccggcatagtagatatatatttatggggcatgtaagattttttgatagaggcatacagtatataataatcacatcaggataaatggggtatccatcacctcaagcatttatcatttctttgcattacaaacattacaagtcttgctctgttgcccaggctggagtgcagtggtgcgattatggctcactgcagtctgggctgaatcgatcctcccatgtcagcctcctgaatagctggaactacaagcacatgccatcacgctcagctaatttttgtagtttttgtagagatggggtmtctccatgatgcccaggctgggttcgattattattattttttwaaatatagacaccttggatagacactactcagtttaagatacagcatatttccatcactccagaaagtttctttttctattcccaagcaatactacctcctccagagataaccactatttttgacttctgatactatatgctagcttaacttctttaagtagaaccatatagcatgttctttttttttttttctttgagatggagtcttgctttgtcatccaggatagagtgtagtggtgcaaccttggctcactgcaacatccgtctccagggttcaggtgattcttgtgcctcagcctcctgagtagctgcgattacaggtgcttgccatgacacctggctgatttttgtatttttggtagagactgggtttcaccatgttgaccagggtgatcttgaactcctgggctcaagttaatctgcttgccttggcctcccaaagtgctgggattacagatgtgagccacctcacccggcctagtgtgttctgatttatgcctgacttttttgtttaattgaaggcttgctttttttttttttttgagaaggagtctcactctgttgcccagactggagtgcagtggcatgatctccgctcactgcaacctctgcctccaaggttcaagcgattctcgtgcctcagcctcccaagtagctggaattgcaggcacacgccaccatgcctggctattttttttgtatttttggtagagacgaggttttgccatgttggccaggcttgtcttgaactcctggtctccagcaatctgcccacctcagcctcccaaagtgctgagattacagacgtgagccaccatgcttggactaattgaaggcttgtaatgttcattcaattttgtgtgtatcagtgatgtgtttttactgtgtatattgtattacattttatgaatataccacaaagtattcacattgctattgatcaacatttgagttgtttttagtttttgccttttgtgaataaaactgaactctcttctgaatgccttttgtttgacatgcgtattgatttctcttggtatatacctacaagtgaaaaactaacgggtcacagggtagatrtatatttagctttagtaagctgctggttttctggaatgttgccagattagactgtagtagcagtgtttgagagttttaattatctgcaccaactcttgataatgcaagtctttttttgtgtgagacagagtcttgctctgttgcccgggctggagtgcagtggcatgatctgagctcactgcaacctccgcatcttgggttcaagcaattctcctgccttagcctcctgagtagctgggatcacaggcacccaccaccatgaccggctaatatttttgtatttttagtagggacggggtttcaccatgttggccaggctggttttgaactcctaacctcaattgatccaccckcctggacctcccgaagtcctgggattacaggtgtgagtcactgtgcctggccagtcttttaaattttagccattttggtgagtatgtagtagsagctsattgtgatttgaatttgcaattccctgatgagttaagatgtgttttctatgcttagtagacatttagatatctatgtgaactataggttccggcctttcctttgtttttattggagtgttagtcttttcctcagtgatttaaaggatttctttgtatattctaaatacaagtatttgtgagatgtatacattgctgatattttctcccagcctgtggtttgccattttattatcataatgctatcttttgataagtagttttaagttttatttaagtcaaattagttaatttattttctttatggttaatgtgttttatgtcctctttaagaaatctttgcttacccttagttttgaagatattcttctagaaggtttatagttgtgattcttgtgttcttgtttttttgttttttttttttttgagatggagtttcactcttgttgcccaggctggagtgcagtggcgtgatctcggctcactgtaacctctgcctcctgggttcaagcgattcttctgcctcagcctcccaagtagctgggattacaggcatgcgccaccatgcctggctaattttgtatttttagcagagacagggtttctccatgttggtcaggctggtctcaaactcctgacctcaggtgatctgcccatctgagcctcccaaagtgccggaattacaggcatgagccaccacgcccggcctatagttttgattcttacttttagggttacctaaactgaatgttttgcattgtattttattttaaatcatgtttcctggagattatcctatatcaatacacttgcttttattgtgtctatacctgtggatgtaccatagtttatttaaccttctcttgctgggcatttagtctctttccattattttactaatactgtaacactacagggaacatcctagcacctatgtaattttctacatgcgcaattattattgttattattattatttttttgagatggaatcttgctctgttgcccaggctggagtgcagtggtgagatcttggcttcaggcatgagccaccacatctggccccacatgtacaattatatctgtaggaaaaatccctagaaggaggctctggtgtcaacagattagttcatttgtatttttgataggtatttgtattttataagagtgaaccattttatattcctgtcagcaatgtttgagaataaaaacctgttttaagttagaaatatctatgcaaataaacaagtagagatgtggctctttccagcgcgcgcgcgcactcgcacacacacacacacacacacacacacacacacacacaccctccctctctgtctctctctctctcactctctcttaaaaattcaactgtatttgctatgggttaaaatacatgttccctgggctggatgtggtggcttatgcctgcaatcctagcactttgggtgaccaagtcaggaggattgcttgagcccaggagtttgagaccagtctggccaaaataggaaagccctgtctctagtaaaaatttaaaaaatttgccaggtggtgtggcatgaacctgcagtcccagctactcaggcagctgaggtgggaggattacttgagcccaggagatagaggctgcagtgagccatgatcttgccactgcattccagcctggacaactgagtgagaccttgtcttaaaacaaaaaacaccaaaaagctatatatatatatatatatatatatataattatattatatagaatatattatatacaaatattacatataatataataaagtatataatatatataatataagactatataatgtattccacaagaaaggtgtcatgtattgctacatcttcagtgcctaggaaagaacttcacgcttaataaatattatagaaattatgggttcttacacatataaaatatatttcttattttatgacttagrataacatatttccttgattttaatcttaaccattataagtattagttcactaacaaaagaggttaaatagtctaggttaagtaatgaagtttttcttaattcatgcacctttctaacatgacactgcttaaatatatctgacctttgattacggtcagagttagagtcagagttaatggtggaataacttaactgctagttttatttatactttattttaattgactttttgtgtgtgtgtgtgacagagtctcactttgtcgcctagtctggagtgcagtggcgcgatctcggctcaccgcaacctctgcctcctgggttcatgagattctcctgcctcaacctcctgagtagctgggactacaggcgtgcaccaccatgcgtggataatttttgtatttttagtagagatgggatttcactatgttggctaggctggtctcgaactcctgacctcaggtgatcagcctgcctcggcctcccaaagtgctgggattataggtgtgagccactgcgcccggcttaattggcttttaaaggtaattattcttgggccagacatggtggctcatgcctgtaatcctggcactttggaaggttgaggcaggaggattgcttcagctcaggagttcgagaccagcctgggcaacatggcgaaaccccatgactacaaaaaatacaaaaaaattagcggggcgtggaggtgcctgcctgtagtcccagctactctggaggctaaggtgggaggattgcctgagcccaggagatggaggttgcagtgaaccgagatagtgctactgccctccagcctgggcaacagagcaagatcttgtcttttttttttttaaagtaattattcttatatataatacatatttattataaaactgaaacaatgtcaaaaataatggggaagaaagtcacaaattatcctcatctcatcagtcagaagttcctagtgttaatagttggtaagcatcaatgttgacatctgtttatgcttatacgttggcatattcatagcatatgacaaacataaattattttataaggatgagataataacatttttgctaatttgaagcaaataagtatacaatttaattgaatttaacagaagaacaattaattgaagtgaaatagagggtattgctccagtttggctactgtttattctttacaaaagtaatcattactaaaagatcctgtgggggttgagaggagattatgaaaacccttaagatgttgaagtcatttcacgcttcttcwtykyttttttttttttttttaagacggggtctcacccttttgcccaggctggagtgcagtggtgtgatctcagctcactgyaacctctgcctcccgggttcaagcgattttcctgtctcagcctcccgagtagctgggattacaggcccctgccactgcgcctaatttttgttttagtggagacgggggtttcaccatcttgaccaggctggtctcgaacccctgaccttgtgatccatccaccccggcctcccaaagtgctgggattacaggtgtgagccaccatgtcctgcctcatttcatgcttctttaactattacctacatgttccatcatgtattgatttcatgttctgagcaatgattagcattcgaacattcgttccttccatcttccctctcttcacttcccaattgctgctaattaactacttgtacttagtcaaagtttacttcacctttatatgtaaatacttttacttagtaagtgctgtcaggtacttttacttactttgcataacctaactctagtcaagttccataacatgtamattctatactgcaacaataattcccccaatttgcagttgactgagataaggcatagaagtgggatgaggttgaagagaacgtaccayaggaggccaagccttgcggggctgagtgctgtccttatagggttcaggggtcagccctcttcccaagaccccagccaattccctatgctaggcatcctccacccagccaagggtgcgtcccactcccacatgaaggtacgtggcaaatcctggcagcacctttggtcttggttctgggcctgagactttcttccttaagggtatttttgttgacttttcccagtgttaatttattatttcattgtattttccccccttagagatttttggtagcataatttagattcagtcaactggcctttcttcccctcagtattgtcttggtgaggaaggagcagtgaggtgctgtccacacaggcagcacttcaatcttttgcttggctttatcctttcaagtccataacctaagtttgttctcctttcttgttaataggaccaatttgtatgacctaggaaaaataaaaaaaaaaacaaagaaataaatagagatgtttttgagaaaaaaatgtgttggtagaattctgccttaatgtgtttgttcaccaccagaaaattgaagagattttcaatattctatctttatgaatgaaatgatgtacttaacattttatttgttaaaattatggttctatagatcatataaagatttcaagataaaaaaatcttaagattttttgagacagggtctcattctgttgcccagattggagtacagtggcacagtcactgcagcgtcgacctcctgagctgaagtgatcctcccacctcagccccccaggtagctggggtataggcatgcaccatcatgcctggctaattttttgttagctaggagtttcaccatgttaccaaggctggtctctaactcctgggctcaagcgatctgcctgcctcagccttccaaagtgctgggattacaggcatgcgccactgtgcctggcccaaaaaactctgttttttattgtgataaatgtttggggtacctttcaaacaatgtaagatattttatgaaacagaacaaattttactaagaatttccacatacaactatttcagaaatgatagtcatcctgaaagtactacattttaagaattaatattaataacatcattctttttattttctaatgactctcaggaatatggtatataataggaatttggtttattaaaacttattttattttttgaaatagggtgttgctgtgtcacccaggctggagtgcagtggtgcagtcatggcttactgcagcctcaaactcctgggctcaaaggatcctcccacctcagcctcctaactagctgggactatacgcacatgccaccaggcctggctaatgtttttcagtttttatagagacagggacctattatgttgcccagagtggtcttgaaaccctgggctcaagtgatccccacctcagcctcctaaagtgctgggattacaggtgcaagccaccatgcaaggctaaaacttattaaagctaatgaatattataactgtggaaatataactttggaaataatgaggccattttgattttttatcrgcaattgtgtaatatagtgcaaagaacatggggtttggagttacatagcatttgaatgcaggctctgccatttattatctatgcaaatttagataagctgtttagacaaactactgtgaacctcccttttttcatctgtgaaatggggataacataactatttctagtggttgttgtgaagatggtacctattaacatccctaaataagagtatgtggtcaataaatggaatatttgatttagtgtactactaattggaggttcagtcctgaaaggtgacatcccttttaggttgtccaaccaccctcacagtgtttccagttactctccagctccttatcctcctttagttttcttcatarcagtcatcttcatgcgtgaaattatatttcattcttattagttactttctttatctacctttaagatgtaagctttatgaaggcacggactggctgtactgtaycccccaaatctagaacaatgcctggaacataatcggcattcacatattgtttgatcgaatgtgtaaatatatttacatttttttttttgaggcggagcctcgctctgttgcccaggctggagtgcagtggctccacctgtgctcactgcaacctccgcctcccggtggctggacagagccaccacgcacggctaatttttctattttcagtagacagagggtttcgccatgttggccaggctggtcttgaactcctgacctcaggtgatctgcctgcctcagcctccaaaagtgctgggattacaggcatgagccactgcacccggcctacatgttttaaaataactagattcttagttagttcagggaacctgcaaataaatatagagaaaataaacaagcatrtttttctacctttacacaacttacttgttggttgactgaattgactgctcagtttagtttagttagttcaactagaactggatttatagactcaatcccagtgactgacattaacactacggatgtttgttattgaagctcatatgatatttcattcgttatttcataaaagttatatcactaggtggttctactttgtttttcttatatttgacccctaaatggaaggaaagccgaaagaagagttgtctgtgaaatttatattggaaagcaaaatcttcaaattcctctaaaacctcttttctaaaacagagtgctagtgaaagatttcacacacacatacacacatacacaatgaatcctggtttttcaagaaatgtcttttgggggaaagggactcccctatttgagatgtttcttttttcatagaaagtatttcattgtggaaggattatgtcttattctgaaatatctaatgcttgctaaaaatttacttatttatttacttatttatttttttgcaacagtcttgttctgtcgcccaggctggagtgcagtggtgtgatctcggctctccgcaacctctgccgcctggattcaagcaattctcctgtctcagcctcctgagtagctgggattacaggtaccaccacgcccagctaatttttgtattttttagtagaggtggggtttcaccatgttggctggactggtcttgaactcctgacctaaagtgatctacctgccttggcctcccaaggtgctgggattacaggtgtcagccaccgcacccagccaacaatttatttattttgtaaaagatcatgcaatcttctgtagtttaaaatgtcaggttttacctctgttatattcctctatcattcaaatgccttttaaataaaatgtacctttttttataaaaaaaatttatttttcaataatttagcacattcatggtaatgatcctttagtttttatgtgatccaaataaaatatttgctttaaagtttgaaaaacaatagtaatgaaaggatatgttggctgggcgcggtggctcacacctgtaatcccagcactttgggaggccaaggtggggcggggggagcatcatctgaggtcgggagttcgagaccagcctggccaacatggagaaacccccatctctactaaaaacagaaaattagccatgcgtggtggcagtcacctgtaatcccagctactcaggaggctgaggcaggagaaccacttgaacccgggaggcagaggttgcagtgagctgagatctcaccattgcactccagcctgggcaacaagagtgaaacttcatctcaaaaaaaaaaaaaaaagaatcctggaaaggatatgtcttcagtttgaacttgtccataaattgcaagagaaaagaacactggtagaaggattaggcaagagacggtttatttttgcctgacttaatgaaagtattgaaaataacaggctgaggctgggcacagtggctcacgcctgtaatcctagcaccttgggaggccggggccggctgttcacctgaggtcaggagttcaagaccagcctggccaacatgaggaaacctcggctctgctaaaatacaaaaattagccgggcatgatggtggatgcctgtaatcccagctattcaggaggctgagacggtagaattgcttgaacccgggagagggcggttgcagtgagccgagatcacgccactgcactccagcctgggcggctgagtgagactctgtatcaaaaaaaaaaaaaaaaaaaaaaaaaaagaaaataactgtctgcattgtttgtttatgatctgtagctttgcatatwttcctttatttgtaatctcattgctccttgatattttattttcgccatcacagtctaagaaggagagattggaccttggtcttgatctactgccatcttgtacatagatctttgaaattctctattcatttggtaaatataatggacagagttaataccaggtactatgaatgctcacctgatatttggtccttrtgaaggtgtagatagttgttaactccttgtgtgtgcatgttgggggatggtcggtggagctttttattccaccatcttgctccaccactctccttgacagagttggatcagggttaaatttattgtcatctcatgaaatctaaatttctttaaattttatgatcccattggaatttatttaagaaaagtataattgcatagttgtttctgagagaaaaatagagaggaagagatgatttgcatgtctcaagagtcaatgggatttatatttagaatttcttttcccctgacatttttgggttgtggattaaggtcctttctgggaccagatacagatgaaatttcagcctgttccttgttttcagttccttatggctaagaagattggtttagccaatcttagtagtttttggccttctctatacaatgaagattccatagtaagacccatagcaatgaagccaacccaggtcagctacagctgatttataggtatcttttggttacctataaatagtgctgttgctggtcgaagcagaataaataaatgagatcagagacattatttgaggaaaatgcttaaaaattttctcatctaaataattttacattggagttacatagggtgaggaatgaggatgctggtgtatttccttttttggggagagaaagattcaagccctttgtttggactgggaatgaggattctcaatggtcagtagtccttgttacagaaacagttatttgttggcatctttctaaagagtcttgcaaatgtaatcacatttggaatacataattttttatttttattttttacttttttgtctgagacagagtctcactctgtcacccaggctgaagggcagtggtgccatctcggctcattgcaacctccacctcccakgttcaagtgattctcttgctctggcctcctgagtagccgggactacaggcgcccactaccacacccagctaattttcgtatttttaacagagatggggtttcaccatcttggccgggctggtctcaaactcctgacctccagtgattcacccaccttggcctcctaaagtgctgggattataggaatgagccactgcgcccagcctatttttatttttattttttatatggagtctctctctgtcgtccaggctggagtgcagtggtgcgatcttggttcactgcaacctccgcctcatgggtttaagcgattctcctccctcagcctcccgagtagctgaattacaggcatgtgccaccacacttggcaaatttttgtattctattttttaattttttaagatagaatacattattttcattgagcattctatgtaacaattatttcttgatgttgattcccttgatattgtcaatatcattttgagctgtgttcatttttgtttcatgttacagaggaataagatcatcatagtttatctatatatggcactggtaygctggaatctgtaatactgagttggtttataagcaccagaaatcccagagaaacatcaacaaactgaaaacatttcaaagaaatgttaaaaaaaaagagaaagcttctttttaaaaagtaaaccaggaggaaagactaaagtaaatgttaatataaatggtttgtttcaatgttgtaggttaaaaagaaaatttaagactgggtgtggtggcttatgcctgtaatcccagcactttgggaggctgaggctggcggatcacctgaggccaggagttcaagaccagcctggccaacatgcataaaccccgtctctacaaaaatacaaaaattagccrggcatgatggtggatgcttgtaatcctgctactcgggaggctgaggtgggagaatcacttgaacccgggaggtggaggttrtagtgagccgagatcatgccactgtactctagcctgggtgacagggcaagactacgtctcagaaaaaaaaataaataaataaaatttaagtatcatgaacaatatagcaggagtatagattgggataatggttttaaattactttcaattggaggatgcttgttcctggcttctccactttctgcaaacactgaaccagggatggtgtcccaggcttcttgctgtctaccttgacatctagtcatggttctataacctatgccaacatccactccacttctaaaatctatgcacatactctctttcccaccatcataggtaacaaacatcctggccttttctctcctctgccatgtaatctgaaaaccttgactcttacagttttcttcttaagttcatgtcctgtcattactttgagcagccattgaagacctatttaacacctttattgaacagtcataggaatcaaaatctgggtttgaattttcgttctgtcatttggtgtaacgttagacagattctctaacttcagtttttccatctgtaaaatagggaaaatatgtttttaattttttttctttttgagacggagtcttactctgttgcccaggctggagtgcaatggcgcgatcttggctcactgcaacctccacctcccgggttcaagcgataatcctgcctcagcctcctgagtagctgggattacaggagtgtgcaaccatctccagctaattattgtggttttagtagagacagagtttcaccatgttggtcaggctggtctcgaactcctgacctcgtgatccacctgccttggcctcccaaagtgctgggattataggcgtgagccaccacacccggcctggaaaatatgttttttcactggtaattgtaaagttgtaaagtgatggctgttagtggctatgtaaattaatgtggccattatggaaagcagtatggaggttcttcaaaaaattaaaagtagaacaactatatgatccagcaaccccaccaatgggcatatactcaagcgaaatgaaatcagtaatgtggaagagatatgtgcactcctatgttcattgcagcatcaacttcagtgtccatgaatgaatgaataaatggataaagaaacatggtatatatacgtaatggaatactattcagccttagaaaaaacaaggaattcttgtcacatgttataacataagtgaacctgaaggacattattctaagtgaaataagccaggcacagaagatgaacaccacatgacctcacttatatatggaatccgaaaatgtctaactcatagatgtagagagtagaatggtggttaccagaggcctggggaggagggcaggttagggagatgttggtcaaaggatataaaaatttagctagraggaataagttcaagagatctattgtacaacatagttaatatacttaatgtacagttgacccttgrataacatgaatttgagctgtgcgggcccacttacatgtggagttttttcaatcaaatgcagcttgagggatacatatatactgagggtcaatttgcatatatttgtgttctgcagggccaactgtggctacgcgactgtattgtgttcctgaaaatctctaagacagtagattttttaagcgttatcataataaaatataagtatatgaagtaatgcatttgttaattagcttggtggagccattctacaatgtgcatatgtttcaaaatatgttgtacacagtacatatatacaataaaagaagaaatacatggttgtaaagtgatggtgcagcatcacacgaggtatatgtgaaaccatgctgtaatttgtagtcttatttagatgccagttgtatggttatctttacttaccgacattcatttgctcaacccactcatatatccacattttgtattttgtgttatttgtgaagattctatttttggttttattctctaattgcatcttttgtatcacaaatttcttgaccttattagatcttttaatattttaaacactttcactcatttatttagtcattgaactcctggcttcactttccctgctactgttcataattaagaagcaataggatagtggatctcttcactatgtcagttctgagcttgaagtatccttcatctggagatagtaaaactctagggaaattttaaaatgatatgtgggatatttcatttgttattgacattagtgcttggggtatggattaaacatccttaatgtatgggacaggcccctgaatctgaatttttcttgcaaaatgccaatagtgcttccattgagagcactactaggtgtgcaggacttctatccatcctttatgacatggttcttaactctattagatttgttttgccattttttccctctgtgcttctgtatgtttttacttatgctgctaatatatatctgtttgtcttcctctttagaatattagtggctgaattgagagagaatctttgggacattccttttgtatatctagaatataacatagaccccccatagagttggtgcttattatttgctgtatatgaatttggaatctttaattgttctaggaaagattcagcttcagtttgataatcagaagctgctacatggttgccatagctatggcacttgattccttctagagttctttaagctacacgcttaaaaggagagcctttcttattaggtaaaaccttgtactcagataatttgaactgggaatttctgggttgtgaatatttggaaaaaatatggtacaaatgtttggaaaaaatattcagctttgaggtagggattaaaaagcttttgttttgttttgttttgttttgttttgagatggtgtctcactctgttgcccagactggagtgcaatggagtgatctcggcttactgcaacctctgccttctgggttcaagggattctcatgcctcagcctcccgagtagctgggactacaggtgtgcgccaccatgcctggctaatttttgtattttcagttggccaggctggtcttgaactcctgacctcaggtgatccacccaccttggcctcccaaagtgctgggattacaggtgtgagccaccatgcctggcctatttttactttctgaattttattaaagcaaggaaccccacccccactttttttttctatctcagttacttttcagagtgttgtgttcatttgggtcataatgctttgaaaaagttgttataattggagaagaaaaatggccaaaatgatttcagggatataaagtagactttctccagtgaaagtctatagggactggactttttgccttggataaggcaaataaatgatttgatgtctgttttaatctatttttatgggtaagatgtagagcagttattgttattattcatagaacaatgaataagagaatattagctcatatcagagaagaggttttagttacctaatgaagagctctttgacactagggcaatgaatcttccaaaagataaagaaataggtccgggtcacacagtttctattagcatgatggagtagaaagatcttgggccttcagacagtcctggcttggaatcttagtcccagttaacacctctcagcctcattattttttcatttgtaaaagtgagaatactaacatgtatcccaacatatgtactaagattcaatgagataatgtgtagacaaacacggaggaaacaatgctagctcctttctccattgtagtgcttgcctggcgtgtaataaacactcagtaactcttctcggtcctctggagatacttaaagagaggtatgagcatctctcctagatgacttagaaatttacctacctaaaggcagggagttagaccaaatgtctctttaaaagttttttacagaatgagttcagaggatgcctattaaatgcaagattgtttatatgcagatcttcgtggatataaatgttgttttgtttcagaagttggagccattgacttttacatttgttctttctaccctctgatccatcagtgcagaaaactgtagcacagaaactgtaactaagaaactttttcttgaagagcagcatggaaagatgtaaaataatttttgaaattatttcttagtctattccttaaaatatcacaattccccaaccttccatttcattttctcccagtcttactctatttaaactcatgaggacagacaggctagatgatattttgggaatctcactgtgggagcttagtaaaaatgattgagatggttttcagtcagtagacaagaaaatagtgtgatcgaagtattaaggcatttttggaaatttgtggttttgtgtatttttcaatgtaggctgccaatgaattgattctttcaattattttctgaaaaaagttttggtttacattgttcagatggtaaaagcatctatggccatacctccctgaacgtgcccatcctgcctgatctctgagtggtaaaagcatgtttctctgtaggtacattagattgtttgcagttcacttgagttgcaaagaacaagccataccggctgggcgcggtggctcatgcctgtagtctcagcactttgggaggccgaggtgggcgaatcgtgaggtcaggagatcgagaccatcctggctaacatggtgaaacccccgtytctaccgaaaatacaaaaaaaaaaaaaaaaaaaaattagccgagcgtggtagtgggcccttgtagtcccagctactcgggaggctgaggcagaagaatggtgtgaaccctggaggtggaccttgcagtgagccgagatcrtaccactgcactccagcctgggcaacagagcaagactctctctcaaaaaaaagaacaagccataccacattagggcctatcatttcttgactgcagttgtagaaatgacaaattaactcacacatttaaaatttttgctctttagtgattgtctgaaaaggaaagatgaggaatattgatgtataataaaacaatatatggagaaaagatggtagcaaaaagaacagaagcttttggatcagaattcctgagttctagttgtatcatttactctctgtgactttgacaagttaatttattgtctaaatatttctttgttttgagacagagtcttgctctgtcatcaggctgaagtgtagtggtgccatctcagctcactgcaaactctgcctcctgttttcagrcgattctgctgcctcagcctccccagtagctgagatcacaggtgcgtgccaccatatctggctaatttttgtatttttagaagagatgggtttcaccatgttggccaggctggtcttgaactcctgactttaagtgatctgcccaccttggcctcccaaaatgttgggattacaggcatgagccacggtgcccagcctaaatatttctctcatgaattgtaaaatagtgataatattggcacttataaaattatcttttagtgttaaatctgacaacatgtgttaaagcattttgaaaaacatgatgttggaagcatacatgttacagatgtgaaagagatctgaatacagcttattagtttattaagtgcaaaatatttaatctgaacctgatcatgaagccctgaggaaggcatttgaatccagaaaagtggtataggcagcagtttttggataaattgatttggggtctcatcttgactttgctacttaacatctcacagtatttatttaaattgactcttccttagcttctcttctgtaacaaagattgcttgcttgtaagccttgtgtagagtaagttggatgctaaaatttgactatatgatattatgatttataagttcatacttttcatgtttggaagggcagaacattttagtatagtattacaaagacattaataatattaggtaatcaggcacttacaagggatctggagaatgacacaaatcactttgttacattttcccttgagttgcctggctaatatggtgagtccacctgcgatgaagatcagagagagtttttgctttcttctttcccccttcctgtcagtctttcttttttcttcctttcttctggggtctcaattcgtcattttttttttcttctggtttgtggtttgttgaggtttagctggaggtgtatgggtgaaagcttcaagtctttcagggtgtaatgaagaaaaatgatcttcctgttctggtctgcaatgtaaagacctttctcttgctgggattgttcaccacttatagcctaaatttagtgctttgtagtgttaagactcttttctctgtcttattagggctctgtttgtcagtaattagtagacactgatctctaaacaactcgtgtactttcctgcttgtttacctttactgataagaggatcgaactacaggatcctttcaagttctaaaatggtgtgatttagactggaggactccatagtgttactgaggtacataagtaatagactttgttatgcctgtttatagatgaggcagtggaaggagtggagttcagtgttttgagttactaaatggaatttccttcaagtaggggaatgttagtttgtggaaatttgtatgtgaacgtctgtaagcatatttttagtatcaattagtggttcaagtagagtgtgtgtttggaacagaaggttcagatgctgtatagttgcagagtctgtgcccatgaagtgtgaatgcagtgactgtgaggactcatgttctgtgtgcacggaaaccctcatttgatctgaatattccattctttgttctctatgcttgcaattccactgaagacagttttcctgctagttagggctacaagtcatgagaatagtggttttaacaatgaaaatactaccttcatattaagaaacttaatttcctgttgattgtttccccaaatttatttcattttttactctccccaactgatcaataatcaaagtctctgaattcaagtttctaagtatctcttgaatccatggcctccacttgtccttgattgagattctcatctcgtctctctgccctgcactattgcgaagtcattctgacaggtgtcccatcatcacaccaagttgtttataaaaagtctcatttgtgcagccttttaccttcataaagtgcttttatacaccttttcttacttaattctcataccaaatgctgaagtagattttatcattacccatatttgacaactgagaaaaaaactaagaaaggccaagaacttctccaaaggttgtgtggttagtaaatgctagaaaaatttatatttcggaaagtggtttattaaaaaatttgtgtgccccaggatacaaaaaaaatttctgtagattacatttgtataacgaatgactcagtatgaaataaagatacaacatagggacacatacatttaagaatgattttttattttagaaatgaagccaactacttaaaaaaagttttaacacttttgttgttttatgaagtaattaggttgagtaatgtaacaagagaaaaatgcttggcgacttttcaaattcatgcttctttattgaacatatgcccaaattgatttacagcttcaatgcactttttaacaaaacaagattttagaaacttagaaaaacacatgattttttttcacgctgtccctctctcccccctccttcttttcttccttccctcatttctttcttttttctttccctgtttcatttggcaagctctgaatgtagtgggaagagcatagagaaatgaataaaaatgttaaaaattcttaaattgtgtatgtaagtaatcttttaaaatatttaattttgtgatttaagagatcgggatgtaaaggaaacaaacaaaaaaaaaacctttggctggttgcagtgactcaggcctgtaatgccagcactttgggatgttgagacaggcagatcactttaagccatgagatcgagaccaggccaacatgatgaaaccccgtctctactaaaagtacaaaaattagcagggcatgatggcatgtgcctgtaatcccagatacttgggagaatgaggcaggagaatcgcttgaacctaggaggcggaggctacagtgagctgagatcacgcccctgcactgcagcctggacaacagagcaaaactctgtctcaaaaaaaaccacacacacacacacacaaacaaaaaacaaaaaccttcacaggtagtggtgtggtttttccccttcatctctagattgcataatcaaaaaaataaagaaaaaccactaaaccatttctgtcatttcaaaattatcaatttttaaagaaggaatttcaggttttactttttaactttttaattttgaaatagttttttttctttttcttttcttttctttcctttcctttttttttttttttttgaggtggagttttgctyttgttgccaaggctggagtgcaacggattcaagtgattctcctacctcagcctcctgagtagctgggattacaggtgcttgccaccatgcctggctaattttgtatttttagtagagagggagtttctccatgttggtcaggctggtctcaaactcctgacctcgggtgatctgcccgcctcggcctcccaaagtgctgggattacagatgtgagccactgcgcctggcctgaaatagttttatacctatcaaaaaagttgcacaagtagtagagtgcctatactcttcaccccatttcctttaatgttaacattttcaagtagagctatgatcaaaactaagaaattatcrttgataatttcttttaataatcattgatacaattcttttatctaaactgcaccttattcagatttgagtgggttttccactaatggtcagcttttacttttagtgaatttttgaatacatgaatgaatgggggatgacagagtataagaaaataacccactgggggctgggcatgatggctcacgcctataatccgagcactttgggaggccaaggcgggcacatcacgaggtcaggagtctgagatcaacttggccgatatggtgaaaccccatctctactaaaaataaaaaaattagccaggcatggtgacatgcatttgtagtcccaagctactcgggaggctgaggcagaagaatcacttgaagccaggaggtggaggttgcagagagctgagatcatgccactgcactgcagcctgggagacagagcaagactccatctaaaaaaaacaaaaacaaacaaacaaacaaaaaaaaaaaaggaagaaaaaaagaaaataacactgggaatggtgaaaatagagaaatacatgaatacatatgggaagtgaataatcagaagacttttagtatttttatttaatactttgtcctcacactataattgtatgtcttaagtgttaactagagactcttccctttcttgtctttattgatgacagtcatatctgttacttttacagcaaaattatcataaatctctctgacaaaagggttacattaattcattaaaagagctaaatacatttaaaaccgtttctgagtgaccatgaacaaaataaaaattgtactatcaatttctagagctataatttaataaaataaaatattacttgatgtttaaaagtctgtatatgagtttaagtccacttctaataaattatggtgagattctcaggcatattgcttaacaaggtttgtgaattacccatttttttcaatgtatttttactaaagattttgagtaatgaatccctttacccatgatagagacaataccaccccattcatcccagagttaaggagaagggagacattgtttagtactgctatagcagcagggctctgtggagttccagatgtggaagggggttgtaccttgtagatacacagccccttctctgattttgtcttcttgcacctgggaatacttaggcactttacagtcacagtgtcgttctctgtgggaatttctactcactaaatggtaatttatttttgcttccttatttctctggcattctgacaacttttcaatgataggaatatatttataagacattttcacagtatgagcatagccacctcagaattgtactaaggagtgaatggtaccccttctttagttattgttacccttgactgaaataaaacttcattgaaataaaacaatagccttgaatgaaagaaaacttctagaatttttactaaatacatgattttaagcaggtctttaaagattttttttaaactttatttttcctgcttcatttaattatcagaattatggagtttaaaaatacaacagctttatggatataattcatatactgtacaactcacccatttacagcatacaattcagtggcttttagtatacttcacaggttttgcaaccttacaacagtcaattttagaacattttcatcaccccataaagaaacctcttacctatttgtggtcattccctattcctgcctccgcccagcccctggctaatctaccttctgtctctatggatttgcctgttctggacagttcacgtaaatggaattatataatatgcagccttttgtgactgccttctctcacttagcataatatttgttaaagtgcttccatgtattagtagaatagtttgtttcttttttgttgcctaaaatatcccaccgtattgtattagtagaatagtttcttttttgttgcctaaaatatcctaccatatggctagtccccacgttatctgttatcatttgatggacatttgggttatttctactcttaggctattatgaataatgctgctataaaaatttgtgtctaagctttttgtgaggacacatgctttcattttcttgtttttaattttttttttttccgagttggagtcttgccctgtcccctaggttggagtgcagtggtgcaatcttggcccactgcaacttctgcctcccgggttcaagcctcagactcctgagtagttgggattacaggcgtgcaccaccgtgcccggytaatttttgtatttttaggggagatggggtttcaccatgttggccagactagtctcgaactcctgacctcgtgatccgcccgcctcaggctcccaaagtgctgggattacaggcatgagccaatgtgcccagcccatgctttcattttcttgggtatataccccttagtgaaattgctgggtcatatggtaactctatatttaactttttgaggaactgccagactgtttatcacagtgactaccgcatttcacagtcccaccaatagtacatgaaggctccatttcttcacatccttcttgacacttgttatttctctttttttatgatagtcatccttgtgagtgtgaagtagtatttcactgtggttttaatttacatttctctgacaactaatgatgttgaatatcttttcatgtgcccattggtcatttgtatctagttctttggagaaatgtgtctttaaaacctctgcccatttaacttcaatttttacttttttaattttttattttatttatttatttatttattttttgagacagagtcttgctctgttacccaggctagagtgcagtggtggaatctcagctcactgcaacatccacctcctgggttcaagcaatccttttgcctcagtgtccctagtagctgggaccacaggtgtgcaccactatgtctggctaatttttgtatttatcgtagagatgtggacttgcttttttgcctaggcttgtttcaaactcctgagctcaaggagtcctccggcttcagcctcccaaagtgctgggatcacaggtatgagccactgctcctgacctacccatttttaaaaaatgggattatttgtctttttattgttgagttgtagactcactgtggttttcatttgcatttctctgatggctaatgatattaagcatctttacgtgtgtttaatgaccatttgtatattttctttggagaaatgtctattgagatcttttgcccatatttaaattaggtcatttttcttgttatttttgcgttgtaagtgttctttaaaaattctgggctgggtgtgatcgctcatgcctttaatcccagcactttgggaggcccaggccagtggattgcttgagcccaggagttcaagaccagcctgggcaacgtggggagaccctgtctctacaaaaatacaaaaattagctgggcatggtggtgtgcgcctgtggtcccagctacacgggaggctgagataagagaattgcatgaacccaggaggtggaggttgcagtgagccgagattacaccattggatttcagcctgggtgatggagcaagaccctttctcaaaaaaaaaaaaaaaaaaaagaaattctgtacaaatttcttatcaagtacatgatttactaaactttctcttattctttgggttgtcctttcactttcttgatggtgtcctttgaaacacatatttttaatttcaattatgtccaatttattttttcttttgttgctagtgcttttgatgtcatatcaaagaaattattgccaaatccaatatcataaagatttactcctatattttcttttgttatatagttgtagctcttaagtttagatttttggtccatttagagtcaatttttgtatgtactgcaaggaggggatccaactttattattttcaccattttttgtaaagactcttccaattgaattgtgttggcatatttgtcaaaaagtaattggatgtaaatgtgagaatttttattgtttatatgtctgccttccaccagtaccatgctgcctttattacagtagctttgtagtaagttttgaaatcagaatttgtgagtcctctaactttgtctttttctagattggttattctttgtttatggtatttccatatgaatttttaggatcagattttatttctgcaaaaaaggtatctaggattttggtaggtagaattgccttgaatatgcagaggagtgtgggaagcattgccatattaacaatattaagtcttctgctccatgactgtgagatgtcttttggtttatttttgtcttaatttctttcaacaatattttattattttaagagtataagtttgtacttcttttgttaaatttatttctaagtattttattcttttttatcctattataaattgaattactttctttatttcattttttgtttgtttattgctagtgtgtagaatacaactgatgtttgtatattggcttttatcttgcaatcttgcttaactcgattactagttctaagagttttttagtggattccttaggacttttgatatataagactgggtcatctgcaaattgagatagttttacttctttctttgcaacctaaattcattttatttctttttgtaccctaactgcactggctaaaacctccagtgtaatgttgaattgaagtggttagagtggacatccttgtctcattcttttaaaaaataattagttaaattttttttcttttgtaaaatatataggcgggggtctcactatgttgtgcagtctgggctccaactcctgagcttaagtggccctcccttcagtctcccaaagtgtgggattataggaatgagccttcgtgcctggcctcttgtcttgttcttcattttaggggaaaacattcagttctttacttttaagtgtgatctgggttatgatttttaatagatgccctttattaggttgagaagtttcatttttttttagctttttaaaaatcgatacataataggtgtacatgttttcagggttcatgtgatcattccatacattaatataatcagatcagggctgttgatatacccatcatcaccttaaatatttaccatttctctgttctaggaacattccaattattccctgctaactattttgaaatgtacagccttttgatgttagctatagtcaccgtactgatctactgaacaacaattcttatttcttccatctaagcgtatgtttgtacccactaatcaacctctcttcatctctcctccccctacccttcccagcctctggtaaccagcagtctgctctctatcttcatgagatctactttgttagcttccacatctgagtcagaatatgtgatatttgtctttctgtgcttggcttctttcatgtaacataatgtcctccagtgacatccatattgttgcaaatgacaggaatttattctttgcccagctaattttttatggctgaataatattcctctctctctgtctcgctctctctctctctctctctctctctctatatatatatatatatggatgtttcaaaaacaactgcaatgtgacatatatatatatatatatatatatatatatatatatatatatatatatatatacagggtctcagtcttttgcctagattggagtgcagtggcatgatcatagctcattccagcctggatggaactcctgcactcaagtgatctttgcacctcagactcccaagtagctggtactaggggtgtgtgccaccatgcccggctaatttttgtattttttggtagagacagggtcttactctgtcacccaggctgttcttgaactcgtggcctcaagtgatcctcctgcttggcctccaaagtgttgggatttataggcatgagccactgtgcgtgaacacattttctttatccattcatcctttgatggacacttgggtttattccatatttccgctgttgtcaatagtgctgcagtaaccatgggagtgcacatatctcttcgtgattgattttcttctttcttggrtatctacccagctgtggaattgctggatcatatggtattattattattattattwttwttwttttttttttgagatggagtcttgctctgttacccatgctggagtgcagtggcacgatctcagctcactgcagcctccgcctcccgggttcaagcagttctcctgcctcagtctcctgagtagccgggattacatatatgtgccaccacacctggctaatttttgtattttcagtagagacggggtttcaccatgttggccaggctggtcttgaactcctgacttcargtgatctactcgccttgacctcccaaagtgctgagattacaggtgtgagccaccgtgcccagcctttagtgtaacttttattgaaaaaaaattccacgtataagtggatccatgcagttcagaactttgttgttcaagggtcaatgtaactttgaacttgtctctcacttttaagacattaaataattttaaattctaatgacaaatttaattttaagtgtattgatttaaggcattacattacaacttttgacaataataatagtaaactgccagacatttccaagtttcatggcaatatcgtccttgaaattgtattgaaaagcagggaaaaataagtttagctactatacagtctcagttacttgctttaaacattattttgcaaaacagtacttttgcaaaacaattaacatggtttatgatgggctacaaaaaaaggacaaattaacttctgaaaatgattcaacagaagctagacttaataaggaggtaattgaatcactgcatcagccagatgaagtatgaaatgtgagtttttttaggtattctgtgcgatttaaggcttagcagaattaaaggtagtgacaagtagaaactatctgatatatcaatgactaataacaatgttgataattttgataggtgatttttattttgtgtcaagtactgttctaacatctttacatatgggccaaggattggattgtcaaatcagactgacatgragtggagatgttaatcaatattaagctttccttataatttcaagaatacaagcaatcaaaaggctcagaaaaagcagagacatgtctgggacattgagagaggcccccggatcctttcttactgcaatagacaaaactctgtggcccaaagcagtagatgaggtccttaatgaaatatatgagttattagcagggagtgttacaggctgtgaaacatctccgttttatacccagatagttgcaaagctcatgccctgtgcccagtgctccatgtcccataaatcttgagattctcagtttgtttatcatagtaatcctaattcaggggcagtctgctaacagctttttatgggtaaatagtctttttttaaattattaagcaaacactgttagtatttttgccagctattggcgtgcttacaaggaggtttgaccagattttttaccttctttttttttttttttttttttttttgtgagagagcctctcacccaataggagaaaaacactgctttaactctttctccccaacaaattaactcatttaaattcaattaatttttttagcataaacaagataaaatatatcaagaaggaatttaaaacattgaaacatcagatcggtttctaaaaaatcttttatttttagtttggttagtaggcattggggagagaaatgcactgagaagtatatagtaaatataaatawtttcctattaccaacagatattcacaatagcaatttattttattaactttcttgtgtgtatgtgtctgcacagttaatagacaattcttttttctatttcacattagaagatttgagaaatcmtatgattcttttaatgtttaattatttcttctttctcaacccaaccttcaaatcagaatggagatccagttcgcccaggagtagctatgactgatcttgccactggcctrtatgcatatggagctattatggctggattgatacaaaaatacaaaactgggaaaggactgttcattgattgtaacctrctgtcatcccaggtaacaatccaactaacatttcagataatgttataaaaactgtgtctgggttataccttttcagatcaaattctatggtcacatgtacaaaaacaatacaaaaaccaacacaacaacactgaaaactgtttcattttgatgtacttgtttcttttcttttttgagatggaattttgctcttgttgcccaggctggagtgcaatggcgtgatcttggctcactgcaacctccacctcctgggttcaagcaattcttctgcctcagcctcctgagtagctggggttacaggcatgtgccaccacgcccggctaattttgtatttttagtagagatggggtttctccatgtcggtcaggctggtctcgaactcccgacctcaggtgatttgcccaccttggcctcccaaagtgctgggattacaggcatgagccaccacgaatggcccatgtacttgttttcatattaaaatacacggaccatgaagattttgttgtaatgtagacatcattgttgaacccaaattttccaggctgtttttactagaatgtgtctgttgcttcttataagacaagagatatggttgcttcacatgtactctgtaacttactttgacttgtttcttcaccttttatgtgccacgaacccctttggtagtctggtgaagtctggacttttccttgcaattgtgtttttgaacacataaaataaggtacttaggattacaaaggaagctggttatactgaaatatattcaatggaaaaatcaattttgcattattaaaaatatataatttttactaacacattaaaccacaatatctaatagtgggtgtaacactattataattttgaagtcatgttgagcataagtggtatttcatggtatctgtagtaattgtaatatgatacaaagatatgcataatatttattcgtgatcaagtcataggtaccactaatattcttgtggtttgtcacctacatttataatagaataaaatgctaaattttagaggtgatgaaaataaagatacactttttttttcacttgagttgattaactcccagaaatctgtttatagaccccagataaagaattcctggtttccgtagttatcagttatgttgtgctaaatactaaactgggggaataaaagggttaactcactgtcaaaatgacattttgccttcttttcactggatcagacccagatgctgtaccatatgtggaagttgattctgaatagataatttttccgtgatagaaaaagaaaatatctgatttgtgcaaggagacattttactgtgggaaaaactactttctagacatagagaccccagttgggaatttcagatttaaaaggcatacatgggaaaatagtaaacttggaacactgctttggatattttttcctcttaggcaaaattaaggaggtatatagaaataaaaaacatcaatatggttgaaaatgaaatactatgtatgggtttttacataacagtagcttcgagtcgtggtcagaattttaatgtttctataaaaaggtaaaagaactctgttcaaatgagtggtttcactccttaatagagaactacagatgttagttatgggagggtgcagaaagtcttttcttcctctaattttaagctgtaaggaacctgaggtagggtaagcaactgcataaaagttgcacatccaataagtttggaagccatgaaggtttcatgggtgtgtaatctgtgcagtcatgggtagccctgggcttagttaaatgttctgctgtcactgtcttgaatttgttaataacatccacaggaggccctatagtttttatttacaccagtactcacaaattatgtagcaggtcgtggagttgagactctacttaagtctcctgatttttacctaggctgctttactctaatgtataaagagtattgtattatttagatgagtatcatagagtttaattcacttctagcatctaactagtggttcaccatgtgaaggtgtgtatttccctgggagtaagggtggggaaggtggaatcaccatagggctgcttcaaagtgagggcacagtgacggcaaactcatgcatatacacacaggtatatagtcaatcatttttggggtgtgcatgtgtgtgtgtgtgtgtgtgtgtgtctgtctgtctgtctgtgtctgtgtctatttttattgtctctgtttctccctgagactaaattctatgactgctggcacaatgtttttgtgtaccatggtatcctcaattcccagcccagcctttgtcaaagattggcttttccaatcctttgaggtcaatgtgagaactactgttaccagtgggaatgtctcrtaacccttaggtttgccaaggaagatgtgaaaagatagtaaatcattagaattatgataagtactcgataaacagctaatgatgagattatttgcttttggcaaaaaaagtagcagtgatttggcctattgtactacagttaactcagattgctaaaattagtgtatttcagtctcattaactatctttctttttttctttttctgtcgcccaggctggagtgcagtgatgcgatctcagctcactgcaacttccgactcctaggttgagcaattcttgtgcctcagcctcccgagtaactgggactacaggcgtgtgtcaaaactcctggctaattttttttttttgtattttttggtagagacggggtttcgccatgttggccaggctggtcttgaactcctgaccttgagtgatccacctgcctcagcctcccaaagtgctgggattataggcgtgagccactgcacccagccagagccactgtgctgagcaagagttctgtttctttattcataaattctattaggtgatggtcttttaaggcaaagaatatgtctcttcatagacttgctacagctgccccattcagaatagcttctgggctgtgagtagtggttagagaacttcaaaaggcaatttaacagataatttgttctttttgktattattattattattattattattattattattattatactttaagttttagggtacatgtgcacaatgtgcaggttagctacacatgtatacatgtgccacgctggtgtgttgcacccattaactcgtcatttagcactaggtatatctcctaatgctatccctcccccatcccctcaccccacaacagtccccagagtgtggtgttccccttcctgtctccatgtgttgtcattgttcaattcccatctatgagtgagaacatgcggtgtttggttttttatccttgcgatagtttactgagaatgatgatttccagtttcatccatgtccctacaaaggacatgaactcatcattttttatggctgcatagtgttccatggtgtatatgtgccacattttcttaatccagtctatcattgttggatatttgggttggttcgggcaaaggatatgaacagacacttctcaaaagaagacatttatgcagccaaaagacacatgaaaaaatgctcatcattggccatcagagaaatgcaaatcaaaaccacagtgagataccgtctcacaccaattagaatggcaatcattaaaaagtcaggaaacaacaggtgctggagaggatgtggagaaataggaacacttttacactgttggtgggactgtaaactagttcaaccattgtggaagtcagtgtggcgattcctcagggatctaggactagaaataccatttgacccagccatcccattactggttatatacccaaaggactataaatcatgctgctataaagacacatgcacacatatgtttattgcgatactattcacaatagcagataatttattctacagcttacctgaagtgcaaggcaatgcctggtaagaactttttcactctctggatttgctgcatcctgagctctgtttttctctgtttgcctctgctttattccttgtctctgtcctccctttcttctcatgtgcccttctctagcctggacatctcttttctcctttttttctctctcatctttctttactttcctgttttcctttctcctctatgctcttgaccttcttccctctccctcccttttatccatccttccttatgtggaactaaggttttagcagttttggtttcagatcttacattttttttttttttaaaagagatacggtctcgtgcttttgtccaggttggaatgcagtggtgcaatgatagctcactgaaacctcgaactcctgggctcaaacaatcctccttcctcagcttccctagtggttcggactacaggcgtatgaccttatgcctggctaatttttgtatttttttttttttttagagatggggggggtctgactgtgttgtccaggctagtcttgaactcttggccttaagggatcttcctgccttggcctgccaacatgttggtattgcaggtgtgagccactgcatccagccagatcttaccagatcttacattcttataccgtattattccaaaaagtttcagaatcttacagtagttcccatgagagataaaggaagttccctttcctagaagtcccagaaaacaagaacatgatttcactggtttaagggaccattcctaaactgataaatggggcctgaaagatagaatacactgagtggcataagcaattcctggtactagcgatggggttaactccayccaaactgtgtggctgagactgggggacaggtgattcctccaaagaatggcatggttattttttggccagaaaagagggaaatggatgttggggaagcaatctacaaatatttactatgctaatgtagagggttgtttttaggatctaatgcaatgaaggatgtgaaaaatactttgtaaatcagaaagtttaatgatgacaacattaattttattaggttattgaaaaaatacttcagtgttagtaatgttagattaaaaagttggctaataacataattattttatcataattatgataacgtttcataatagataaaccttgactgacttcaatttgtctttcaatttaagataacacttataaattctagatctaaaaaccaaccacaacatgattaaaatctgctttatgtaaataaggagtgctatttgtaggtacttttcaaaaaagcgtaacaggaaacttcacctttttttaaattaaaaaaagtattctttttaatataaatgttcacctgcattaagtaggtaacatttgaatttaatttcagctgcgtgagaatgaatacaatttcatgcagtagtaaaaaacacattttcctactcattttgattatattacatagaatgatgaatgattataacattgaaygttagttgctaaaaatgaaattgttatattcctcttaaaagtgatctagtgtaaaaaagacaatttacacctgattggaatagtagctaattattaactcagaaatgattgcctcagccacaacaaaaccatttcaagtagttccttgtagagacatgacaattgccaggatgtggtttgtagtgggcaccacagtttttatagttttaaggctataaactttcaacccttgtcaaaaattcttttgatttttttgtctgaatatgatttaaatttgtccagtcaagacaactaacatcagcatctaaacagtgttctttagatgatattggtaaataacaaggaagcgggtttggatgtggttctgcttattctgttgctctattcttctgttgtggcctacagaaatatcttttggaagttttaatgtccttactgtacttaattgcaaccaggctcccttaattactactacaatgagttagtttttttagmaccataattatttgcatatatagaatatattgtcacttttgatgtgaccatcctttactcacacatgtacattgatcatattacatgaacatattcaagtagaaacaattttaattcttatcattttgactgataaacttttgaatctcaagcaagtaatctaaaattcattgttttgtgtccttagatatacctgtgtttctgcttttttaagcaactctgtatcatttttttaaacaattttattgaggtatatattacatatcataaaaatgacaacttaatgattttagtaagtttagtgggttatgtaaccatcagtattaatcaggttttgatgagtacccgtattgttacttctggtgcgggtcttgcygatgaggctagaatggacgagttttgagtggggagagatctgggactaggctgacttaaaagaaggggcccattatgacttccgtgggccctgggaacttttgcctttgtgggttctttccttcataaaaatattaaaaattacattctataactgcattggtataaagatgaagataattcattattctgcatttattattattacactctttttttctgatttgaaatgaaatgaaaattgaaacatttttgtgtacccctaaagtcttgtgggtcttaagcattgtgcctactgtgcataattgatagatcagctctagaagaattaccttgagaaaagcccgtgaatgtacaaatctgtgaggaaagcagttgtgtatctgggaaggaagtagagctgaaagctgagattgtgttgaagcatgagtataggatgaaagagtagagaggcagcacagtctatgactaaggaaattaagagaactcctcaaagggagttttgttttttcttcctttaagggagaacgaaaaatagaaggttatagcagaaagttgggtatgatactagctgtgggcttgtaatatgtagcttttattgtgttgaggtacattccttctatacctaatttattgtaagtttttatcatgagaagatgttgaatattgctaaatgctttttctgtattcactgagacaatcatataatttttatccttcattctgttaatgaatcsaaagcagtctcaggtgaaaaacacaaagctggaggcattatacttcttgatttcaaaatataatacaaaactattgtaatcaaaacagcatggcattggcatgaagacagacatgtagaccaaaggarcagcatagaaagctcagaaataaatacacacagttacaggcaattgattttttgtttgtttgttttagatgtttttttggagacagggtctcaatctgtcacccaggctgtccagtttagcagcataatctcactcactgcaacctctgcctcccaggttcaaatgactctcctgcctcagcctcccaagtagctgggattataggcacaaaccaccacacccagctactttttgtatttttagtagagacagggtttcaccatgctggccaggctgttctcgaactcctgacctcaagagtgctgggattacaggcatgagccaccgcacccagcctgaatatccagttttaccaatacaatttattggagagactgtactttccctattgtgtattgtggcacctttgtcaaagatcaattgactggccaggtgcagtggctcatgcatgtaatcccagcactttgggaagctaaggtgggcgaatcatttgaggtcagaagtttgagaccagcctggccaatgtagtgaaactccatctctactaaaaataaaaaaattagccgggcatggtggcatgcacctgtagtctcagctacttgggaggctgaggcacaagaatcgcttgaacccgggaggtggaggttgcagtgagctgaggttgcgccagtgcactctagcctgggtgacagagctagacgctgtctcaaaaatactgaaaaaacaaaaacaamaacaaacaaacaaacaaacaaaaaaaccaactggatattcagatgcagaagaatgaggttggacccttatcttacactatatacaaaaatcaacttaaaatggattaaaggggccagtgcagtggcctgtaatcccagcatgcaggagtatcacttgaggccaggagtttgggaccagcatggccaatataatgagaccctgtctatacaaaaaaatacaaaaattacccgggcatggttgtgagcacctgtcacaaccatgtgaggctgaggtaggagaattgcttgagcccagaaattagaggttacatagaattatgagcatgccactgaactccagcctgggtgacagagcgagaccctatctctaaatgtaaataaataaataatatggattagagactgaaacataagatctaaactgttagactatgagaataaaacatagggaaatagcttcttgacttttttttttggtgaagatatttggatatgagcccaaaaagcacaggcaatgaaagcaaaactagacaaacaagattgcatcaaactaaacagtttctgcacagcaaagggaacaatcaacagagtgaagagacaacttacagaatgggagaaaatatttgcaaagcatatatctgataaggrgttgttatccaaaatatataaggaacccaaacagttcaccccattaaaatttgggcaaacgacctgaatagacatttctttctttttctttttttttttttgagacggagtcttgctctgtcacccaggctggtgtgcagtggtgccatctcagctcactgcaacctctgcctcccaggttcaagacattcttctgcctcagcctccaaagtagccaggattacagctgcgggccaccatgcccagctaatttttgtatttttggtagcgacggggttccaccatgttgaccaggctggtcttaaactcctgacctcaggtgatctacccaccttggcctcccaaaatgctaggattacatgcatgagccaccgcgcctggccagacgtttcttaaaacaagacatacaagtggccaacaagtatctgagaaaatgtccaacactatgaatcatcagggaaaatgcaaattaaaaccacaacctcaaacttgttagaattgctattatcagcaagagagataataacaagtgttggtgagggtgtggagaaaaaggaacccttacacactattagtgggaatgtaaattagtatagccgttatggaaaacagtatgggggttcctcaaaagaattaaaagtagaactaccatatgatctaacaatcccacttctgagaatatatcaaaggtgaggaaatcagtatgttgaataaatatatgcattttcatgttcgctgcagcattggaatcaatctaaatgtaaataatcagatgaatagataaagaaatgtgttatatatatgcaatgtaatttggtttagccttaaaaatgaagaaaatcctgtcatttgcaacaagacatatgaacctgcaggactaagtgatataagtcaggcatagaaagaaaaatatcacatggtctcgtatatatgtggaatctgaaaaagttgaactcatagaggcagagactagaatggtggttgccaggggctgggggttggaggtgggggcaggggaagatgatggtcaaaggggcaaagtttcagttagatgggatgaataagttctggagatctattgtacagcaaggtgactagagttaatgtgtactttaaatttcgtaagagattagatcttaaatgttcttatcattaaaacacaagtatatgaggtgatgaaggacaggcatggtggcttatgcctgtaatcctagtgctttgggaggctgaggcagatggatcacttgaggtcaggagatcgagaccagcctggccaacctagtgaaaccccgtctctacyaaaaatacaaaaattagccaggtgtggtggcgggcacctgtaatcccagctactctggaggctgaggcaggagaattgcttgaacccgggagacagcagttgcagtgagctgagattgcaccactgcactccagcctggatgacagagcaagattccatttccaaaaaaaaaaaaaaaaaatgaggtgatgtgtatgttaactagcttgatttagtcatctcacagtgtagtcatagatcaaacattatatgtactatcaacatttataattttattttcaattaaataaaaaatcatcaatttaaaacattgggaaaaaaaaggatctgttgttaagatgaataattaggaagttaaagacaaaccaaaaaaggaaaaatcagatttcttccaaagaagtaatgctattggttaggttaaatgcaaattgacttcaatacaaaatatggtttgttgtcttcttgaggaaaactgagcgaaatataagtgaattgggaacatgctctggttctgtataactgaagtcattagttatattcatgggcattgcatatttttatatgatatgaactacaaatgaggaaaatcaggtcttcaacttgtgataattgataattactagtgggagaatatcccaaaggaaaaaagaataaaatggggagaaatgttttatggtgatgtaacttaattttcttattagatacttcaaaacactttggagctttcaaatgttcttaaacaatagaaaaataattaagttcaagatataaaagaaatagaaatggaaagatctattgatgttaacatgtatttcctgagtttagattttgtccttggagaacctagtagaatcatgaatttaatggactattcctaaagctgtgtttaatgatatcggaatcatatatattgtctactttcagagttagaacaatttgtttttattactaagttaattaatttcacctttatctttgtactttctcaggtcagggaattttaaattttatttatttatttatttattcttgtttttttcttttttgggggggggcaagaattttatttagaataaaatgttgccatcgtgtccttgtgtattggctaatcaatcagtggtgactatttacccatcttaatttatggaccatgtctgtaaactagatcatgtctctttggtcccaactattatgccatcattgtagctaaatgataaagaaaccacctgcatcaagcattgtggcgaggtgtaattctaggaaaattactttagttcttcacagaatgggtatgaggtataacggtgagtacttttttaatgtttataattggtttgtcggctagagtcattatataccagcaatgataatcagaccttagttacctggagagcttagcaatctaacattatggttgatttcattttctagatgaataatagttaaaaggtagctgctttagtttaaacccttgtcagagaaattcttctaaaatgctttaatttacttttctattgtgatccattccatatgctaaatatattttcacctccaagggtattattctgatctaattccttttacatattgatattcacttaggaagtaagaaattaagttgcrtctgtacaaacagaatccaaccatccatccctgctcctcatctattatgtgccagagtatacaatgaatgatagataagccagcaagtttcttgcctcatggaacttttattgtagttggagatatagacaacaaacaagtaattagtaataaatgtacattaggaaacacagggtttgctaaagataacaggggcacttgtgttaggctgggtaggaaagattactttaaggagttaaaattgcggggatgagaaggagccygccacaggactagccaagtcaagatactctcgcctctctcttaggagaacccctttttttaagtttcattaggcccacatggataatccaggataatctcccatctcaagatctttaatgttatcacatctatgatgttccccttaccatgtaaggtggcatattcataggttctggggataaggacattgacatctttggagactattttcagcctaccacaggtggtaataaggaaggagaaaagggtagacatagtagtggttaaacattgtagaacatgtgaaactttcttctgcttcaggcctttgcatttattgtttggtgtgactgactgaaagccttctactagcagttgtgattggtactaaatctggccatttcttcatactcacgtgaagaataaacattgggtgtggcatttcaaataataaccctatgtcctatagttagtaggtccattcaaagtaaggaatcagtaacaggctgttttttgtttgtttgtttgtttggctgggaaagagggactttcttggcaggacattgggccaagcctgtagagccggagttgactactagtgttgttttggtggaatggtagtagaagcaacacaagactgcagacagctttaatctttctgtcacttggaccctgactggagggtggtattgagaaggttgacatggcttctggaaaagagtgccgtgattattatccttgcctgctgaggtgcaacactgggagggtgctataagtttgctgatcttggcataggtgctgcattacataggctgtttatattctctaaagttgaattattgtgatcagcattgagcgatagaacttaatgtgatcatatattcattttttttaatcttacaaccttgctggactcattatttagttctaagagtattttagtggattctgtaggatttttcctgtgtgagattacatcatctgtaaaataagatagttttacttttctcctctccaatatgaatgcattgtatttctttttcttgcctaattgccctggacagaaatccagtacaatgttgaatggaagtggcaagagcaggcatccttttcttgttcctgatctcaaggcaaaacatttcagtctttcaccattatgtatgatgtaactgtgtttttttccttgatactcttttttttttttttaaagtcaaggtctctgtctgtcacgcaggctggaatgcagtggcatgatcatggctcactgcagccttgaactcccagtctcaagcaatcccccacctcagccccctgagtggcttggactacacgcatatgccatcatgctcagctaaatttttttgaattttaatagagatggggtctcagtatgttgcccatgctggtctcaaactcctgagctcaagtgatcctcctgtcttggcctcccaaagtgctgggattacaagcatgagccatagtgcctggctttccttaatactctttaacaggtcgaggaagttccctccgttcctagtttactgactgtttttatcatgaaagagtgttgaattttggtaaatgctatttctctgactattgacatgatgatttgttttgtgtcacttatcccatttatatgttatttggttattgattgattaacaattgacattgatttttgtatattgaaccaatttttcaacccttggaaaaatttcagttggtcaagttgtatgatctttgtatgtattgctgtactcagtatgctagtatgttgctgaggattcttaggtttatattcataagggatattggtctttacggtctgtagttttcttatgatgtttttggtgtctgagtaacatttgcctcatagaaagagttgaaaagtattccctcctctccttgcttttggaagagtttgtgaagaattagtactaatttttcttttattgtttggtagaattcatcattgaagcttaaaaaaaaaagaaaacaaagcctaggttgttcccccactaaactttaaactcattctgctgaattttgtggttgccaggctgctagtatttagttactaatgaggctgttggttctcaagcctggtagaagtggatgttaacacagcaagttaagatgtcacaaagcttgccggtcttattaaaattcagggtttttttttcttggataaaaactcatcagttattgcaaggctttagttaatttccagagttttcaaaaatttgattttgggaatttttgccagtgttcttgttgcttttatggcagaaggctttatttcatcttttttgagtgtgcttattaccgacacctataatttaaaattccctattagccccattaaaaaaataaagaggaacagatgagattaattttgattatatattttattcaaccaaatatatccaaaatattttcctttcaaaatgtaaaatttgtataaaattaataattattttacttttttcttatatgatgtccttcaagttttatatgtagttgtacatttacaacacatcttaatttggaatattgccatcaaagtctcaatagccacatgtgggcagtggctattgtaatggctagaatagtcttagaacacagaagaatgggctgatgctttgaaatttcagtcttttctttcttccttccccactcatgttgaaagtgaaaaataatgtttaaccactactatgtctctttcctccttccgtattatcacctgtggtaggctgaaaatagtctccaaagatgtcaacgtccttatccccagaacctatgaatatgccaccttacatggtaaagggaacatcatagatgtgattaaattaaagatcttgagatgggagattatcttggattatccatgtgggcctaatgaaactaaaaaaaaaaggttcttgtaagagagaggcgagagtatcagaatcattacaatagtctctccttacctgtgggggatacattttaagatccccagtggatgcttgaaaccatggttagtaccaaaccctataaatactgtgtttttttcctaggtatgcatgtataggagttgaacaatatggtaaaatatttgaatatggcctaatttgaacaatggtaaaatagagcaattgtaacaatatattataatatctctcaacaaattaggtattgatgggacgtatctcaaaataataagagctatctatgacaaacccacagccaatatcatactgaatgggcaaaaactggaagcattccctttgaaaactggcacaagacagggatgccctctcccaccactcctattcaacatagtgttggaagttctggccagggcaattaggcaggagaaggaaataaagggtattcaattaagaaaagaggaagtcaaattgtccctgtttgcagatgacatgattgtatatctagaaaaccccattgtctcagcccaaaatctccttaagctgataagctacttcagcaaagtctcaggatacaaaatcaatgtacaaaaatcacaagcattcttatacaccaataacagacaaacagagagccaaatcatgagtgaactcccattcacaattgcttcgaagagaataaaatacctaggaatccaacttacaagggatgcgaaagacctcttcaaggagaactacaaaccactgctcaatgaaataaaagaggatacaaacaaatggaagaacattccaygctcatggataggaagaatcaatatcatgaaaatggccatactgcccaaggtaatttatagattcaatgccatccccatcaagctaccaatgactttcttcacagaattggaaaaaactactttaaagttcatatggaaccaaaaaagagcccgcatcgccaagtcaatcctaagccaaaagaacaaagctggaggcagcatgctacctgacttcaaactatattacaaggctacagtaaccaaaacagcatgctactggtaccaaaacagagatagagatcaatggaacagaacagagccctcagaaataatgccacatatctacaaccatctgatctttgacaaacctgagaaaaacaagctttgggaaaggattctctatttaataaatggtgctgggaaaactggctagccatatgtagaaagctgaaactggatcccttccttacaccttatacaaaaattaattcaagatggattaaagacttacatgttagacctaaaaccataaaaaccctagaagaaaacctaggcagyactattcaggacataggcatgggcaaggactacatgtctaaaacaccaaaagcaatggcaacaaaagccaaaattgacaaatgggatctaattaaactaaagagcttctgcacagcaaaagaaactaccatcagagtgaacaggcaacctacaaaatgggagaaaattttctcaacctactcatctgacaaagggctaatatccagaatctacaatgaactcaaacaaatctacaagaaaaaaacagacaaccccatcaaaaagtgggtgaaggatatgaacagacacttctcaaaagaagacatttacgcagccaaaaaacacatgaaaaaatgcttgtcattactggccatcagagaaatgcaaatcaaaaccacaatgagataccacctcccaccagttagaatggcgatcattaaaagtcaggaaacaacaggtgctggagaggatatggagaaataggaacacttttacactgttggtgggactgtaaactagttcaaccattgtggaagtcagtgtggtgattcctcagggatctcgaactagaaataccatttgactcagccatcccattactgggtatatacccaaaggattataaatcatgctgctataaagacacatgcacacgtgtgtttattgcggcactattcacaatagcaaagacttggaaccaacccaaatgtccatcagtgatagactggattaagaaaatgtggcacatatacaccatggaatactatgcagccataaaaaatgatgagttcatgtcctttgcagggacatggatgaaactggaaaccatcattctcagcaaactatcgcaaggacaaaaaaccagacaccacatgttctcactcataggtgggaattgaacaatgagaacacatggacacaggaaggggaacatcacactctggggactgttgtggggtggggggaggggggagggatagcattaggagatatacctaatgttaaatggcgagttaatgggtgcagcacaccaacatggcacatgtatacatatgtaacaaacctgcacattgtgcacatgtaccctaaaacttaaagtataataataataaaataaaaaaatatatatatagtaataaaagttatgtgaatgtggtctgtctcagtatatcattacaatatgtactatgctcacctatttctagattgcagttgaaagtggaaagtgaaaccacagattagaggggagtcttatagtttgcgatgtgataatggtagcaagaagttgaagtgatttgaggaatgaggtcacacatctaacatatgcactcagcctctagaagcttaaagaggcaaggaaacagattctcacttgagagcctccagaaggaaccagctttgtcgacaccttgacattagcccatgcggagtgatttcagacttctgacctccaggattataaaataataaatttgtcttgttagaagccactaagtttaggggcaatttgttacagcagtaacgggaaaccaattcwccaccttagcaggtggaggtggctacagacagttttggttttatataccatatgtatatacatacattctgtacaaatgaaggtctttatcagttctgattcaagctttacattgctggtggagttgtacttatttttaatttcagcagttttatattttaggtggattttcatagggacaggggattaacacattgttgagagacaattgtaagaaatttcagccttgctctagagtctgtattttttaaagttccagaaacactgtcttcttggtgggatagttattttcagttcaatcagttcttcctgaaactgaaccacacttacaggatagacgacaattcagatgcattttgaggttttctttaaaggaagcggcagacacttaaagcatgatttgaaatcatgtaagtcattgagtcctttatgaaatgatgatttcctttccaccagacagctctgtaattcttttatatctttgattctattgaactcaagccaggtcacaatagtaaaatgagtacattctccttttgccttctgctaagtctgtaggcccagtttgagtttgaaatttgtacttcattaagtaaagacatacttttaaaattctgtgactgtagtttctggtgcggtatagtcagatatgttttgtcaggtttaataatgcactatcttatcttgtaagcccctgagggaaaatcaggtgcatccatctttcagtcttttaactacagaagctcttgacttgagatatcagctcaatgaatctgaaatttagtttattctgatacacattctacttctgtattttctaactatccccaagctgttgcagattggtatgtaacgtcatgaaaaaaaccatattggtcacttcatcatattatttaatgaaaccgatctagaagacaggttcagagctgtatttagagcataagttttctgtcaatggaggctggaattaatgatttgcatttttgtttgtttaaaagtgttgaaaactttttttttaattgtatgtagtcatatttggtaatgagaatttttctgtgtttataccatacttaagatttttatggcagcttgttaggtcttattgtcactatgaaaaagtgagtattaaccattttgttgttgttgctactgttaaaagtctcaagttgagtgtgctttgacgctcaggaggactcaacttggtctctaagctgtaccttggtccttcacaacaccagtgctcaacgttggctgcccattggaatcacctgtggagttttcagaatttctgctgtctctttcccatccccagagattctaatttaactggtatagggcatggtctgtgtactgaggttttaaaaatctctccggatgattctgatgggcagcaragtttgaaaactgctgtcccacagaataattcatgaacttatgatgtataaaagtaccagtgagctttttgaaaaactgattcctgggcctcacacgcaagcattgagatccactcagtctggggcaggattcaggaatctgcattttggagtagcaccccagataactctgatgcagtagacccaggggttacaatttaaaaagaaagtgtgttttagggtaaacctgcaaggtgtgtctcttatgtagagaggcttcttggatggttccactaatactatcatttgatactcctaaaattaaatggcattgactttccccaaataatttttaatcaaaactgaagttgtaattgtagcaactttcttggcttgtctgggggatagttctgtacttaatgtctttgctctacaggctacctcaggacaggggactaaaagaacatacagtgatttagaaagagcttttttttttgtttttttgagttggagtctcgctctgtcgctcagactggagtgcagtggcacaatcttggttcactgcaacctccgcctcccagattcaagcgattcacctgcctcagcctccctagtagctgggattacaggcacgcactatggcgccccactattttttgtatttttagtagagacggggtttcaccatgctggccaggctggtcttgcctactcctgacctcaggtgatccgcctgcctcagcctcccaaagtgctgggattacaggcttgagctaccgcgtctggcctagacagaactttaaggcttgataactgtgtggatacaatgaacacaactgaggcaacgaagatatggactaagtgaataacagcagcttacctgtgtaactggtagtctttaggagtgtttaggagctcttcatctgaagcccttgtcctgaaaggaagcagcagcagagagggacattccaatggccatagacatgaacctcaagttagattccgctggtcacatattggttccagagtttacataccagtcttttaaatcatattcacttcccatagatgcgttatgatgatgaagatgatgatgatttgagacggagtttcactctgccacccaggctggagtgcagtggcattgtgatctcggctcactgcaacctccgcttctcaggttcaagtgattctcctgcctctgcctcccaagtagctgggattacaggtgcccaccaccacgcccggctagtttttgtacttttagtagagatggggtttcaccatgttggtcaggctggtctcggcctcctgacctcaggtggtccgcacacctcagcctcccaaagtgctgggattacaggtgtgagccactgtgcctggccctgttgatgcattattaatctcggcactttgaaaaatgaaaatttaaaagctagcttagctgtcagttggaaaatatgctgcgcaaaaagcttagattctgaagtagttctgtggtgaagggcattgttaaattaaccagaaactgtgttttattagtgtacgtgcaaatcatttacacaaatgattgaaatgtgtaacagatatacagaaaatagagacaaagtcttatctttcagtgtttcttcattatgactgtaaaagtatggagcatagtactttttcacatctttaacaaaagaaattcatattagaaaaaaatgccaaaatgatacaaatgtataatttaataagtaaattttttttttgcatttccactgcttagtgataactactatgaaaagtttggtaagtgttttagaaaaaaaattacatttaaagaactcacagggtaggtgtggtggctcacgcctgtaatcacaacactttgggaggtcaaggcaggcggatcacctgaggtcaggagttcgagaccagcctgaccagcatggtgaaaccccatctctactaaaaatacaaaaattagctgggcatggtggcgcacgcctgtaatcctagctactggggtagctgaggcaggcgaatcacttgaacctgggagatggagtttgtagtgacctgagattgtgccactgcactccagcctgggtgataaaggaagactctgtctccaaaaataaacaaacaaacaaataaaagaaaaaatcactaatgaatgtttcttgaatttcttccagggacataaataaatattttcttttagtggtataattggccataatgttgtggcttcggatgaaaactaaactttagaatttagttatgtcataatgtaaacattgtctgtatgagaattttgtaaaaataattgcctatttaggtgcatagataaattttgcattttttaacgcctgcccagttcttctccttacacccccttatctctcctctaccatatgcttaattgctgcatccgtttctttttggaggttctgtagtgtaggtgctgctgatggcagaactagtcatgatttactttgccatgtgtagggcaggtgctttcagccttaatcagtgactgtttctgaactctgcaaaacacactaattgaaaagtcatgttaggcagcacaaaagtaccctatatgatgataatatatccttgttgggcgactgagatgctgttaatagtttggatgccttaagttagtagtttgggttggtcttgtctgaatttatatacttaattaagaaatagtggagaatttaaatgtaaggtaattttgtgcaagtcataggaaaataaaagataggttattacttatgctagtttcctttttttatgtgaaaattctgaattgcttattgaaaagactaaagttaaatattcgattcccttgcagaagaggatgaacacgtgcttcacctactttatcgctggatggcactgtgtgctcttgggctgccctacaaatgggatctctttggtggtcaaaatgttgtgtacccatgtttctggagaaggctttttgtgttcttttctaatgtttgtaatagcacgtgttacttgttgtcaagtrcatattacattttatattgtagttattagtaggagaatattttaatttcaatgcaatgcaatttttttttcccttataaggcaaaatctcagagagagggggaagggagagagacagagtgagtgactcgtgtgtgtgtgtgtgtgtgtgtaattaattttaagcttattgttgaattaacttctctctccatttggtaaccttcctgtataggcctctagggtagtggttaggaaaaccttagtctctctttcgtgtgtgtgtgagtttgtgtgtgtgtaattgatttcgagcttattgttgaacccacttctttctatttggtaaccatcctatataggcctctagagtagtggttaggagcatggactctggagccaaactacattgatttaaatcctcaatatactgctaagtagctatgaccctcaagcaagtcatgaaatgctctatgctttagtttcctcattcactaaatgggaataataatagtgtttgcctccaaggattgctgaggattaaaatgaattaatttttgttaagttcttatggcagtgcccattacatagtaagcaccaaataaatgttagctttatgactatattattattaccactaccttagtttctcctttttcttctctttccttcagtccctcttctgtccatgttcaccttattactacattccttagccatgcatgtcctgccctaggagcccattggttgcagcaaagcctgatttttacctaaagcgtttactttttgatagtcttgcaattatgatgtcttccattatgaagtaagagtcttactttgctactacttttttttttwaatttcaattagggtaatgtacatgttaaaatacttcaaccaaaattaaatgaaacatgctgatggcgtatttcttattgtaaacatccatgtgaagcttatggattctggctgattcgtagagtaggcagagaactgagataacatgaatgttcaggaaagacctctttkgtagtgagctgtgatgcaaatctgatcattttgaggaaaagtactccagtgcacattgacctctttcgctaaaagagatsttgaggtaactgacgtccagacctttagcattaaattggtgaaaatcagtacactgaaacaaagctcaacatgaattagtacagccagcacatattacccactacagataaaactgttattctctttttttgggtcttgttttgttttgggttctatccacaaactgctcttgactctaaactacatcatttcctgaactttctaatgtattctcaagcatgtcctatatacatgaaggatgtcaaaactcagagacgaaatttttttcaagatgattcataacaatggtatttgaattttgtccctgcccaaaatttatattaagaatctaagaagacacatgatattgttttcctccttctgttttttaaacatagcctttttttttgtctcatgtaacctcaaaacatgttcatgtccttcctttcctttcccttccttcccttaccatcctccctcccttccttgcctcctttgtgtttccttaacctttttttcttgaagttagctacaagccatgcatggctaagtaatgttgaccttataatttggggactaggatagaattccaaatacttgttatttttgagtatcttgatttaaaaaaaaaaaaaagatcagtcaccatgctaaagtaggcctgaggctgaaagtgaggttagtgaggggaagaggaaggaagacagattttttaaagtggtgcattgggatagagacttcttatagttgctcatattgcatagttttaatggtggaagtgattactgttaggacagtgtcaagaaatataaaacccattgatgggaactgttttaggaacttccattggtctttgttctttcctcaattttgtcatctgtatttgttcttaggaccttggaagtggtttttgaacaataattttcttttagtgggtaggactatgaagttcatgccccaggggaagagactgatacgtgcaatcattattgtcgtgggaaacacagacctatatattagaacaggatacactgcagtcatttgtgtaggaatccacttaagatgacttgaaagagaattttcctgaccactatcatgtctggcttcatgttcagacattcttactgaaatactcatttaatcagaggtttctcttgtgaaggaattttttttttttttgggtccaggttttcaagagttccgtcaaatatctgtataaggtttttagacaaatgaagaaaacctgcttttgagaagcaatgatggctttttcactagaaataaaaagttccaggttttatagtttgtttcttaaaaatatatgattaaataattatcttctcttttaaaaaatttgttttttgctgacttcttactttgtgayttgaaatgtatgttacagtcttcttttgtgcttgaataacaatggtttgaaaaggaacaaaaaggcttctaaagatggtatttcaatttgtccaacagtgttcaatttaagccttttattttttaaactttcaaacaagcacagtgacttgatttttttccccatgttatcatctaagagtgtgttttgaatgtgtgttttgaccgtaaaccaggagttgcaaagtcaaatgcttaactatgccagacgggtaattaaaataagtgaactgagtcagacgaaaaacaataggaaatggtgatggatatggactaaagagcccacatcctgtctgaggagagagtcactactctctccagcatgtgctaccacgtgacattgtgatcccagtgcagtggtgtgctggtaaatgtttaacaactggctcattaaaacaagaaaaacaacaacaacaaactgtcacaggttgcatttgccaattctcatggtgtaaacactcccacatagctaatttcaagcctctactatgattgtcactgcacatgtttagaagagatactaataattggctcaatgagcaagtacaagctagctgcagcacaccactagccccagtgtagccaggtttgcaatttttgaagaaaactgatttttttatataaaatctcttgggttttaaaatactatgtaggccaaaaaaaaaaaattaatgaactaaatcatgcttatcagttgccaatttataatctctgacagtaaactgataatacttcttggaaatcttattagaaatcaattttgctattttatagtcaaactgcagatgtctaatcaatggtttcactggtattttttggaatcaacaatttttttatttttatttttttacacatgaaaatgtattgctatcaacagtgttttaatgtatgtttaatattggtataaggtaaaaattagcagttcagaaattattctttgattaattagaacagccagtatacttggaatgtctaaaactgactaaacctggcttgccgtctaggggggttgtttttcctggatgcattatttgtgttagtgaaagatggaaaatgtcagtctaatttattgaaattataaaattgttgtatagcaaaaccctaagtaagctgttttgtgtgtattcccttggatgatatttttaaaattatgttttacaattcttcttacttttgagtatttctgaagcactttttacgatgttaccctgaagtcatacagacaaggctgtgaggaggttagtgctattttgtaaacttgactcaagatacaggactttgctgtacaagggagtgtaatgagggctgagctgagactgggtctcaggcctgttgaatcagggtccaaattccttttcgccagactgctgaggatgtaaaaaagattaaaaaattctgccctcttcagaactgtctagccctccaattgtggttaaagggtgaatggaagatatggctaagataacgatcattgttggatgaatataagaattgacacaacaaagcagagtgcctccttaagggttttatcatattacagtcttctcacatataaaacatagttgtgggtatgttagaatgcagatcatatgcaaatgtgctgaattagggacatatgagtatatggatatatgatatagtatgtcatcaaaggctgattgtgttagtgtacctttgaggtctcttcggggtgatgctgaaaagcccaaacatgtctatagcttgcagcttagatcttaaaagccatccagtttgtgccatgtggtctgttgatgaggagttctgactgtaatgtaagttagtgaatttctgaaatcagtttccttgattttattctctggtgagatgcattagtaaacagaggaacaattatccaggtgtttgtgtgtgcagtgggatattctcagtgttcctgttcctrtgaagtgatggccataaaatggcagttatatttaacaaaagcattttgtatgagtttggggaagaggcaaggaggtgtgaaaataacacagttgtcatgcaaactcatgtttgaagtaagtcttctaggcctgttttcaatcagactgtatccctcaactcctcatgtcactgggtattattattataatctcagcatatcgtccctctaagtcactgggttttatagtgtttagtgtgtgtcttttacactagactgtttttccatgaggacagaaaattcatctcttttcaccattctgtctcagcacctagcacggtgcctgaatgaagtaataagtatttgctgaatgaaaacaatgtgcataccagatttttaaaactttcaaataaaacagcattaatataggagaatataaaatgtgttttctctcacttgctattcttcagattgttttttaaatcactgagtttgtttaattaatatagcaatccttggcattatgtacctgtattctttacatgaatttttgcttgaagcgtaaacacgtaacaagtattttacctgctggatcatttggtcactgaaatcatgcatttcttgtcctattccacacctggctttgcacctttccctggaactcccatgagatagatcactttaagaagagtcatcagtaaagaacttcatcatgtactgtgtagtctagtgagtctcccctgttattttgggaaccattccacagaagctcaagagagcagtgcagtgtgacatggccagagaaggactgtgccagctgtgcagtggatcatacaagtaatcgtcagattcaccattacattctgggattttggttgatcagaatgatcagatgtagggagagtgtctaagttcatttattttgatttcatgctgggacttggttcatgagcttgtgatatgtggggtagctctgtaacttaatagttctaagaaaatgcctgaaattccactaagagagcttcattcctttagttgtagagaaagcttttgaatctttattaattttttattaaagtctgtgtagccctggaaagggtaacatcatgaataacctttacttgattccatttttggtgatgtggctgtgcatttccactgttgttctatttctttcctctttcagtgccaaacttcatatgttattagtatttgaggtttctgcttcctacccactaattattttcttaatgctttgcattagactgtacactcccatcctgctactgataatgcctttgatatacattcaacactcttccttctaacactctcctcctttggcctttagacatcacaccacctgttattcttcccacctgttttttttgtcccctccttggttgactccagtggtctgcccttgtcctctgctttccctccaattatccagtctagtcatccacttcagtggctttacccttgtgttagttttctgttgctgcataacagattatcagaaatgcartatgaaaggtgccttccaacaacacaaactatgattttatagtttctgtatgtctgttgtctggtaatggcttagatggagtctctgctcaggtcttaaaaggctgccattcaggtatctgctggactgaatttctcagcaggacctcagaggtcttttccaagctcatttagattgttggcagaatacagtttctagagctcatggaggttgtgggtttcaaggccaacaggagcatgactctctgagcttcaccttcctttaaaagttagaccaggcccactcaagataatctcttttttgacgaattcattattaactgattacagacataattatgagagtgacgttgcattgtacaggatgtatatgccagaggatgggactcttagtggccatcttagaatcctgcctaccccaagcctcagtgtagataaccactaagtattcatgactgtgtctcatcattattcagggctccagtggctggatggcaaccactcataggcatctccacctggacatcctatcgacacctttaaataaataccccttccccaaacaaacaatcccactctattctagcatatttcttcaccaagaaagccattttttttctttttcttttttttgagatggagtcttgccctgtcacccaggctggagtgcagtggtgcagtctcggctcactgcaacctccgcctcccgagttcaagtgattctcctgtctcagcctcccgagtagctgggattacaggcgcctgccacctcgcctggctaatttttgtgtttttagtagagatggggtttcatcatgttgaccaggctggtcttggactcctgacctcaggtgatccgcctgcctcggcctcccaaagtgctaggattgcaggcgtgagccacctcgcccggccaagaaagctgtttctataaagtaaattcacatttcttgtaagttctgggctaaaaacattggaactctctttgtaacttcttgtttattccctacagtctgttcccaggacttgtgattccatcctttaaatgtctctcagatttgccatttcttctcttttttttttgagacggagtcttgctctgttgcccaggctggagtacagtggcgcgatcttgactcactgcaacctttgcctcccaggttcaagggatcctcctgcctcagcctcctgagtagatgggattacaggcgtcagccaccgcacctggcccatttcttctctttcacactgtccataccttacaaagacctgtgcaagttagcttattgccttgtgagaaaggggaacagtctaaggaatgcctacatgcattatattccatacttccatcgttttgtgccacctctctccccgttttggaggggataatacattattgaatggtgttggctcatgcctgtaatcctagcactatgggaggctgacgtgggtggatcacttgaggtcaggagtgtgagaccagcctggccaacatggcaaaaccccgtctctactaaaaataaaaaaattagccagaaatcggctaattgaactcgggaggtggaggttgcagtaagctgagatcgtgccattgcactctagcttgggcaacagagtgagactccatctcaaaaaaaaaaaaaaaaaagaatgatgttgaagaaacagtaacaaaagagcaccaggacataaaggcaatggtaatcagaactagaggaaaatgtgacaaatagrgaattggagagggtcctagaataaccagacaaaggatgtgaagcccttcccagaatgaatcactcctatggaaggaacagccccttgggctccacgaaataatgaaagaaatctgtagaagttagaaggaagtagcctttattcaacttgtttgcttttgatatgcctagtgctatctcatggaacccattggtcaccccatttacaacagactcaccccactccctattcctgggccaattcttttttttttaatttaaatttaaattttttcatatttaaattttttatttttttatttcactaggttttgggggaacaggtgtgtttggttatttgaataagttctttagtagtgatttctgagattttggtgcacccatcacctgagcagtgtacactgtaccaacatgtaatattttatccctcaccaccccccaccctttcctgcaagtccccaaagtccagcatatcattcttatgtctttgcatcctcatagcttaactcccacatatgagtgagaacattggatatttggttttccattcctgagttacttcacttagaataataataataataataataataataataataataataatccaggttgctgttaatgtcattatttcattcctttttatggctgagtagtacaccacataaacagaattaaaaacaaaaaccacatgattgtctcaatagacacagaaaaagcatttgacaaaatccagcatccctttataattatgattaaaaccccaagccaattctgacttcagggaaggtttgctatttcttttctctacccatctgtgggtctttagcatcatcatgcactcaattttagccccacagggtcttgctccctgaagattccctcattgttccttaagccacctttcctcctttcttcaccctgaatacggggcctcagtccctgacattgtttcctaactcagcctctatgtttatccatctggtatgtggggaaggaacaagtgggcttgggctttgtcacttcagtgggcagatccactgaacaaggcaaatttcagcctgaccttctcattctgtggagatgcttttctactattgtagctttctgtgggaattgtacctaactttcctccttttctcttgagcatttcttctttaaattcttcaaattagaggaaagcagtgttattcattcatttttgagtttaactaatagttactgattgcctacagtgtgtcttgggagtgttcctgttgtggagagagagcaggaaacaaatcagacaaatcctttgcttcctgaagcttgcattctagcagacagagatccagaagacaaaatgacccatctgagtgaatgagggaagagttgactgagagatgacatttcaaaccataatccctcctcttctactttttttctcattgtctccatcttgcttagaactccacatcttcaattattcttttctcttgtatatgtagatgaactccagttatttttttatttttatttttttgtgacagggtcttgctctgtgtcctaggctggagtgcagtggcatgatcatagttctctgcagcctcaatattctaggctcaaacaatcctcccttctcagtctcctaagyagctagttctacaggtgcacaccaccacgcccagttaattttttttttattcttagctgagaagaggtcttactatattgcccaggctgatcttgaactcgtgagttcaagcagtcctcctgtcttggcctcccaaagtgatgggattataggcatgagccactgtgcctggccagttattttattttatttktttacatcctcaaaaagaaaacctttattctttctgctcaccagcttaagctatggtctggtatctctcctmtcctttttacacaagctctgagatacccctttggctctcacattgttttcattcattcctttgcccccgttaatctggattttgtccttgctgctttgttgacactgcattttaagaatcatctgtgatctcctggtcattaaatttaatagcttgtctcagtttttattctcaatacttttccaaacatgtgactgtgaccacaatattttcctactgggaaggccctttcctttgtttttgcatgactaaattctctttatcaaaaaatgttagctcgaatgccactttttatcccttcttgattttttaaaaatgtctyttgtagcattgatcatttctattctgaattataaataataaattaacctttctgagagatgaaactgttttattgattttgggatctcccactacacttaacagattgccttgcatataataattacttattaaatatctgttaaatgcatgaagaaagtaataaacacaagtaagtttcatgtcatttttagaacttttcaaaactagaattgtagaataatgtaatattttattctacaagcagaaatattttgaatatctgttatctaaaatgtaaaaaagtatttgaagaagacacttgaaactgaagacttgctatcacaggaataaataagcacactctgtcattaaatgttgtttttctacatttccacttactcatcacattttgtttagttgttcataaccactctttgagtcatgtgattgactgggtcagtggttcatggtaagaaatatgtttgatgtattattctcaacatgcttttgaaattctgtctctctttgctgtctggtcttacctctggcatttgatatccagtttcctcatatgtctgattttgattcatatggattgggaaaattattctcagtataatgtggatctgtttttcttttgagttcataaataaaataaacatcagtatgatttgactgctgttaatgataattcagaggaatgttcctttcrttaagttaaaaaatgactatgaagagaataattccattatgtgttttttctttggtaagtaaataaaagtagagattttaaaactatttaacaactctactggttttcaatgtttacaggtaaaatatttatgggttgaagtttatttctaattacattgcagtgaagccaaaccatatttgcagcaaagcagaaaactttgaataagtactgcattatgtattatgtaataattaaggtcaaatttatatgtagaggttcacctaattggaaaggatgctcaatcactattttttctttaccaagtagtaagttccaactaaacttttccaggttcagggccactcagaaattttgagagaagtctgattctgtatctagtgtagaatgccagaaaccaggctaggtgagttcagaccctggcttgtccacttactaagcatataaccttgggcagattatcagactactcagtgcttcagttttctcatctctaaaatggggtcatcatagtacctctcccataaaattatgatgaggtaattcatgtaaatgagataattcatgtaaaatgcttagaacagtgtgcagtaagtgttagctttgatcagtcgtaaatactagaaactgataaacgtggtgcagatgggtagaatactgattctccttttaacatggcatggacaatataccttatgtactctggagtcttttttcctcctcaaccctagttattctgaaaaaatctgttcaccttatggtgtgagggagaaagtgaagcaagttaaattgcaaggggagtttgacatgtaaagtaacagtattaggttaaaaagagagatgccagaaactcaaaatctctttctgaggcgaggtcaaatttttcttcttgaaagttgtgttttctacgaatgctagccccttcatttctcttttagcattttgtccccataagatattttgtagttagtaaatgagtgaggttgagcagaaggatgtgagaatttattgatttagttaacagtgtgttttctaagtaagtacaggggatagtagaggacttctagtccattccattgatgtagggggacttgcctggaatataaaatgtgaagccaaggatacaaccaaagatacaaatgtgaaactactcactactcgggtgaaaggggcagggagcagaaaggctgaacagagaggagttagtggcttagggatggtgtagagagtacagtgacctgggtttgggtcaggatttttccattcgtcaactatgagacctagttgacgaattaagtattaacatacttaatctccttggtctttagttttttcttataaaatgggagttgcaatgtgactttatttgctttcattcattgcctgttcatacaccataatgaccaggtgatttaattatagaaatcaacrccttcctatgacacttagaataatatctcagatccttacccaggcctgcaaggacccatatgatatggcccttttacactttcctgacctcatcttgtactactgtctcttttacttactaggttccaactccaatgkctctctttctgttcttcactgtatgtaagctttttagcatattaaagtcttctaactggttgatctcactgcctagaaagatttcttctaggctgggcacagtgactcatgcctgtaattctagcatttgggaggcccaggcaggtggatcacttgaggtcaggagttcgagaccagcctcgccaacctggtgaaaccctgcctctactaaaaatacaaaaattagctgggcatggtgttgtgtacctgtaatcccagctactggggaggctgagtcagaagaattgcttgaacttggtaggtggaggttgcaatgagagattgtgccactgcactgcagcctgggcaacagagttagactctgtctcaaacaaaaggaaaatttctcctagattttcacaggccttctccaggtcttaagttaaatataacatcttcaaagaggcctctactaagcccattagtttaaaagagcactctctgtgattctgttgcattttcttcatagcacgaatcatttcttgatattttcctgtatatgtctgaatgtaccttaccctagaatgtaagcttcatgagagtaggactatgtctttctccttccctgctgtatccccagtatctagagcaattcctggcacatagtaagtgtgatatcagtgtttttttttttgtttgtttttgagacggagtctcattctgttgcccaggctatagtgcaatggctctatctcggctcactgcaacctccgcctcaagcgattctcctgcctcagccttccgtgtagctgggattataggcactcaccaccatgcccagctaatttttgtatttttagtagagatggggtttcatcatgttggtcaggctggtcttgaattcctgacctcaagtgatccacctgccttggcctccaaaagtgctggaattacagacatgagccactgcacctggcctaaatcagcttttaaataaaagtatggaatgaataaggtgctgactgacactgaaataaatatttgctctttaccctaaaactcctattctatttatgctttcctataagactgggaaaggaaataggaagatgagcccatagcatcttatattgtcacaaagtaagggagtgctaaaaacaaagcccacacagcgatgtgtggtgtgtgagagagagggacacaggtaccaatggagagaggtcctaatggccaaaactggaataatttgatcaacaacaaaaaagtggtattgaattataaccaaaaaagtattaaaaaaaaaaaaacacatgaccatgctgatttaaataaatgattgaataaataaataaataaagggagacaaatgtgtgctaaattctaaataattatgtagatactccaccctccagaagcaggaccataactttctaccccttaagtataggcttatgtagtgacattcttccaaagagtactgtatggaaagggggaggaaaaaagagyaatcttacagcagagaaaactgataaacactacctcagccaggtgatcaagattgattgttgacactgtgtatctttgatatgrtatgttgaaattggtgctgttcttttatggtctttcttttaaaacctcataactccagtctaattatgagtaaaacatcacaaaaatcccagtcgaggaaaattctacaaaatacctgatcagtttcctcaaagctttcagtgcataaaaaataaggaaagtatgaggaactgtcacagcgaaaaggagccaggatgactaaatayggagccaggatgactaaatacaatgtggtatcctggttgggatcttggaatagaaaaaggatatgaagtgaaaagtcaggaaatctgagtatgtgggttttagttaataatgtgtcaacattggctctgtaattgttaagaaggcactccactaatataggatggtaataacagggatactggacgtggagtagatgggaattctctgtactatcttggtttttctataaattgaacaatgttctgaaatacaaagtttatttcagataaaattcaaataaaatgttatgaatatttttccacatgatgctatattgttttgttgtgtcatttaagtgcctatttatcttctattgttatatacagatgtcatagcttatttaaaaccacccattcttggcatttaaattggctctagtagtttatacctacatctttgatcatccctttggtgatagaggaaggactgtttttgcatggaaactttatcttctcttgtttgatattatttccgatttcttctcttatctctctttccccttaggttaggacttttaaatactttctataggctgctgagtcctgcctaattgattatatcacaggcatctcaaattcaacacattcagaggtgggctcttattttcttttcgcttcaattacttctctccctgatttccgtttttctgttaaggctgtcatagtttacccagatattcagcaggactgtgggagttaagtttggtttctcctctctgtcaccattctgtctgcatcctctgcccatacaacctttcacatgctctgtctgttctgttcttaaaatatatcttaaactcatgatttttccatgtctactgctaccaaccttgtctgagctatctatcatcaaattatgcctggacctttacaatatccctaacagtcccckttctctcttgcctcttcttagttcattctttgaatataattacaaatgtgggggatccctatgggttttaaatagaagaatgacgatacaatttgtgattgttctgaaatgatcattctgcaagatgtgcaaagaatggctccttaccrttactacaatgactggcatgctgtggcctctgtctacctttctctttcatttcgtttcagtctctttctcaccatggtttagttatatttgtcttctttcagttttgttctttctctatgccaacccctttcctgcctttgagctttcgcacatgttactctttgttttccagttttatcttccatcttctttccccatggcaggtcctataattctttgtttagttattttctttactattccaaagaaggcaagactatatcttttttatttccttatgtatacttagtacctagagtaaagccttacacattagcaacactcagtagttgctgaataattaaacaagtagtaattaccattttcattcatttgttaaaaaatagtgttcaggatctgtgttaagtgctatggaaacacacaaagggtttaaaataaataagtcttaccttgaaatagctccttatttaaaaggagggatagaagaacatataaataatattgtagcatggaggaaggcaatgttgttggagtaaagttctgttattaaccacctgtatgtcctcacataagttttttttttttttttgagttggtcttgttgcccaggctggagtgcaatggcgcgatctcggctcaccgcaacctctgcttcccgggttcaagcgattctcgtgcctcagcctcccragtagctgggattgcaggcatgctccaccacgcctggctaattttttgtatgtttagtagagacggagtttctccatgttggttaggctggtctcgaactccygacctcaggtgatccacctgcctcagcctcccaaagtgttgggattayaggtgtgagccactgtgccaggccaagttatttttattytgtgttcctttttgtatccatctggatattaaggagtttgactagactcttgtaaggctatgcttctcaactctggtgtgccattaatactacgctggtgaaatttttttttccaartttccatccctgaaaaacctgattcatttggtatggggtgggttctatgaattccataggtgactggggggatgcatgggtaggttaaggaagtagtgacctagctcgttctagctttgacatcttacaattctaattgtagtacaaggaagactgtgaaagtgcagtagraatcagataaattaagtgttgtattcattcgggggcaggaaatataatctcttgcttgctggctgggattggggcttaatggaaaagatgatgttgaaatagactttgaagaataggtggaaatgtgggcaggtgggtgattgcatggttggtgttcagttcaccttagctgtaggccagaagacatgcaagggaagtgggggaaaatgacccrttttgatgcagtgaaccatggttctagtcttgtttttttcattttacctgtcacacttggttgtccttttggagatgaaagattgtattattgmagcttgatcctcattcggtggaagtggagcatgtggtgacagacaccatgcgactgctttgagagataattgggcatattcttcctcaagccttttggggctttgctctttgagatccattttgaccaccccattggttttctggttagaaacaaagaatatcaggacccactctgttatctaaaataatagtttgctgtcagaatgattattattaaaccaaagttgacttttttgtttagatgaaaccataaaaaggcaacattctgagtaaattatatagcgtccacttgatgaaataataagcctaagtttagggaatgaaagtaatgatctaatgcagtatttagaatgcatatacagtatatagttattaaccaaaaagtcacatcctgcattcttttaatttgtgcaaaatttgtcattaattgcccaggaaacctctgatttttttcatacataatcacatcatagctattgactttctctcccttctcctgccttaaaatacatccctgtaaatagtagattactttcagattggtaataccccctttaaacattgagttgctaagtttagccatgttgctctctttcttaaaaaatagaattcttttttccccaactttgtctttgagttgttactgacaaatcacactttggtttttttgtttgtttgtttttgtttttgtttttgttttttttgagactctgttgctgaggctggagcgctgtggcgtgatcaccgctaactgcagccttgacctccccaggctcaggtgatccccccatctgttttttttttttgttttgtatttttagtagagacaaggtttgctatgttgcccaggtgggtctcgaactcctgggctcaagcgatccacctgcctcagcctcccaaagtgctaggattacaggcatgagccactgcgcctggcccacactttgttttttcatggcaattggcttaaaattttatttaatccttctgcccaatgtgagcctgctaattctgaaatgctttttgttttcattaactaccactgtatggaggaggaaatgtatatagtattctacttgcaaacagtttgagagatgaattctgattcttcattcaaactcattctaaatggggcaggtcagaaacacagaagtcaaaaactgaaaagaaagaataagatagtgggtaaggaatgaggcagccaagctgatatccagccaggaatccagttcttccctatccctggcaactatcttagatcaatttaggatttataagttggcctgtgatcatccagccacctcaccacctcatgtagcccttgatgatgttggtctattgactttgaaattagagaagtagaaataacaagccttttgtgattgactacttgcacagaataacctttactaatttgaattcttggccttcagtagcaacagagccccttagagagtgacattcgccatgatttatttgaatgaaaaaataaataaaaagaataacaacatagctagatctgaaaagagacctgagaagtcagaaaatgtctccaatttcaggaaggggtgtcaagggaaataactcctattgcatcccttgtgtctttttttttttttttttttttttttttaagacagagtttcgctctcgttgcccaggctggagtgcagtggcacgatctcagctcactgcaccctctgcctcctgggttcaagcgattctcctgcctcagcctcccaagtagctgggattacaggcatgtgccaccatgcctggctaattttgtatttgtagtagagatggagtttctccatgttggtcaggtctcgaactcccatccttaggtgatccacctgcctcggcctcccaaagtgctgggattacaggtgtgagccactgctcccggcccctcttgtctttttatctgccagattgttaagaggaataatagagcccgaagtgtataccacatttgccttgtaagcacgttgaagattacttactattttgcaaattgtgttttgtgttcattctgcctgggtggtgttgcaggactgcttctgcttcatccagagcacttgaaatattatctgcttacatatttatatattagggtttcatgtattatttggttgaatacgagggttctgcttttttaaaaaaaatttgaaaacctttggtttagctgaaatgcccaagactttatagagaatgtatcagaagatcaaagaaggtaaattacatacccacagtcatggaactatttagaggtcaacagagattagaaaccatctaggtttcaaccatccatgtctggacttcctatccagggcatttttgctacaaaatgttgatttgattttccattttgaaagacacagaagtgatctgtgaaatggtgattagcactaggcggccccaggcagccctggaatgctccatggttcaaatgcccaagaccagatggaagtctagaastggatgactcaaagtttattagttttgccacctgggctgtacagccaaaccagctgccacaggcagttccaattttgacagagcggtaaatgaacataaaagtgagtttaagtcccaagaataaagtaaaggagaatggctgcagcagcaaggtgattcatccaagctgagtcctgttgatatttcttgtaggaagcacagctgctgtgctaggtagggggcaagaaaaggcctgaaaaatcatgccttgagttgttccaggagccaatctcaatttggggtatgttttaatgacaggcttkgtaggttttccaatcgcatctgacgatctagaaagggaaaagcaagccggtgctatatcatgattatgtcatgtggcctgaaccactttttattcttttctggaatccatggaaaatcatttgatcacctcctttccatagttctgyggtggtggagccataaatattcattggaacataagatccttgtggcagatcaccaggaatcaattcattatcttcatattatcgtcatattgagttgaactattgtagatttgtcaagatctgtccatgaaatactacagtagtcagaaattgactctaaggttttggatgacccctttaatagatcggcagttctcaaaaattgaatcgagtatgacagtgagcacatggggctaggaacaaattgggagaagtacagtaatgtttctttaaatgaggatgatccactaattaattttaaaaactcaaataatcttgatcttttctgtcagaatgctttgggcagaatgtaacagaaaacctggctaaactgacttaaataaaatggaggtttattattattacttttctgtgtcatcagaaatttagaggaatgtggttcctggctttggttcatctactcagtgatgacacaggctctctttgtgttatcttggtgcaaaataaaaggagatacatgcagaggggaaaaaaatgcacgagttgctgatgtatattgccatgggtttgaggataaaggccagaccacggttccatctgcttggtcaacctctgctttcagataatctttttaggggttgaacgtttatgtatttatatttctcaattgactattacttagtctcatgcaatagtgtaatgccgttcttcatttgtgtgataaaagtacaatgcctgtatattttctaacttgatggacaggtttttttcttctacaatgagatgaagtgaaattactttcataatataacgttctctttatragtatagatwaactagctgttctattttatttatttactttttttcctggtaggtggcgtgtttgtctcacatagctgcaaattatcttattggtcaaaaggaagcaaaacgttggggtacagctcatggcagtatcgttccttaccaggtaagactacagcagtctagggttgggctgttgtaatttgcagttttatatgatgtgtttttggaaaatgatttctttttatacacaaatccttcagctgtttttttttttttttttttgtaatgtatctgtgtctggctataacaaggttctgttgttcactttaagttctgttttgcgtatttcttcatcagaaagagattagtaacaagacccttaaacagatcaaaggaacttgctgaaagtaagtgccttttgggctcrtatgatrgttttcttttttttttttcccacctaaaagaggcactgactgtagccattttataaagcatgatttgttaaccatgtcagttacaaaacaaatgttacctaccccatctgayaataatattctcacaggattgaagtaaaatgaaaatttgcgtgtgatggttcttcatttttggaacaaagcagatggctcaggagctgctgttctttattaagtgtcttaacttgtccttagaaattcttgactttggctagtgtaaatgaatatgtgaagtaactgtgatctttcaaaaataaaatttaaaacaaaacctagctcttcttccaatccagttgcttggtccagttgcactgtatgttgttgtatttattaatgtatctgcatatctcctgtactctattgcaaactcttaagagtagaggtgactttttcatcattgtatatcttctcacaatcaatggaagcacatgttaggtactatatacatatctgtggaatgaatgagtgaattttactggagtcatttcaatgttagtgctcttgggagaaaacaaaaaagtcagcatttttcatttgccaggaaattcatcaaccctgctaatcatccttttagctttaagacattatttccttgggcaaaactagtttcttttccattttttaaaatcggaatttgaggaaagcactgacccaatatgaacctgggattcttccctctctgtttatattcatggccctttacctgaggcattactgtgatttcactgtagcactgcttttcaacacattgagttgatctttaggtgtaattacagttgtggaggtgttttctccagttcttcccctttgtctgcaccattcgttttatgaccaccattaatgacattttgcttctccacttcctagccctttgtgactgaccctatacttctaaccagacctgcttcatttcacagacgtcattacattgttgaattggttagagatcatcagatttagtctttttgtttttcagataagaaatctgatacctagattgggcagatgaactccaactgtggtgccctgcctccttgttgagtattctttcagattctgctacctttgataagaaaaggtgatttcagttcccttcatcaactctacccctatcaagggtctccatcaaacttgctcctaggtcaagggtctgatcaactaaatttatactcgtcattgataatggaggtctttctcaagggtattttaacagagaacaatgttggaatctatgggaaatcatctcaaataatggaagtctggctttcagtctttatttatttatttatttagagacagagtcttgctctgttgcctatgtgggtgtgcagtggcacgatctcagctccctgcaacctccacctcccaggttcaagcgrttcttctgcctccacctcctgagtagctgggactactggcatgtgccaccacgcctggctaatttttgtatttttagtagagacagggtttcaccatgttggccagactggcctcgacctcctgacctcaagtgatccacctgcctcgtcctcccaaagtactgggattacaggcatgagccaccatgcctggcctggccttcagccttttatgtacgtgaagaaagcattcctgagttggaagattctctagtgtaattccaaatcccatcacataggtaggtgttcactgcgttcaagcataaagtttatagtttattttttgctcatttaaaaaatggaacrtcattttaaaaagctttatatagacctcagctattccttctgggcatgtgcacctagagttctggcaccctgggtatgccctcaattatttcactatgtgttgaaaagaaattcagaatcttggcttttattttggaaagtaaaagacataggattttttttctctttctctctgtgtgtgtatctgtgtctgtgtttgtctgttcttcartgatagaaatgtacttttcctgttgaattgtgccattcacataaaatggatagtatacttatttgattttagttgattgcagctgtattatctrtaagaaataagaaatctaccaggttatttcctcaagagcccagaattaatttgtttcctcttcccaagaactagttcagcactgtgattaaggaataaatgcaaatttagctgaaatgaaactagcataccaagatgggtcctagatatgcttagagaccccggtctgttttcaattttaaaaatagattgggggaatatttttgtgggtgaatgccaggataattataatttagttttctgtaataattacagaaaactttgcatctaagttgagttgtctgagttttgggctgtctataatggaagactctgatggtcacaggagttacttgaggtgcctagctcactctcctccattcttgttgaaccctatctgaaagattgtatacctcaaatgcatggcatgtaaatttcagaaaagtagtgattcttgttttgtgtgttattttataagcatgcagttcttaacttctcagattgattatcctctcatgcccttttcttccctattctttggctgccagctttttaagattaagtaagttagacaaacgtagacagagctgacataattttgctacttgttgaacatgttggtggatgcttttctgagaattcagatatttatgtatttatttattatttatgagactggttctcactttgttgtccaggctggagtgcagtggtgtgatcatagcttactrcagcctcgacctgctgggctcaagtgttcctagtagctgggataccgagtagcggagactacagatacgagccacagtgtctggcaggtttcagatttttaaaaaaaagttttagatttcactgcttcttttgttcccatttctagtggaccctgccacagagaagcacttagcctaagggattaatagttacataatatttgktaatttttttttttttttgagatagagtctcgccctgtcacccaggctggagtgcagtggcgtgatcttggcttactgcaacctccacctcccaggttcaagctatgctcctgccttagcctcctgagtagctgggattacaggcataagcaaaaatgcctggctagtttttgtatttttagtagagatggggtttctccatgttggccaggatggtctcgaatgcctgacctcaagtgatctggctgccttggcctcccaaagtgctgggattacaggtgtgagcctgtaatatttttaatgcatagatatgtttcccagcccttaaacaattatacttaaagacagtaggcttttagagatgggagaggagggtgcagagaaagcagatagctggtctccaaaaagaatatattttattatgtaacatagttgtcagtggggccactgccctttacatacatggccaacatggtaattcttttaatttcatagcctgcatctatctaaaactcttgcccaaatttcttcaaccttctaggaaccttcattkccatgtcctcctttgtttgtgacccacactgacctctactgtctccaatatcgtagaagatccattcacaaatacactcacaaggacaggtgatactgaatatagtgggaaaaaatggagtttttatttacttattttaaaattagattttagagcatacaagtgcaggtttgttacatgcaaatattatgyagtggtgaagcctgggcttttagtgcagtcatcacccaaatagtgtatgtcrtatccaataggtactttctcctccctcactccccttccacctcccatgtttttgagtctccagtgtctattattccactctctatgtccatgttatttagctcccacttataagtgagaacatgcagcatttgacttgctgtttctttttcttttcttttttctttctttctttcttttttttttttttttgaagtggagtctcactctgtcacccaggctggagtgtagtggtgcgatctcggctcactgcaacctctgcctcctcggttcaagtgattctcccccytcggcctcctgagtagctgggattacaggcaracgccatcacgcctggctaattttttgtacttttagtagagacagggttttgccatgctggccaggctggtctcagactcctgacctcaagtaatctgcccacctcggcctcccaaagtgctgggattatggccatragccaccgtgcccagccatttttgttttactttgttttattttgacagagtcttgctctgttgccgaggctggagtgtaatggtgctgtctcagctcactgcaacctctgcctaccgagttcaagtgattgtcctgactcagcctcccgagtagctgggactataggcctgtgccaccatgcctggataatttttgtatttttagtagagacggggtttcaccatgttggccaggctggtctcgaatgcctgacctcaggtgatccacccaccttggcctcccaaagtgctgagattccaggcgagagccaccgtgcccagcctgacttgatgtttctgagttattttacattaagatcatggcctccaattccatccatgttgctgcaaacgatatgattttactcttgttttatgtctgagtagtattccatggtatagatataccacattttctttatccagtccattgttgacaggcacttaggtttattccatgattttgttattgtgaatagtgctgcgataaacatgtgaatgcaagtatctttttgagatcttgattttttttcctttgggcaggtatccagtagtgggattgctggattgaatggtagttctattttttagttctttgagaaatctctatactgttctccatagaagttgtactaatttacattcacaccaacaggctataagcattctcttttctccatgtcctcaccatctgttcttacattttaagagcagtgtttttttatagatgaaatgtacccagtcttacaacaggaggcctcacctttctaaccatatcctttgattgttaccagggagtttcactgttctgaatagcataagaatctccccatcttstgtctctctctctcccttctcctttctggcttcagaggtcccttgtctctcttctccttttcaagagcaatgaatttctctagtcttctatgagtttttatgctctctagtgcaggcacagtctttgtgcccacagatctttgggtagctaccactatactaagtgcttaatgatttagttttgatatacagtgaatcccttcccaaggggcaagctgatgtgaggatctaatagaagcccaccagactgtgtttctgatgagaccatctgtccccccagctcattcctttggcagcaggaattgagggagctcacagtttattgtgctcctggcaaaaccacaactccttcagctatagtgttgccctcatgacagggtaaattgcccaagaggccggtcttgagaataagactgtaacctttccttaaaaagactaccagagccagtcatggtggctcaygcctgtaatcccagcactactgatgcgggaggattgtttgaactcaggagtttgagaccagcctgggcaacatagtgagacctgtctctcaaataaaaaagaagaagaaactaggcatgatggcacaagcctgtggtcccagctactctggaggctgaggtgggaggattgcttgagcctcccacctgacttggaaggttgaggctacagtgagctgtgattgcaccactgtactctagtctgagtgacagagcgagaccctgtctcaaataaaataaataaaataaaataaaataaactactaccagaatgagtcccatcactccttatacccatttgcctcaattacaaccagaactccaaaccttttggccatctgttatcacctggacaattttcccatatggctctgttaatctctcttcttttgacccagtcatttctcctgtcatcagtcttggtggctgtaaaatccacatagaggacccttgcaacagtccaccctcttctttctttaacctctcctctcttgcagtgatccttttctgttctcacttggctcccactcccattcacttggtgtttctcaaagtttaaagtgcatgtgaatcatttggatgtcttgttaagatgcagattctgtttcaaggtgatgttgatgctgttagtaggagcactcagtttccagatctaaaatgcattattatcattatttttttagagacagagtctctctctgttgtccaggctggagtagtggtgtgatcatagcacattgcagcctcaaactcaagcaaacctcccacctcagcctcccgagtaatagctgggaccacaggcacacaccaccatgyccagctatttaaaaagttttttttagagacagggtctcatcatcttgcccaggctggtcttgaactcctggactcaagtgatcttcccaccttcacctcccaaagtgctaagattacagctgtgagccattgctcgcagacttagactgttattatcaatgactatagctttgcctttatactcaactggcaaaatcccagtgcggatagacttaatagttcatctattcctggcctgcagtcaagtggtggatatggccagaagaaaatatgctactttgctgatgatctccctcccaatccatggccatctctctcaagtggcccctcgggcttacccagaaatcctgccacctttacctaggtaatttattttctccccctctgagatgactacctcacatcttctcttctctaagatctttccatctctcctcatccttaaagactttgtctcttattccacttaaaattaatgcaatcaaaagagaactaccttatcttttctctactgtacctcccaaactcttgcatttgaacctatatatagatcactgcattccttcctgtcacaagagaggaagtgtccctttccatattttgcctaagggcattgcatctgcattttatgtcctctatcacctgtattatacttcataggataagcagatgatcatataaataaataaataaatatatatatatatatatatatatatatatatatatatttatttattttttgagacagagtcttgctctgttgcccaggttggagtgcagtggcgcaatctcagctcacttcaacctccacctcccaagttcaagcaattcttgtgcttcagcctcccaagtagctgggattacagakrtacgtcaccaygccaggctaatttttgtatttttaatagagatggggtttcaccatgtttgccagactggtcttgaactcccaacctcaggtgatccacctgcctcggcctcccaaagtgctgggattacaggcatgagccaccrcgcccagccagatcatagttttgaccttaaaaagcccaccaacctttctttgattcccaagcaatgtctttttcaaatcctatcctatttctatatgtgctactatacaggactcttccaaaaaattttgggtgattgctggatggaagccctctactgtctattctatgrtgtggtctgtgctttgcagaccaatgggagaccccaggagttcaggtggtatgcaatagctaggggtagttgactttctgagtagttcattagtgagaattcttttttwatgctctttcatgagcctttcartgggaattttcctttaaatggcctgataattcacatggtaatttcttctaaacttttcttctgaagtagcttctaactcaagaggttgaagaaaacaattatttacatgattaaataaaataacatcttccttgttccartttgggcttattcaaccaagsagtagagcaggaagctgtgctatgttatttctggtggggacattatactgtatatttaatttggcagaagcagagactcagacaggcagtaaattccaagtttgaagatatgcagtrctttgctatcattccttagaaaaatgtcaaagtgctgttaaatcatggcagattaggtaacattgggaatctttttctttttttttcttaaacacatgttaaggatttttttttwaaaagtcaaaatataaatgatatacatctgtctcttcttgtgtgactttctatttatttattttaccatagtcacactaaggcactaaaatgtgaaggtataaacaggcatatgattctatcacatgtttaaaataattgttgtattagtaataacagtaacaataatcatgatggttaccaacagacatgtactatgtagctgggagatatatgtatacatacatgtatgtatgtatttataaaatttttgcttattcttcttttagtttgatgaaagggaagcctagagacattaagcagttatgttctagaataaataggaaccatggatttaaggttttaaaacttgtttctgtttgtgaccagcctggccaacatggggaaaccccgtctctactaaaaaatacaaaaattagctgggcgtggtggtgcgtgccggtaatcccagctactcgggaggctgaggcaggagaatcgcttgaaaccaggaggtggtggttgcagtgagctgcgattgcaccattgcactccagcctgggcgacgagcaaaactccgtctcaaaacaaaacaaaacaaacaacaacaacaaaacaaaaacaaatttcttttctgactgtatccaaactaagctggatgcatcatggatgtgcgtcttttttttttktttktttttggcagattctagaattcttctaatctgtttccattatctctttaacaaatgtcaagtttattatgattctagtgggtaccaaacctaatagctggccttgctacagaagtatctttgaattatgagctgtagggcaagtgtaggtttccccctaccatggtttcagtacattgctttcaaatgactcttgacaaaccaattaaaacataatttcttgagtaccctgtggggtaggcagtgttttagtcctgaaagcctccaaatgaggaagaactgggcccttgatttcaagggactcaaaggcaatatagcagggaaagttgggagaacttgagctttggggtcagacaggcctggagaattaaaagagatcattgtactaagtgttttgtgcagcatctgactctagaaagccctcaataaaaggtggctcctgttattattggtgtgttgaactaataattatagcttttgtgaataatagtttctatgaaaatatgaaatagtctctatgaaaactacccatagaagcttaggggcagagtaaataaataaacagagctgaatttctttcttaaactttatgggatttttagcttaatttcttttcattttttagagaagaaaagagggcaacacgctgtggtaattttgttttaaaaaaactctttgtagaactttttcggaaattgtagccttcagctcattgtccaaatatagcattattaaaattaatagagtttgaggagaatcatgtatggcagcatcactcagttgttacagggagtaaggcttctagtttattgaatggtttaattaattgagattgggtatagattcatacttaacaaaaggaaccatgacaaaaatgattttcaggagtaatctctgagaagcccacaagatgggaacctacctttataaaaaatatatactcacctttgtaagagcaaaaaattgtggagatttctcttttggttttaaaaagtgaaggaaatagaatattttaaacacttgtttttatacccttaaaattgcaaagaatgtcgataatgcttacccattaaaaaatatttggagatttattgggaacgaaagagtaggtgatagcaaagacattagattacatttcagaggcttctacaaacttttgattaattagcactgaygagttagaatattcaaaagttggttttctggtaaattaaggcatggattgtatgaacccccagcccctttagttctaaagtttttggccaggtagcttttgaatatttgcctttgtgtatgccttgatccttacggatttgggattcttgttaaagcaagacaaaatcttttgtttgaagatcctggttactttggaaccagttggccaggaggttgccacagtctgaagaatataggtcactgggcagtccaggagcaggtaaaattaaggcagatgtgccagctgcggcataatagctgccaccctctgggctacttcttaggaaagatttggctgtctttgatttaaaacaaaatttctgaagttaacataaataaggtaacatgatgtccaagggtaactattgcacaaagaataaatgcacttacaactgttcaaagactattatgattttttaaactcagaattccctctgacatatagtgttttaaatgtgtttcgctaagaggtaaaatagaaggtggtgcaaggaaagtaaaagtagtaaatccctagttcctttaagattttttcggcttttcttgtattcttaatatatgtgcagaactaatgtgtttttatattttctatgcctaacatatttggctaaaattatctaaaagaatcaaaggccattttgaatattcagtcattagttctagtaatattatcttaatcactataataattatcagatgtaacatttatcaatgattactgtgttattaaatatcttacatatattaaatcaatatttaccacagcccttaaaatagttattgctattatctccactttcacatgtggaaactgaggcatagagagtttagataacttgtgcagggtcacaagaccatggtataactgggattctaactgaggcagggggacttgagctcattgtactgtataggcagatgatacaatgctgcatgtttagtttcattttctatctttatcctacttttgagaaataattatgtgaccttttcctctacataatttcccctttaggactgccaagagcaattcaagaggtataaacaattctgttgtttactcatcacagggatccttaattatgacttaaaagcaaatttccttcagaaatcaggttgtacatcttttgaataaatcctttggtcgcatatgctaaaatggtattaggwtcataagtaagtgatggtatagtgaagcaactctacctattaacagttccayctatttaatgagaacagtccttgagcaatataggagttggggatggttttagctgttgtgagactcatcgtttctagttttcaacctgtatttctggagtttggtagtgtggggacagagctgggatgggaaggaatatttgggacatgaggaggagtattccagggcctaaggagggggatagcctgggtagaaaccaagtagacagttttctaagtattcacaccccatttcaaccagaacaattccaccttctggtagttttttgaaacagggattccactgcttaaaactcattacttgtcctagatcgatcatcttgtactgaaggactttattgaacaagraagtgggttttgtacatgtgtatgtgtgtgtgtatgtgtgtgtatgtgtgtgcatgtgtgtgtatgtgtgtgtatgtgtatgtgttttggagaaaagagactgatttccttcagtgctggaaatcattgttgtcgttcctagaactgtggacctaaaaccaaagaatgggttcaaatctacccaaggtggaggcctaggtgggaagagtttgggtgaggcctggcatagctcctctttgaagggacacgcacattacctcgcagctaagagtctagcctggtggctctgtgtggaggtcagggctctttagctcaaataaatcacacaggactagtttatggaaacagttggattcgcatgtagttacatgtcctgttttgttcctaggggtgtccagtgcaaatcttgttgaaattctgagtagctgtgcttagcaccaacacagtaccctgatagatctcagttcaggtgcaggctgcctggggggaaaataactgagttctgatatggtaccaattactattatagtttaatattaggcaaataatataacaatggtagaaagcctgtaagatgttaagtacygaagtgaatctgtactggagacttgaacaaatcatgttgatgtataagtatggctgtgaaataggctgtttccttcttaagtttgcttctggcatttaggaaaaggagtactgcttcagggaccctgcccagacaggaaatggtacgtgtgcatgctgagtggtgctagtgaaataggaacattatacagaattatattaataattcatttggcctatttttcacctggraagtatttactctcaagtgccccctcctccttctcgcctgagggtgaaagcaggtgcgaaatgctctgggtcctagtgacactgagtagtctatggagtggcagcattggcatcacctggaagttagaagtaatagattcattctaatgaaccagaatctgcattttaacaagatgtgtgcacaggtgatttgttttccttagacccttgttgtcattctaatatgagtccactagatgtcactcttgtaacctggtaatgggacaggatttttcaatggggatttgcaagaatccctgaacatgatcatattattattagatgatttcctccccatccttacagctactgatatacacattgattatttaaggtaaaactatcattctstatggttcaaagtcctggagagagattcctgggaatgatttccatttttttggattggcactcctgcctactgtcttccctgttgcatgggttagtctgtcattatataacctcagcagagaatacactgcagatgctgtgacaggctcactgagagaacagcatcctgggcttctgagcacagcaacacagaataaacatacagatttgatctccgtagacattattgagaacagaaaggaagcaaggctgtatcctgaaattagcatcagcctctaagatgtgattgttggaggaagtgctgacctttctgagtgtgtgaggtgtctcaagggaagttttataaagaagattgagtctgcttaggaaataatgtcccaaatgtaatcttgtagggagttagtttcagccatgaaggtgaatatagggacatttacaggtaaagtaatatcctgagggagaagatatacatttagagatgtatgaggttcctaggaaaggtcctgttaacaactggttaggtctgcatattaggaaagaagggtgaagagggtaaggactatgctttagaagatccgattttttttttttgccggatgcctagcttgagaaaagttagttcttgaaagaaattacctgctggcaaacgctcctacctctaagtccggcatggtttttcctctgtttcagttaacaaggttagcaaacaagtcataaagtagcaagtgtttgtgtgtgcttgagtgtgttttgtgagtgtgtgtatttcctcttctggatgggggggcatttactttatatcactaaatgcgtggcaaatacttggtttgggtaatttcagccaagaaaatggttttattgatgtaaaaacaatacagttttagcttacatataattttyttttgttcaaataattaaggtcaccatagtaattacttctaagctttagggtcttttctaacatcatttattctgatgtgattccttatgaccagaaacagaattaattttgaagcattttagtgaaaatgaattttatttttctaaaacattatctaaaatttagataattttttgacttccctgcgccacattgaaagaagaagaattgtcttgggccacacataaaatacagcaacaccaaagatagctgatgagctaaacaagaaaatcacaaaaaaaatctcgtaatattgtaagaaaattcatgaatttatattgggcattcaaagcgtcctgggccacatgcggcttgggggctgcgggttggacaagcttgatttaaatcatggaaaacaagcctaaaatgcccattcctattcttaggcacagtctaaacatctacttcttcagtgatagtattttacacacccatcctctttactgctgaatttttttttcctttttcttttcacttgttgctgctgagactcaacttgctagagatagcagcacatttaggtgtagtgtttaaaagcatgcatgagctttggagtcagacagaccttggcacattgcttcatctcactgatccttaatttcttcatgtataaaataggtatattactacctggtgacaagtcacaggacagtgcatttaaaatatgtggcatagggtctggcacatagcatatgttcagtagccggtagctgtgactgccagtactacacgagctcagagaccgcargcctgctgctgttrtctttatctcccagctgataacccagttcatcaactgccaggagtccttgttcctataggttttgtccaccagagtggagctctgggtcatggagaagtcttccttttcctctgcctggccaatgtgttcatgacaatggtgtgggtcagtggggagcagattggtagtctggtagaggggcagggaaacatgtgaatcctagaacagtaactgggagagaagttccacactgagattctcaatgaaaatttccctcatggtgatcaagctcagtagaattgttagcaccgttagtgttgttagtatagccatcttacaggctgggccatttaaactgcaaatggcatagtcactgatttaagctttatttctaaagagaaacaaactcttagaagcaaaytgccaaattcttattgaatgtttgccacataaattccagattgtctgttctttattatctttattggtttggaatgaccatttttggttcagggaggacctctagactttgaatagctatgactgacaccttggggtcaccagaacattacttggttagcagcagtcttggaaaacaacttcaaggaagtctgaagagatctctcatcctgaaaacatcctagtaagaatctttgcacttccatcataaacagccccatggtttcgcttgataatatgccactgatgaagaatgatggagattctgatgtgacatcacctgtattagtagtgtgctgtctcaaatagaagaagaatacaatattaaagaattaagagcattatgtatcttaaaaataaactcatctttcttgttagacttttggaatctgcattggatttttttttttgtttttttttttttacatagttaaatttaagatatatttctagtcattgtttaaaatgcatctcaagaaactttagaaggggtgtggattgttcttttttgcctaccatgtcattcctgtttccattgtaggaatcaaatcagtaagttcagtcctagttcaaagaagctgggaggcagggaacaaaacttataatagtgttactgtgtagactgcaaaagaatctgaggtttgttcagcaaacataatggtgcattgaggtgttgcattaatgtggggggccagaaaatgagctctgtgtgtagtgaatctgttaagtggcagtttagggtttaacctaaaaactgggagaaagttgataagtgcagaggaagcatgagacccaatttgacacagaccttgctagggttatggtgtcaggcagtggagggagtagtgacaggagaagaggatttagtggtgtattggatgaaggtggtgtgttgggcatggcaaaatcatccatccatctagacagcaaattaacagttttgtagaaaygtatagyccccaagtatttatatgcatattagatacgtaaatgctaaaagcataaaaaaagaatggatagaatgattggtggcaagtaagtatcctgattccattttcctttcataatcttggtagaaggagtaaattagtagaaactaatggaaactactactgctgggttaggaaatctttaggagcatcagggttggatgaaatagtggaattataacattttatgtacagaatgatgaaaacagattgaatataatgaaaacagtaaagaaaatgtataaaataatgctggacaaatatattctctgtgaatgaggaaacacatkgtcagtatgtaataataatagtatatttagtggccrggcgtggtggctcacacctataatcccagcactttgggaggctgaggcaggtggatcacttgaggtcaggagtttgagaccagcctggccaacatggcgaaaccacatctctactaaaaatatgaaaattagcccagtgtgggggcatggacctgtaaccccagttacttgggagggtgaggcaggagaattgcttgatcccgggaggtggaggttgtagtgagccaagatcacaccactgcactccagcctgggtgacagggcgagactctgtctcaaaaaaaaaaaaaaaaaaaaaaawatatatatatatatatatatatatataaatatttataaaatacacacatatatataatttagtgacagcatcgaccagtggctcttttttttttaaatttaagttctagggtacatgtgcacaatgtgcaggtttgttacatatgtatacatgtgccatggtggtgtgctgcacccattaactcgtcatttacattaggcatatctcctagtgctatccctccccactccccgcaccccacgacaggcctcagtgtgtgatagtccccttcctgtgtccaagtgttctcattgttcaattcccacctatgagtgagaacatgcagtgtctggttttttgtccttgcgatagtttgctgagaatgatggtttccagcttcatccatgtccctacaaaggacatgaactcatccttttttatggatgcatagtattcatggtgtatatgtgccacattttcttaatccagtctatcattgatggacctttgggttggttccaagtctttgctattgtgaatagtgccgccatgaacatcgtgtgcatgtgtctttatagcagcatgatttatattcctttgggtatatacccagtaatgggatggctgggtcaaatggtatttctagttctagatccttgaggaattgccacactgtcttccacaatggttgaactagtttacaatcccaccaacagtgtaaaagtgttcctatttctccacatcctctcccagcacctgttgtttcctgacattttaatgatcatcattctaactggtgggagatggtatctcattgtggttttgatttgcatttctctgatggccagtgatgctgagcattttttcatgtgtctattggctgcataaatgtcttcttttgagaagtgtctgttcatatccttcgctcactttttgaaggggttgtttgtttttttcttgtaaatttgtttaagttctttgtagattctggatattagctctttgtcagatgagtagattgcaaaaattttctcccattctgtaggttgcctgttcactctgatggtagtttcttttgctgcgcggaagctcttttgtttaattagatcccatttgtcaattttggcttttgttgccattgcttttggtgttttagacatgtagtccttgcccatgcctatgtcctgaatggtaatgcctaggttttcttctagggtttttatggttttaggtctgacatttaagtccttaatccatctggaattaatttttgtataaggcgtaaggaagggatccagtttcagctttctgcatatggctagccggttttcccagcaccatttattaaatagggaatcctttccccatttcttgtttttctcaggtttgtcaaagatcagatggttgtagatgtgtggtattgtttctgagggctctgttctgttccattggtctatatctctgttttggtaccagtaccatgctgttttggttactgtagccttgtagtatagtttgaagtcaggtagcatgatgcctctagctttgttcttttggcttaggattgtcttggcaatgcaggcccttttttggttccatatgaactttagttttttccaattctgtgaagaaagtcattggtagcttgatggggatgrcattgaatctataaattaccttgggcagtatggccattttcasgatattgattcttcctatccatgagcatggaatgttcttccatttgtttgtrtcctcttttatttcattgagcagtggtttgtagttctccttgaagaggtccttcacatcccttgtaagttggattcctaggtattttattctcttygaagcaattgtgaatgggagttcactcatgatttggctctctgtttgtctgttattggtgtataagaatgcttgtaatttttgcacattgattttgtatcctgagactttgctgaagtagcttatcagcttaaggagattttrggctgagacaatgggttttctagatatacaatcatgtcatctgcaaacagggacaatttgacttcctcttttcctaattgaatatgctttatttctttctcctccctgattgccctggccagaacttccaacactatgttgaataggagtggtgagagagggcatccctgtcttgtgcgagttttcaaaggcaatgcttccagtttatgcccattcagtatgatattggctgtgggtttgtcataaatagctcttattattttgagatacatcccatcaatacctaatttattgagagtttgtaacatgaagggctgttgaattttgtcgaaggccttttttgcatctattgagatagtcatgtggtttttgtttttggttctgtttatatgctggattacgtttattgatttgcrtatgttgaaccagccttgcatcccagggatgaagcccacttgatcatggtggataaggtttttgatgtgctgctggattcggtttgccagtattttactgaggatttttgcatcgatgttcctcagggatattggtctaagattctctttttttgttgtatctctgccaggctttgatatcaggatgatgctggcctcataaaatgagttagggaggactccttctttttctgttgtttggaatagtttcagaaggaatggtaccagctcctccctgtacctctggtagaattcggctgtgaatccatctagtcctggacattttttggttgataggctattaattattgcctcaatttcagagcctgttattggtctattcagggattcaacttcttcctggtttagtcttgggagggtgtatgtgtccaggaatttatccatttcttctagattttctagtttatttgtgtagaggtgtttatagtattctctgatggtagtttgtatttctgtgggatcggtcatgatatcccctttatcgttttttattgcacgtatttaattcttctctcttttcttctttattagtcttgctagcggtctgtcaattttgttgatcttttcaaaraaccagctcctggattcattgattttttgaagggttttttgtgtctctatctccttcagttctgctctgatcttagttatttcttgccttctgctagcttttgaatgtgtttgctcttgctcctctagttcttttaattgtgatgttagggtgtcaattttagatctttcctgctttgtcttgtgggcatttagtgctataaatttccctctacacacagctttaaatgtgtcccagagattctggtatgttgtgtctttgttctcattggtttcaaagaacatctttatttctgccttcatttaattatgtacccagtagttattcaggagcaggttgttcagtttccatgtagttgagcgattttgagtgagtttcttaatcctgagttctagtttggttgcactgtggtctgagagacagtttgttataatttctgttcttttacatttgctgaggagtgctttacttctgactatgtgrtcaattttggaatagtgctatgtggtgctgagaagaatgtatattctgctgatttgggatggagagttctgtagatgtctattacttctgcttggtgcagagctgagttcaattcctggatatgcttgtgaactttctgtctcrttgatctgtctaatgttgacagtggggtgttaaagtctcccattattattgtgtgggagtctaagtctctttttaggtctgtaaggacttgttttatgaatctgggttctcctgtattggatgcatatatatttaggatagttagctcttcttgttgaattgatccctttacaattatgtaatggctttctttgtctcttttgatctttgttggtttaaagtctgttttatcagagactaggattgcaacccctgcctttttttgttttccatttgcttggtagatcatcctccatccctttgttttgagtctatgtgtgtctctgcatgtgagatgggtctcctgaatacagcacactgatgggtcttgactctttatccaatttgccagtctgtgtcttttaattggagtatttagcccatttacatttaaggttactattgttatatgtgaatttgatcctgtcattatgatgttagctggttattttgctcattagttgatgcagtttcttcctagcctcggtggtctttacaatttggcatgtttttgcagtggctggtacaggttgttcctttccatgtttagtgcttcattcaggagctcttgtaggacaggcctggtggtgacaaaatctctcagcatttgcttgtctgttaaggattttatttctccttcacttatgaagcttagtttgggtggatatgaaattctgggttgaaaattcttttctttaagaatgttgaatattggcccccactctcttctggcttgtagagtttctgccaatagatccgctgttagtctgatgggcttccctttgtgggtaacccaacctttctctctggctgcccttaacattttttccttcatttcaagtttggtgaatctgacaattatgtgtcttggagtgcttttctcgaggagtatctttgtggcattctctgtatttcctgaatttgaatgttggcctgccttgctaggttggggaaattctcctggataatatcctgcagagtgttttccaacttggttccattctccccgtcactttcaggtacaccaatcagacgtagatttggtcttttcacatagtcccatatttcttggaggctttgttcgtctctttatattcttttttctctaaacttctcttctcacttcatttcattcatttgatcttcaatcactgatagcctttcttccagtggatcgaatcggctgctgaagcttgtgcattcatcacctagttctcgtgccatggttttcagctccatcaggtcatttaaggtcttctctacactggttattctagttagccattcgtcttatcttttttcaaggtttttatcttctttgcgatgggtttgaactttctgctttagcttggagaagtttgatcgtctgaagccttctcctctcaactcgtcaaagtcattctccattcagctttgttccattgctggcaaggagctgcattcctttgtaggggaggggtgcttggagttttagaattttcagtttttctgccctgttttttccccatctttgtggttttatctacctttggtctttgatgatgatgatgtacatatgggtttttggtgtggatgtcctttctgtttgttagttttccttctaacagtcaggatcctcagctgcaggtctgttggagtttgctagaggtccactccagaccctgcttgcctgggtatcagcagtggaggctacagaacagtgaacattgctgaacagcaaatgttactgcctgattgttcctctggaagctttgtctcagaggggtacccagccgtgtgaggtgtcagtctgcccctactggggggtacctcccagttaggctactcagggatcaggggcacacttgaggaggcagtcttagcgttctcagttctcaaactctgtgttgggagaaccactgttctcttcaaagctgtcagacagggacatttaagtctgcaggggtttctctgccttttgtttggctatgccctgcccccagaggtggagtctacagaggcaggcaggmctccttgagctgcggtgggctccacctggttcgagcttcctggccgctttgtttacctactcaagcctcagcaatggtgggcgcccctctcctagcctcactgccrtcttgcagtttgatctcagaccgctgtgctagcaatgagtgaggctccatgggcgtgggaccctctgagccaggtgtgggatataatctcctggtgtgccgtttgctaagaccattggagaagtgcagtattagggtgggagtgacccgattttccaggtgccatctgtcacagcttcgcttggctaggaaagggtattccctgaccccttgcgcttcctgggtgaggtgatgcttcaccttgccttggctcacgctgggtgggctgcacccactgtcctgcactcactgtccaacaagtcccagtgagatgaacctggtacctcagttggaaatgcagaaatcacccgtcttctgcatcacttacgctgggagctgtagactggagctgttgctctttggccatcttggaaccgcccttttttgcccagtggctcttaaactttcttgttgcctgtaattcttttgaggaactgatgaaatctatgaaagcctttcttagaaaagtacacatattgatayacatgcatgatttttgcctgggatatcaggagcttcttagacttcctagaactcattcctggaccctaggttaagattatctgccagaaaccaactcaatatggtaaggatagtgaaattacattgggaacactggaaaattagaacaaatagtagtaagtagtatgagagaaatcacactatacaactgaaaaaagattgtgcataagtatctgccacatagggcaagaagtgttagaattacataaggaatggaattatactggacttgggcctaggactgtgcagggattggtacaggaaataatctgtgattattgtaataaggctcacaactcaatttcacttaaccttctaaagggaaataaaggccaaaaataaaaaaaaaaccctatcacattattcctcaatttaagagaatggaactatgatcaaatcaacgtgtgcattaagttaaaaaatgaaagtaatatttttaaaagtctgtaacttgtaagaaatctggaaatgctttaaatacattaatagaagggcaggggaatacgtcatatcaaagattaggagctcatataaagacttttgcatccatttcataaagtaaaagaagcaaaagtagggggaaaaagtaggcaaaagattgttcaagtgagaacagggaagacctcaaagtgtgacaggtcaggtgtaaataaggagccagtccggctataaaggaattcaagacacagcacaaaaaggactgcaattcagaaataaaagcgtttttatacatgaaagatagaaggtcgactggagaatcaatgagactgcttgatgatcagggtgctcacggggaaaaaaggagatctggaaactcaatgaattcttcactttggtctttgttgaaatgtagaactttccactgtcatcatgtcttttgaagcaaagaggtgaggtatgtagtattagatcaaatagtgataagggaacaggatgttctgcctgattggcctgatggatataagtaaattgctgaaactttatgacatccattatgagggtctgaagaaactcaagggaataaatggatctaaatgtgaaataagttattgcactcactcttcagtattagtgaattcttgtttacattctaatgaaacctactgaggagaccctacaatctattgactgttgaatctcattcatattagtaaactccagaaattgtaggatcattgaccattttgtataatgaatggagaaaagcatcctgttttttataatatacttgagctatttgaaagggtaaacaagcaccaggaaaaaagcaagaaacaatttgtttagactttcaaggagtcaaaaagtttcacaatgctattccaaattgtgttaccatggtattaggagggaaatttcaccacaggtaggtattaatagagaaaaaaaaagtgtagaatgtatgcgcctgctgttgagggagatgtgtaaacagtgaggtccctcttgggatttctgctgggcctctttattaaacatgtttatagataatctgaaagggcaggcacacaatgaagtttctaaaggtacaggatttaagctcttttggccagtaaaattataaatcaactggaataagcttttgaaagatggcataaatggacaagaaagtggcggggaggatccagtactgtgagaagtgctacctatttagggaaaaagaaactacactaaacttgtaaaattgtgggctgtgaattagttagaaacctggtttcatttaggaaccaggaaaggagttcagaggcattaaagatgcatccttctgagttggccagcagaatgctggaaggttctgaaaacaaaagtacagttgaagcaaaaccattgtgcctgtgcattcttttggttttgatgggcaaatattaaaaaaaaagaatggggtatgataaggacctggtttcagatcctgactcagtccttaaagggatgttctgaggaccaaattaaatacatgtgaatgtgcctgcacatgtggtgcagtggtacatgtcaagtcttgaatacagcatctcagaatggccatgatgaagtcatcctcctagttggaggaaattaatcaatctctcacctggcaggggaagcccctgagaaagtctatggcagatactgatccatcttctctccaactcagccaaagggagacaacttgatttttgaacctctctaattgtcattagtgacctagtagaaagctaactttctgtaattcatagaacaacagaatacagggacgaaaggggacttgagagattactcagaaacctctttcttatggataagtatgagcaatatataggaaaaatcaaagctcagaaaagcaaatgagagacaaattaccagtttgtgaactctgatctttcaatagagtaatcaaccataatatttcctccaggcaaagctacacacccctgtttagttcgtatgattaaatgttgattaatttagagtagggggctctgtggaaagtgcatagaatacttggtatttcatttttgagtctttaaggaaatatctgttatcaatgttgacattttccatttccagcatattagaagttaattgaaggctccaatatcctaaaattactctgtcaaatttctaaacgtgtacttttttttttttgaggcagagtcttgctctgttgcctaggctggagtgcagtggcgtgatcttgactcactgcaacctctgtctcccaggttcaagatattatcctgcctcagcctcccaagtagctgggattacaggcgcctgcccccatgcctggctaatttttgtatttttagtagagatggggtttcaccatgttggtcaggcaggtcttgaactcctgacctcaagtgatccgcttgccttggcctcccaaagtgctgggattacaggcatgggccactgcgtctggcttgtctccaatatcttagaagttggtcttcctcagcttgaaataaacctggtcttgaatatttttctgtttttagacacatggcatataagaaggtttctatgtgaagtaatgactgttggtgaactttgcatgactttaaaaaaaataatctgaaggctatgctctggaggaagttccatagtcatactcttatacacacctctctatcagccttccaccgatagctttatcttaaaatgtcatcctaatttatctgtttattcctggggttattattgttatagttattagaaattattattaactcattaactcaaaactattataattacttatataatgttaatgccatgctaataatttctgatatgtatttaaaaataattaccagcatatcacctcatagcatgtgctggccaagtttatagaacaaattaatcagacttggaacttgaacgcaggtctttgtaaggctgaggaaacagaaatcccattgaaactatatctggtgtttcagttatggaccgttttaggaaaaaataagaaaaacgaaccctagatatctctatagatggcatttcctcaaaactccaccaagaacagaatcctttggccgatctccaaacttgaaaacaattattttttctttctcactcctctaccccttctcttcctctgaacatttttattagttgaaactctttatttttattttattattatttttttttgagatggagtctcgctctgtcgcccaggctggagtgcagtggcgcaatctcggctcattgcaagctccgcctcccgggttcacgccattctcctgcctcagcctcctgagtagctgggactacaggcacccgccaccacgcctggctaattttttgtatttttagtagagacagggtttcactgtgttagccaggatggtctcgatctcctgacctcgtgatctgcccgcctcggcctcccaaagtgctgggattacaggcgtgagtcaccatattagttgaaactcttatctgcttttcctcactgccttccatgcaaaccttagacctgttcccaggaggttgcgtattggatattcaacatacttttgtattccctaggtaactgtgttggctccagatggtgaggtacatgctgggttccatggtgccattttattctatttcttccttgctgaaacttgtgaaattatggatttaaattggcagcttaggatgtgtttccaaccacatgagttcatagaacgatgccttagtaatatttttgttagcattatttattagtatgtttattttatcgtggtatttttaagactcttaacatccagacccatcttgaccttgcattgtgtagcttcattatcagcttttactaccgatccyatccttgggcttatttatttcattttcgatattgcaggggtgggcaaactagggcccatggatctgtgctgattttatgtgacccatgagctacgaatagttttctcacttttaaatggctgaaaaaaatcaaatgaagaataaaagtttttgacacgtgaaattcaaatttaaaagtccataaataaagttttatttaaccacaggcatactcacttgattatatattgtctagctgcttttgtgctaaaataacggagttgagcagttgcaacagagattgtatgacctgcaaagctgaacatatttatcatgaaccatttacagaaaaagtttgctgacccatgctttagagtatcttcaaagaccccaaaaacatcactctgtatcccttcttgggctttttcctcctcagagattttgcttgaattctacttttatgattttgaaaaatttccctttcctctttatgtaacacatactagcatttgattgattgtatagttcttcagtagttttatgtatattaaattttgtgatttttaaaaaaatgtaacrtttttgaaagcaggaaccgtataaagtgtttagcaactcagcattcagccaaggattaggcacatagtattcgattctccrtaggtacttgctaaatttaatggaattcctttatgtggggtcccccagagttcatataaggagccacaatcaagaacagaatattaccatatacaaataattagcagctttaattgtggtttctacagagaactctgggagcccagatgagcataagaagtaaaatttgatctaaatcttgaagggagaatagaagtttgagaggaaaaaagggaaaagggaaagagtgcttgagcattccagtcagagggtttgagtgtataaggtatggagggaagaatgtatccagatgacctctcagtccctttcctcccctacggagggataaacactgtcctaaatctggtgttgtcaatgtcacaaatatttttattcttgtattacatatatgtatacctttaaacaatacatggtatcattttgtatgtttttaaacttgacttatatagtgccatactgaaacatcagtctgaaaaatgcttttatttctttcaattttttgagtttttatgaatttcatttttatgacttttatgtatgttcatatgtatagttctaatacattctttgttatgcttcacattattccattcattcagtatggcaccatttgtttgccattcacctgttgaatgatttttaggttgttttgcaatttttatttttgtaaggttgtgtttttttaattcatttgtcttaaatgatctgaaatctatatctgagagtagaattgctgcatcataggtatgtatatattcaattttgcctgatattgatagaaagtaaattatatcactaggttttctaatattacattgtctttccattccaaggattacctattagttataatgtattgtttttacatgtttgtagattcattttttcctatcattttatataggacttttacatctattttgaaaaagaaactggctcagatctttcttttcctatattgttcttgtttgtttttgtttttttttatattaattttttgtacatgtagagttctttagtggttgtttctgagagtttggtgcaccaaagacttaaactctggttttcatgttagtttagttttataaaatgagatggagaataaccatcccttttctattctctagaagattgaaattatctgtatattaaaagcttggtagagataatctgttaaactgtataggcctagtgggttttgaatggatagattttaaattatacgtctatttattttcaagtttaaaaattatacaggctttccatttctaagtcaattttattgactgtgtttttctagaaatttgcccacttaatctatgaatgtatttaatctatgtatttaaatttttcatagttttttctttttcataaagttttcttccataactaaaaaaagtctattatattcattattattttcttttcattcctaacagagagaaaattacaacaggatagggaatataggtacagactctgtagccacattatctgggtttgaatctagccttcacagttttctggttgtgtgatcttaagaaagttatataacttttctgtgccttaggtcctcaattgttaaaatgacaataamataacatctaccttattggctgaacttagaactttataaacataaatatatgtttgcagacatacacacacactgttgttacgagctatatgtgtcccccaaaattcacatactgtagcctgtatttggagatgggtttctaagraagtaattatggttaaatgacgtcatragggtggagccctaatctgataggattagtgttcttccaagaagagacactagagagttctctctttctccttgtacatttactgaggaaaggccatttagggacagtgagatggcagcctggaaaaatgccctcaccatttgccaatcagctggaacgcgattctcggacttgaaccttcagaactatgagaaataaatttctgttttcaaaagcacccagtctatggtattttgttacagcagcccaagtacactaacacagattatggtactgagaagcagagtgttgctgtaacaaatacctaaacatctggaagtggctttggaactggttgatgggtagaggctggaagagtttgaggtgcatgacagagaaagccaagattgccatgaagcaattgttggtagaagtatggacattaaaggcacttctgctgaaggctcagaaagaatgaggagagctggagattatgccttcattttcttagmgaatacatagataatctcgaactgaatgttggtggaatgtaaaatccattgtggtgaggcctcacaaggaaatgaggaacaggttattggcaagtggagaaaaggcaacccttgttataaagtggcagataacttggctgagttgtcttctagtgtttttgtttgtttgtttgtttttaagacagaacttgcaagacatgaaactggttatttagcttgagagatgtcaaaacaaaatgttcaaagtgtggcccatgtcctcctgaatgcttatagtaaaatgggagataagatagatgaattgaagaaaaattgttaagcacaaagatactagagttagagatttgaaaaattctcattctgtccctaatcaaaaaatgagaaagcacgttcagaagaggccagtgttatagtgacttatttccaacctctagtttatgtgccatctttccattaatcaacatagtttagttatagctgttgatcccactgtgaatcaatttgctagctttattaatcaacttacacaccatatatattgcactgcaggatattgtgatagacatatacaaacacctcttgaaaatctgttcagatcatttatgatatttcgttgttctagtyactcatgttgttacttgcattccataaattagtatgtaatttactagagtgaatgtaaaaattatgtctgcctagcattcttttcttgggaggtacttttccctcctccattttataagcatatcacttggtacatgtgtttcaagggatgggaatgaccctaccccttgtaaggttttgaggggaaggcaagggtaaaagagagagctggtggctcaacagcaacacaggtttattgaatgaagtcctgcacgggggttgcggggagacagcagctagcgctggagcccacccccacttacagactggggtaattataggtccaggcgggagaggtctgggcttgttgcaaactggggtgggcggtgtggttagctgctgataaaggaggaatttcttgcagtcaggtggttagacctggcacttgtccggcaggatatttctcatggccggagctctagtggaattttctgctctgaccagggtctgtgaaatggtaagggtttacaaaatggtgcagcttgggctaacacctctgaccgtctatgccaagcaggtcttgtgaatgagtcccgttagaatccagtccttcctagggtcagatgattggtgtgggcataggcatatgatctcagctgattttctggatccatccatgacaggagctggagtacctttgaactcatcaagtctgtgagccaatacacttgactcacaacctctccactcccccaccttttttgtttgggttagtttgagttaggcatctttattttaggtctctgtctgtcctttcatcctttcatatttattatgcctcatcaatgttatttttgctccttttcttcttcctcattctggaagaagtttttagatttgtcctgcatataacttaccccattttctgtaatgctgaattttactcttttacccttgaaatccatcgtattcttgtctatctctattgtaatttcttttgacttctcagttagtgctgttgtttcataatctcatgtttgatttcatatttaaggaagaacatatttccctgagttgttttgagtggataagcagacactttttataatttgcttctttccctacatagatggttttgaaattcttgtttttttgctgcacctggaggactctgttctctttcttttatattgtgggatatttctataggtcttttccaccctccttctgtatatcctcactgaatgagttctcacgtatattggctgatgtttgctggcaaacaatggtaagtaataatagctttgcttgtctttaatactcatcactatttggttgctgttcaaagtgcttctcttaaatcttaatgtgaaatactcattgatacaaatttagattcagaaagctttacaggagtgtgcaggctcatcaggggaactatgtctcttgatttttccttcccttttgatacatttgatttggccattgcttcagtgactaacttactttcctttttgtctttttttgtaacagagtcttggctctgttgcccaggctggagtgcagtggctcaatctcagctcaacttcagtgactaactttttacacttgacactataatagtccttatttcctagtacaaactggtcttttgtctggatagttgagtctagtctttgtcattctgtttcctacttggtgttgtcagtgcacaaattctggggccctctctaagatccctgtgttcaactacttattctcagttacaaaatagaggttttgccgcttgctcctcacctggtataccatcactcattcctctaagaagttcttcttatatggttttttttggaggcagggtttcactctgttgcccaggctgtagtgcagtggcacgatcatggctcacagcagtctctatctctcgggcttaagtgacccttttacttcagcctcctgagtagccaggactaaaggcataccaccacacccaggtgattggtttttattaatatttttagtagagatgagggtgctctactaatgctacattgttcagtctggtcttgaacttttgagctcaaacaatcctcctgcctcggcttcccaaagtgctgggattacaggtgtgagccactgcacccagcttttcctatatttttgtcaacatagattttttacctgtatgagttatcagtggacctctggtgatttcatttattttggttcatttagaatatacctagcagaaaatctgtagcatttctgctataatatcctttattctaatattgttctttttaaaataatttcatataattgatatatgtcaattttaatattaaagataatactttttatgtcatctttgtacttattacaatttgatttttaaaacttttcctgttttgtaagtgaatcatactcattactatatcttatttatttatttatttatttatttatttatttatttatttatttwttttaagagagtctcactctgttgcccaggcaggagtgcggtggcacgatctcagttcactgcagcctctgcctcccaggttcaagcgatttttctgcctcagcctcccaagtagctggaactacaggtgaccaccgccacacctggctaatttttttttttyttcttctttttttttcttagtagagtcagggtttcaccatgttggtcaggctggtcttgaactcttgactttaagtgatccacccaccttggccccccaaaatgttgggattagaggcatgagccaccgtgcctggcctattatatttagatttttaaaaaaattatactttaagttctggggtacatatgcagaatgtgtaggtttgttacataggtatacaggtgccgtggtggtttgctgcacccatcaacccgtcatctacattaggtatttctcctaatgctttccctcccccgcaacccccccgacaggccccagtatgtgatgttcccctccctgtgtccatgtgttttcattgttcaactcccccttaggagtgagaacatgcggtgtttgtttttctgttcttgtgttagtttgcggagaatgatgggttccagtttcatccatgtcccagcaaaggacatgaacccatccttttttatggctgcaaagtattccatggtgtatatgtgccatattttctttatcctgtctatcattgatgggcatttgggttggttcttaatgattttgaatgttttttctaatttcttaaatatttatatataatgagttgtgtatatgttctttattgctgtgtaagccttcttaagaactctttgtaggttgataacattatgcccaactcatatttgttttgactagtctttctcagtttgtgttttaattttatttctgttttcactgtgtctaatattatgtttaagtatcaaagttaataatttttctttcatgacctcttttattgtgtttctgctttaaaagtatttaccatcttaaaatctaaaaatggatctcttctggatgaatttttatgatttcacattaaattattttatatttttattttttctctttttaataaaacaaacttcctaattccttgagtggattatttatttaggaatttagcaaaatgtacttataatagtgtgattgtattgttttcactactcttataagattttcaaggcctttataagcattatcccattaattcacataatacctttttgggttaggyaataactgtgatcagagttccacataatgtttttagaaaatctctagaatgagtaaagcttaattttgtcaataaaacatttataagcactcttcaatgactagctgacatcacatttagagtttggttaaaaactgttgtatttaatggcaactttgccaacttatctatgtttttgtcttcattttttaatctgtggaaaatttgctactcttgtatggctttctcaaatgatatatgtggattattgttgaagaaacagagaagagtttaaattttagattagtgcttctcaaccctagctgcacattagaattacctgagaagcttttaatgcaaagttaatgtccaagtttcacctccagaaattaatatttaattgttctttggtgttgctgggcattaagagttttgaagaagcttctgttatgcacccatggtagaaagctattattttgcatcagtggttttcaaaatgtgatccccagatttgctgcatcacgtgagaacttgagatgtaatgaaatgtaaattatcagaccacatctcgatctgtctgctttttttcaaaagaattttttgttctgagataattgtggattcacatgtaattggaagaaataatagagatccattttcaccagttttgcatgcatttgtgtgtttgtgtgtgtatatttacttctatacaattttttttagtatatgtgctgccaaggtgagcactacaatctattttttttaatgttttattttagattcagtggtacatgtgcaggtttgttatataggtaagttgtgtgtcactggagtttggagtacagagtatttcaccacccaggtacccaataggtattttttcaatcctctccctcctccttccctctactctcaagtaggccctggtgtctgttgttgcctttcttgtatccatatgtgctcagtgtttagctcccacatgtaagtaagaacatggcggtgtttggttttctctttctgtgttagtttgcttcagataatggtctgcagttccataaatacatgattcattcttttttatggctgtgaaatattccatgctttatccagtctaccattgatgggcatttaggttgatcccatgtttttgttattgtgagtaatgcgatgaacatacgcgtgcgtgtgtctttatggtagaatgacgtatgtattcctttgggtgtacacctaatagtgtgattgctgggtggaatggtatttctgttttgtgttctttgagaaattgccaaactgctttccaccctatctgaactaatttgcattstcatcaacagtataagtgttcccttttctctacaactttgtcaacatctgttattttttgactttttaataataggcattctgactggtgtgagatggtaactcattgtggttttgatttacatttctctaatgattagtgatgtttagcactttttcatatgcttgttggccacacgtgtcttcttttgaaaagtgtctgtgtcctttgcccactttttaatggggttgttttcagatgtctactatcactaaagtcaagatacaggatgcaacaacaatctgtgtttcaccaagttttcgggtgactggtactgctaaggtttgagaactatttaaaaaataagactagaagagcaggaacagactttttttccccaaaaggattagtctaaatacgcaaagggtactcatagaccagcagcatagatctcacccaggagcttcatattactgtagaatcttaggtcccatcttggacctaatgaatcagagttcacattttaacaggatcctcagataatgtgtgtacatattgaagttgaagggtacctgattaaggggttaaaatatgcaaacaaacaaaaacaactaaatcagttttccgaaattgggtttaaatatttattctcacagtaaatacctttcacgttgaagataatttgtcttttaataaagataattttagtgttgaagcaaaactaataccattttctgtgctttacatctcattttagggtcattatggtgttattttttgctgatggagttgggttcttaaaaaaaccatatagatatgcaagttgagattttctatcaattagtcttaatattacaccatcttaagtaccgaaaatatgacaagtatcatcagtttcatcaacatcaaacttaaatgtgtctgaattttttcatcaacttttttttccacttgtcacttacttctgataaaattggatatactgggtttgtttcaggctcctgtagcagttcatctggtaactatcattattttctgctttcatttttatggcatttggtttgagagtctgagaaagaattttaaagaaaaagtgcaacattgagaaaaacagacaagagaccgggaagtagcctttttaatagatagatgtattagtttaggctattttccaattctgttttgcctccccccgcaacaagtaataaatgaacacatttataattatttttcttcttccctcccttcttttcacactgtgtaaggtggaagggagtttctggcttaaccaggggaagagtattgttaaataaggcttcaaagacatgcagaaggctaaataagaatttgtgaggtggatttattggttgcggggcagtagaatacagaattcagtgctgatagttcagattgaggtattacatacaacagtgtgggcagagggcaaaggagggatggacggagaggtgggaaaagcagggatctgtcacctcgccatacagccaaagggacaagaaggaaatgtacttcctggagccagtaagggaactgtggaggagaggccacctggttaaagctgtggtcatggaaggacctacctggctgcttcttgagatacagtgcccacatgagagggagccacaaagaaattcttctatctctttttcttcccagaggtgaaatctaatgaaaagttggctgggtattgcagtttgtgcggtcactgtcaagagcactgaataaagtagagaaggctgaggatagatggagtttagggtataaaataaaataaccaggagatcagagtggaatgcaattccagagagaatgaatattatgtgctaatgcacagaaatgccaaagattggcaactgtgggaataatgaggagtataggaagcaggaaatgtgaaagcaaagtagtagcaggagatgaggctggatacataacaataataatagttaatacttttggtgccaagcacttggctaaatagtttacataatttcagtctacacattattatgaggttgaccctatcatgtagcaattatgactcttgtccacaaatgcatatgcaattttttttttcttacattgactcagatttcattctgagcctttacctcgtattgggaaatcgtacctcagtcattagtttggctcctgccttctccatagagttccataaaactccaggagatttgcagggtgaccagatgaactgggaaggactctaatctctaggccaccagattctgccaacctcctcttcgttactgatagtggtcacttgaaattcctggattcttgagccatgggaaggacactggagtgttttcaaaggctgtgagccccagtgggttaggtgtccactccctttgtatgttttggtttatcattcctaatgtcataaacttgtcagaatctttttataattgacttaggaggttcatcatatctcattcatctttcagacatttatgtcaatcaaaacctatgacaatttcttactattatgttttgtaacctgtaggtaacctttgtaaccttttgggcaatattaaccatatatgctccttagagactgtgagatgttcccttttacaaccaacccttttgagcaggagttggcagacttttttggtaagcagccatatagtcaagaatttaggctttgcaggccaagaggcaaaactgaggatattatgcaaatatttatgcaataagagaggaaaacatctcacaaaattttaagtgattaaattaaagaatataaaataatttagtattatttataagacagatttactaatgagaagaatggaattctttttttgggaggattatatttcacttcattcaggtgtaaaattagtgttccctatcattagaattgatttcaaatgtttgtctcttaatgctgatctgtaataagaatttacatatttcatctttgaaaatgtcttttcacgcagaaaggtgctgccaagtagttatatcaatccacagcatatgatttaaattgagcatgttcattgcctggaaggcatttctagaatttattagacttttctcttgatattttccttttacatgtcattacattgcagattaatcacttccaattgaaagttaggtggaaattcctcagttgctccgttaaatggattttgaaatatggaaatttcctttgcacttgcatcaaggtctgaagaacactgttgtagcttgagttcagaaaatatatctgctccagattcatgtgggaatggaaatctcactttttgttttatcttctgacagcgcaggaagtatataaaacagcttggcataactcgtgattcaaacaacattagttgtcatcgaaatgactttaccgtcataaaagttttgcatgcaaatgctgttttgccttgaaattttagattgaattcattaaacatattgtcaaatccgcaggaaaagccaatttccaaagctatttaatgctcaatgatagtggttgaggatagattttcttactcagaaaaatttcattcatgatcctgagctcaaacaccacacctaagtttatccctattacaggcatggaagtgctgtgtagtgagtggagtgagtcagaatattaaacttctatttctgagaaaacttctaggactaactggctaagcctatcagagcaaaacatattttctgaaaagtacttgctggtgaataatacgatgaataaccataggctctgaacaccttcctctgtaaatttgtccaagtcaccctctgctccatacataactttttgccactctaaattgtaacacattttagcagactccgcttaagttgttttgaattagtgttttcttagtttctttgaaaatacttgtttgtagttgttctgtgcagtctattcatagaaactaattcttcagcctcttcaaaatcagtactgactccttgaaagaacaactgaacagtatccatcacatctgttagcttatcaaaagctgaggaaaaccacacaaaataatttgccttattttcaaattgactattgatattgcttccaatgtcttcaactctttgaacaactgtttttactgaaagattaatatttctaaacaaatttattttctctggacacatttctttagctgctgtaatcagacacaatttaaaatgactcatcactggtaaatggttttctttgcttggctcaaaaacgaaccactcagaaacttactttggttgcagtcttatttttattttttaatttttgtgatgaaattctgctgttttaagatagtgtgttttaaattttataatttttctgactattgctttcctatgagttgggaatattttgatcagtacccaatttggcagttattgtctccctttagcacagctataatgtcattacataataaccaaaatgctttgtcacctaatttaattaaaaaaattcatcttccaatgtatgccaacatctagcatgatgaagtccatttgtcttctcttttcttcttttgacatgattggtatgcattgggaagattaaaaaaatgtgaccctaccacatgcgtgacactgtcgattttgttgagttatgattgtgtcgctgtgatttgtggtgcatcaaaaagatgtgcaaagcaataagcatgagaatgcgacatgtggtctcggtcacaactactcacttctgctgatgtagggcaaaagtagccatagatgtaaacagaggaatgtggctgtgtttcaataaaacttcagttatgaacactgacatttcaattgcatgtaattttcatgtatcatgagatatttttcttttgatttttaaaaatttatcttttttcttttttcttttcttttttgtctttttaaaatcttttttcttttttttaatcttcttttgatttttttaaccatttaaaaatgatttttttaaccatttaaacatgtaaagaacattcttagcttgtgggtcatccaaaaatggacagcaggctgaatttggccagtatggcgttgtttgctgacccctactgttgagaatcattgatctatgatgagtagaatgtcaaagacaccaaaaaatargtcctgctttaagacttggcacataagaataggagacttggctattttgtttcccattaaatccttagcacatagatgcccaataagtagttttgaataaggcaattatagaaaacttctggcacataataaacctaaaagatctgttccatgaatgaaatgaatgaatgatatgctgtctatcctacacaatatgtgggagcttaaagatgatgggttaaaaataaattgtttaatctgagagaattcaaaaatagggagaggttatacctgaaaagcatgaagtgtttagtagctgggaatcattatggccaggttattaagtaataatagctggagagcatattattttgcgtaactaagatgtgagaggagtatagtagacaaacacaactctctataggctatttctatgaggctctttataactaaattgctttaaaaagttattcagagggccgggcgcagtggctcatgcctgtaatgccaacactttgggaggccgagatgagtggatcacctgaggtcaggagttcgagcctagcctggccaacatggtgaaaccstgtctctactaaaaatacaaaaaattagccaggtgtggtggtgcatgcctgtaatcccagctactcggaaggttgaggcaggagaatcgcttgaacccgtgaggcacaggttgtagtgagccgaaattgtgccactgcactccagcctgggcaacaagagcaaaactccatctcaaaaacaacaacaacaacaacaacaacaacaacaacaacaacactactattcatagaaaatgacagaattttcgacaaagaaagaacttaaaaccaaagaagctagtagccaattgcattttccaggaggatgagctccatgttaggatattttaactatttaataggctagactatttatacaacatcccccaagttatgtatacttccaggcatgtgttatatctctcaggcataggtaactgtgggaaatatgattgttagccaaagatacattttacactatgtttacaaactcacttagattgcatgcaaataaagaatttggcaagtttttagtcatcacttttggcatggggctgttccctggatatggactgttttatcaactcagaggcatttcttattccagcagcattagctttatgttctgtcatgtatgtatgtatgtacatgtatgtatgtatgtatgtatgtatatttttgagacagagttgtatgtatatttttgagacagagttttgctcttgttgcctaggctggagtgcaatagtgctatctcagctcactgcaacctctgcctcctgggttcaagccattctcctgtctaagcctcccgagtagctgggattacagacatgtgccaccacacctggctgatttttatatttttagtaccgacaggatttcatcatgttggtcaggctggtctcgaactcctgacctcaggtaatctgcccatcttggcctcccaaaatgctgggattacaggcgtgagccactgtgcctggcctgttctgtcatttagtacagtaagactggacctgacgtggcaatatcagtacaagtttcatggtaactcttgtttamccccatgatataagagtagagaaacacccacccaaaggaagggtataaagagaacgattgtcaaactgcctttctcacgtcctaactgtgttgttgtaggtaaggtgtttacccttctgaaccttcatttcttcccctgagaagttgtaatatgatctactttagagctagattgtggagattaaatgagacaacatgtgtcaactgcttagcacagtgttggagagtggaaatggtagctattatttacattaaaatgacagattttatactttaatattttaaaatttaaaatgactagatgactgttgtctctgcataatacaagctcattatggacaattttattggtaamtacttacaaatgttagagaaatgacctgcagccttttattacccactgcatagcccatgagtctgctgtgcatgtgtgtgcaagattttatttttgagacagagtctcactctgtcgcccaggctggagtgcagtggcacgatctcggctcactgcaacctccgcctgccaggttcaagtgattctcctgcctcagcctcccaagtagctgggattacaggcacccgccaccacacctggctaatttttgtatttttagtagaggcagggttttgccatgttgcccaggctggtctagaactcctgatttcaagtgacccgcccgccttggcctcccaaagtgttgggataacaggcatgagccactgcacccagcctaagatttttttttaaaaatactgtttttcttctattctacctttgtttgaagagggttaatgcaaatttcattgagatttgtgaagaaggaatacaattcattcattgatttattaattcatgatttcaacaaatgctgagcaccaacagtgtgccaagcgctgggtctacagtgaagaacaagcaattgcctctgcccctaagcagttcacttgcacctagagagaaagtgaaggtggtgatggatgcagtaacagagtaagtgcactgtgatatggccatgcgtggaaggcactcctaaccccgttgtgggagacttgagatttcttagaagaagtaaaatctctgttgaaggcaggtgaggcagagatgaagggattggactagcatgagagggagcagtgaatataactggagaggtttctaagggctttgtaaaccatgttatgaaattcaaacactatcctaagggcaggagagagcctctgaaatgttttaggtactcaaagacatttgtgtttagaaatattaataaaattttgacaatagtgtggaacaagcaaagattgtgggccaggagaccagttaaggggctgttacagtactctaggtgcaaggaaatggtggctatggggatgaagagacagcaaacaggttcaagatctattaaggagttataattgatattgcttaatcaataattattagtgtgaatgttgaaggagtagatgatgattcttaggtgttttacttcagccactgggaggatgttattaggaaagatgagaggaggagtaggttgtgtctggagaaatgagggagtaatgactttacctatagactgatttttctagtgctatgggtgcttcaaatggagatccttctgtatgagttcagtttcccagtcagcagtctaatctgctctttaggataccaacaaagcacaggcagctcagccctcaaaaagagagaaaatttggtcaggcgcggtggctcacgctggtaatcctagcactttgggaggctgaggtgggtggatcatgaggtcaggagatcgagaccatcctggctaacatggtgaactcctgtctctactaaaaatacaaaaaattagccaggcgtggtgacgggcacctgtagtcccagctactcgggaggctgaggcaggagaatggtgtgaatgcaggaggcggagcttgcagtgaactgagattgtgccactgcactccagcctgggcgacacagcgagactccatctcaaaaagaaaaaaaaaaaagaaaattcaaacactctaggaagaagtgatttaaatttcaacaaaattttcagttttgttttaatttaaaaagcaagcaacattttattttgtggcttactgtagtgttttggtatttcgatttttgaatgataaaggcagtggtaactggagatacagacttgggagtcactggcataaagatagcaattgaagtgattgagtgagatctcagggagggatcaaagagcagtcatggtttttttttctgagggcacattggaatcacatggggatcttaagaaatatcctgatgcctgagacccatcgccagagattctgatttaattgctttaagctggcctgggccaaaatttgagaagcactggcttagagtgagaagaaattacaggaaagaatgtgaggggatcacaatatttaaatgtcaatccagagaggactgtaatacacgtaggcygccaaggagttcaaggaaagaaaactctttagaacatcaggtgtggctgcatcaccttcttgattcagatgattaagaagttcaaccatgcccggcgcagtggctatcgcctgtaatcccagcactttgggaggccgaggtgggcagatgacctgaggtcaggagttcgagaccagcctgaccaacatggcaaatccctgtctctactaaaaatacaaaaattagctgggtgtggtggcgcatgcctctagtcctagctactcaggaggctgaggtaggagaatcacttgaamccaggaggcagaagttgcagtgagccaagatggcgtcactgcactccagcctgggtgacagagcgagagtccatccccgccgctcccccctcaaaaaaaaaggtagttcagccaaccaaccaatcaatgtaatccttcagtgtctccagcaccatcaacctgctgtgattaaagcttctggtgtgagtctgcatgctagagaaggaagcttgggtaaagatataggtatacatagttatttttctctttgacagtactatatagctgtaagtattaataatgattatatccaacagagaaggaaagttgaaagtggaagcataagtttggaaacaatataattttaaaaattgagatataatgatataatttatatattataaaatcagtcctttgaaatgtacaactcagtggtttttttgtatattcacaagtttgtacagctatctctatgatctaattttggaaaaaaatgtagtcttgatctatrtggtgtgattagaatgtggcttttagccattctatttctaaagtgcaattttgtcttatagtatatgaaatagatctaattttaaaaatcagaaggaaaaatgcaaacaaaaaaatccctcaataccaaaaccccaaataacaacccatttttaaaatggctgttattggtctattcagagattcaacttcttcctggtttagacttgggagggtgtatgtgtcgaggaatttatccatttcttctagattttctagtttatttgcatagaggtgtttgtagtattctctgatggtagtttgtatttctgtgggatcggtggtgatatcccctttatcattttttattgcatctatttgattcttctctctttttttctttattagtcttgctagcggtctatcaattttgttgatcctttcaaaaaaccagctcctggattcattaattttttgaagggttttttgtgtctctatttccttcagttgtgctctgattttagttatttcttgccttctgctagcttttgaatgtgtttgctcttggttttctagttcttttaattgtgatgttacggtgtcaattttggatctttcctgctttctcttgtgggcatttagtactataaatttccctctacacactgctttgaatgtgtcccaaagattctggtatgttgtgtctttgttctcgctggtttcaaagaacatctttatttctgccttcatttaattatgtacccagcagtcattcaggagcaggttgttcagtttccatgtagttgagcgattttgagtgagtttcttaatcctgagttctagtttgattgcactgtggtctgagagacagtttgttataatttctgttcttttacatttgctgaggagagctttacttccaactatgtggtcaattttggaataggtgtggtgtggtgctgaaaaaagtgtatattctgttgatttggggtggagagttctgtagatgtctattaggtccgcttggtgcagagctgagttcaattcctgggtatccttgttaactttctgtctcgttgatctgtctaatgttgacaatggggtgttaaagtctcccgttattattgtgtgggagtcttaaatctctttgtaggtcactcaggacttgctttatgaatctgggtgctcctrtattgggtgcatatatatttaggatagttagctcttcttgttgaattgatccctttaccattatgtaatggccttctttgtctcttttgatctttgttggtttaaagtctgttttatccgagactaggattgaaacccctgcctttttttgttttccatttgcttggtagatcttcctacatccttttattttgagcctatgtgtgtctctgcacgtgagatgggttttctgaatacaacacactgatgggtcttgactctttatccaatttgccagtctgtgtcttttaattggagcatttagtccatttacatttaaagttaatattgttatgtgtgaatttgatcctgtcattatgatgttagctggttattttgctcgttagttgatgcagtttcttcctagtctcaatggtctttacattttggcatgattttgcagtggctggtaccggttgttcctttccatgtttagtgcttccttcaggagctcttgtagggcaggcctggtggtgacaaaatctctcagcatttgcttgtctgtaaagtattttatttctccttctcttatgaagcttagtttgggtggatatgaaattctgggttgaaaattcttttctttaagaatgttgaatattggctcccactctcttctggcttgtagagtttctgccagtagatccgctgttagtctgatgggcttccctttgtgggtaacccgacctttaaaatagaccaataacaggctctgaaattgtggcaataatcaatagcttaccaaccaaaaagagtccaggaccagatggattcacagccgaattctaccagaggtacaaggaggaactggtaccattccttctgaaactattccaatcaatagaaaaagagggaatcctccctaattcattttatgaggccagcatcatcctgataccaaagccgggcagagacacaaccaaaaaagagaattttagaccaatatccttgatgaacattgatgcaaaaatgctcaataaaatactggcaaaccgaatccagcagcacatcacaaagcttatccaccatgatcaagtgggcttcatccctgggatgcaaggctggttcagtatatgcaaattaataaatgtaatccggcatataaacagaaccaaagacaaaaaccacatgattatctcaatagatgcagaaaaggcctttgacaaaatttaacaactcttcatgctaaaaactctcaataaattaggtattgatgggatgtatctcaaaataataagagctatctatgacaaacccacagccaatatcgtactgaatgggcaaaaactggaagcattccctttgaaaactggcacaagacagggatgccctctctcaccactcctattcaacatagtgttggaagttctggccagggcaatcaggcaggagaaggaaataaagggtattcaattaggaaaagaggaagtcaaattgtccctgtttgcagatgacatgattgtatatctagaaaacccctttgtctcagcctaaaatctccttaagctgataagcaacttcagcaaagtctcaggatacaaaatcaatgtacaaaaatcacaagcattcttatacaccaataacagacaaacagagagccaaatcatgagtgaactcccattcacaattgcttcaaagagaataaaatacctaggaatccaacttacaagggatgtgaaggacctcttcaaggagaactacaaaccactgctcaatgaaataaaagaggacacaaacaaatggaagaacattccatgctcatgagtaggcagaatcaatatcctgaaaatggccatactgcccaatgtaatttatagattcaatgccatccccatcaagctaccaacgactttcttcacagaattggaaaaaactactttaaaattcatatggaaccaaaaaagagctcacatcgccaagtcaatcctaagccaaaagaacaaagctggaggcatcacgctacctgacttcaaactttactacgaggctacagttaccaaaacagcatggtactggtaccaaaacagagatatagatcagtggaacagaacagagccctcagaaataacgccacatatctacaactatccgatctttgacaaacctgacaaaaacaagaaatggggaaaggattccctatttaataaatggtgctgggaaaactggctagccatatgtagaaagctgaaactggatcccttccttacaccttatacaaaaattaattcaagatggattaaagacttaaacattagacctaaaaccataaaaaccctagaagaaaacctaggcattaccattcaggacataggcatgggcgaggactacatgtctaaaacaccaaaagcaatggcaacaaaagccaaaattgacaaatgggatctaattaaactaaagagcttctgcacagcaaaagaaactaccatcagagtgaacaggcaacctacaaaatgggagaaaattttctcaacctactcatctgacaaagggctaatatccagaatctacaataaaatcaaacaaatttacaagaaaaaaacaaacaatcccatcaaaaagtgggcgaaggatatgaacagacacttctcaaaagaagacatttatgcagccaaaagacacatgaaaaaatgctcatcatcactggccatcagagaaatgcaaatcaaaaccacaatgagataccatctcccaccagttagaatggcagtcattaaaaagtcaggaaacaacaggtgctggagaggatgtggagaaataggaacacttttacactgttggtgggactgtaaactagttcaaccattgtggaagtcagtgtggcgattcctcagggatctcgaactagaaataccatttgacccagccatcccattactgggtatatacccgaaggactataaatcatgctgctatgaagacacatgcacacgtatgtttattgcggcactattcacagtagcaaagagttggaaccaacccaaatgtccaacaatgatagactggtttaagaaaatgtggcacatatacaccatggaatactatgcagccataaaaaatgatgagttcatgtcctttgtagggacatggatgaaattggaaatcatcattctcagtaaactatcgcaaggacaaaaaaccaaacatcgtatgttctcactcataggtgggaattgaacaatgagaacacatggacacaggaagggtaacatcacactccggggactgttgtggggtggggggagggggggaggaatagcattaggagatatacctaatgctaaatgacgagttaatgggtgcaggacaccagcatggcacatgtatacatatgtaactaacctgcacattktgcacctataccctaaaacttaaagtataataataataaaataaataaataaataaattacccagaaaaaaaaataaaataaaatggctggcactgcgatattcgctaaaagtatatgaacttactaaacaacacctgtgcccctcaaaaaacacttaatttttttttctgagaaaagaaatgttattttacttccgtaaaaggaaaaccagcaccacttgccagaaatagtaggtaagagcaaaaagaaatataatagaaattaatgcaatatttaactaaggcaaacacatctgtcctcatctatcaaatctctcttcttatttcctcttctttccacctctgctgcccgaccgtggtctgttatctctcccttagaatattgcagactctcattcttgtctctctgcttccacttttgcctcccaagcgtcatgtcacccaactgattcaaggatgaagacccagcccttaacctggccttcctggcccttgccatctgtcctcacagcctctccatccatgcctcccaccattctcctcctccttcatggcactccaggcaaaccacctgctttcatttcctagatgagtcactcctcttctagcctctaagcctttgctcctgccatgtttccatctccctagagcacttccagcaccccttcactaggaaaagcctacttatcctccagattttgtctctattgtcatctccgaaagtcttccttgacctcttacttcctgcttttccctcgtaagtcagatctcacattataacattttagtctatacttttttattttgkgattatttatttatttatttttgagatggagtgttgcactgtcgcctgggctggagtacaatggctgatctcggctcactgcaacctctgcctcccaggttcacgtgattctcctgcttcaacgtcctgagtagctaggattacaggtgcataccaccacacccagctaattttttgtatttttagtagagatgtggtttcactgtggtggccagactggtctcgaacttttgaccttgtgatccctcctccttgccctcccaaagtgctgggattacaggtgtgagccaccacacccggactattgttcattattaatatctgaaagttcttacttacacagaagctgatatgatcactgcatagacttggaatcttttgtctgcagttgcctcaagctcagacttcaagtacaaagcatcttcattgaacgtatacctaggtctgaaactagttttgactctaatttaccactactctgaactaggcatgaaacctcatgaaatgaaaggaagtccattttcctataatgtactgattttcaaatttggctgatttttagagtaatatggaggccttttgaacatgcaagttcctgggctttaggctcattcaactacaacttttggctgggtgtggtggctgacacctgtaattccagtactttgggaggctgaggagggcgaatcacctgaggtcaggagttcgagaccagcctggccaacatggcaaaactgcatctctactaaaaatacaaaaattagctaggcatggtggcgggtgcctgtaatcccagctacttgggaggctgaggcagaagaatagcttgaacgcaggaggaggaggttgcagtgagctgagatcacgccattgtactccagcctgggtaacagagcgagactctatcttaaaaaaaaaaaaaaattataacttttgagtggggattgagtgtttttttaattagttttccaggtgattcacatgcagtgagattagcactagatggcagagaggcatttgggaactaatacttcaacacatttagcaaaattcttgttgtaattgtcttccctctgctttggaagtggagtggaagatggcaatgaagtagactattattagakatttctctggcttttgtgggaagaagatgacttctaaattgagtttttcttgaagaaactgactcctagttatgtctaccatttttttctatcattttttccttttcacagatcaaatattctattctgcttctgacttcccacacccatgattgcaggagcttgatgtataacgcttaaaacatatacatttgtgtctggccccttatggaatattataatgggctgttgcaagaaggaaggaagttgagtaaaacaatgattctgctccagctctggcccctaagaagggggagggtgcagacatcagtcccaattataccatttaagaggcatgtaaaggttgaatccaatctggattaggattaatgtcagagattccagttgacatgggtgggaaatggcagtagaattactggatggaagccacagagaataaagtgggcctgtggattaggagtccaagcaaagtttattcagttgcaatacatcctaggctcctgctgattgtgtgagtgctttgataggtcatggaaaggaggaaagaaactgctagcatctagcagcatttcagggctctggcaagattagtgaggtttatggtcaggccctagtgctcgtggggaatggtagtatgatactgaagagatttccagttcgaggactcatggttcatgcaatacatgatattgcagctactttgtattagagaaaaatgagacactctgggtatgttggatccttggtttagggcagtatgtaaatatccaagtttacccactagtgggaatgtgtattttgatctactgccagggtcagttctcactggcaatccatgaccgaagcataactttctactaaagttgtctcatcacatctgcgtccctttcctctcagcttaattagtaaagaacgcctagaaaagataggcaaaaaagaaggaagacaacaaaaataagttttgcaagagccagggaaggatcagttttgagggagaatgagtcttcaggggagatctgtagggccctgcactgtagctgctcctctctacacatgtattctcttaactctgccgaacctggatgatcaggagtgatttccctcaaaaggtgtaattgctgatccccccatatgaagttggttgctttgtatgtaattgaggctatggaaggaaaaaacatacctagagatcctcacttgcagagattcttttcatgatgcttaggatggatttggagggcaaaggagagagagagagaagagagagagagatgggggagagagagagaggagagagagagatgggggagagagagagtgggggacagagagagagatggagacagagagacatttaaatgttaaatgtggtatctcttggttttaagatttgggaggatttcctttttctttttttttgcttttcagggctttctaaatatttctataatttttacatattacttcttagtaagaaaaaagtatttttataaagtgctgtaactgctatttgcatttgtgggaaaatataagtgctatttgctttaaactaataacaataggcttagtgttcatttattgaatacctatggtgtctcaagcccttcatcttagttaactctcagtactgttgtacaggatatatagttggaggaactaatgctcagagatattacacgacctggccagactcatgtaactaatggcccagagctagatagtcccacttccaaagaccatgagtgtttctttcatgctaaatgtttttactcatatgaacattaagaaaaaaatgccagaagggaagagtccattttgaccagttctcatctgtttcttacccaattttccctcactttctctcttttttcttagttacttgaaaagagttttttgctgtataagtacccagattggttgctttcagtgactacaaaagttaaatagtgcacaggatgagccagaaactaaaataataataaaaaagctttgcatttgtgttttgtttgtttgtttgatttgtcatttttatttctcctatagctggtgaacccatggtaattggtggtgtcaggtgagggaagagttgaaaagattgactgtgtaatagaaaattggctactaactatcaggaatgcagctgtggagtccggttaaggcaacacatgcttttttgtgcacttcaggttcctaaaagcatttttaaataacagagaaaacaaattcattacatcgtggtttttctactgctgctaactgagcaagatttgggagctttcaaaaatattatacattgtttaaaaatattacaaagaaattttagctttgcacaagagattcattaaatttagcatttttagaagatattttcagtcattaaagacttttggtattgtttccttattgtcttaattgtcactgttcaattagaattaacatcaatattgttctgatcttcgaaaagattacagaaaaactttcacttcatttcctgatataggaagaagagaatcttctgattttcttccatctaatttaaaaatcatgttcactggaatttctttctaatccttttaagtaaacaaaaagtataattattgctttggatgtatgtatatacatctcgaacacacacacacacacacacacacacatctgtataaaaatagtctaggttgaggaggacagtgtgttttttaaacaaaatcaggattatgaaacacatactgcaaatgagagccagggttgtctgtgtgtttttgacatggttttactggtttgaggttttttttttaggtttgtttttggattatatttttttgacgctcttcctgtattcttccaagtccagtaatggaataagagttgaagagctgaaagattcacatggagatgacctctgtgacttcatctgtcaggtgtctgtgtctttattagtcatctggaattttgaagactgattgaggccattacaaaatgtactgcagatcttagaccctacatctttaattaattaatgttagcaaagcactttgcaatcgacgaatgaaactaattgtaaaaatgtactgaatggtttgctctcttttatttttctatttccacatcaaataccttaatttgatttttaaaaattgtgctgtggatactcctaaacacttttttcttttgagctgtttatgttatttacataaagttggcagagaaatatcttctgtagttttgcctttgattttactgggaaatagatactcctgtaggctatagatttatttttcaactgaaaaacaccatcccaatgttgtgttaattattaataggattaatcttttatgtcagtggaaaaatgtctaaaattatgcaggcaagtaaatcatacatttgtagaaactttgaaaagaggaacataaagatcacagagaatgttctctaacagaatggaatattccaggataatgctttctaacaagcaaaggtaatttttatctaaaacaaatatgactgaggagcaggtgcattcttgctcaaataacggaaaagattcaatgcaagtaaccacgcattttgtcctccaataatttataattcaaatccatattgatttgtcatgaaaaggaaattgtaagacaaatatatacagacagaggattattaggttgcaagagccaactctaagaattaagatttgtgctgtatgtaaaaattatatcatatggcttaattgtgtatcatagtagtaattattactaaacaattttggggaattcataggtgaaaattgttgctagtgaagtcagaagaagtaacactatcrtactacaaattcctagaatatgtgatttaaagttcaagttagaaagttaaatttctcttctccttttactttgaagaagttaagtgattctagaaataatgcctatttaattctctgggttttccacttagctataataattaatatatagaattcagaatctatagattctagaaaatttagaatctatagattctagaaaatttagaatctatagattctagaaaatttagaatctatagattctagaaaatttagaatctatagattctagaaaatttagaatctatggattctagaaaatttagaatctatrgattctagaaaatttagaatctatrgattctagaaaatttagaatctatrgattctagaaaatttagaatctatagattctagaaaatttagaatctatgattaatatatagaatttagatcaatgaaaagtatcctaaaactttataaattttatttttgaacagcattttaagatttagaaaaatgaattccaaattaatagtgccctcataatttgagggtactcatttgacatgtgagtattttcaatctgagagtatatactcctgaagaaggaatatagttcaaagaagtcctcaaaatcaaattaggacaatgctaagtgtctgtggacttcattctgttcccaaatgcatatttttgattgtccttgatattactggaagtcacatgcaagtttattttggtaagaaacaacaagataaacaggtgacttatgtatgattgactaattatgtttgtgccaaatttattttggactgtactttcaggagttttgacaagataactgttttaataaaaatgagtcaataacaggagtgatagaaatctgtaagaatgtttcaaatgctttatagtaaaaaagtgcaagttgaattcattatcataaagaggtacataatgcctatattaattttcttttgtccccaatttactttggcgtcaattactagaacccctatcatgtctggttaagtggaaaaatattctggttaatttttgttgttgttgttttgtttggctgtgaaacaagacttgaagttttcagtgaatctactgagttacatggcaccttacttagagatgcacaatactaactgtatgaacccatgaggcaaaatattaacaacatgtttcaggaactttgctgggcacatgcatatatagggttgaaaaaggaggaatattaatgtagccttgagcaatagctatttctggaatgaagatgaaaaaaatccacaattacagtttgagttaatatttgtatgttgctttttgcacgtgctttctgttttgatcttcaaaatgaccctgtgaggtggtaggtggtgtcatcctcattttacagatgaggaagctaaggttcagaaatattaattcccttaagtcacaagtaaataagtggatttaacctgagcgttcaagctccactttccatgttttccctttccatcaagtggggacacagtcaagatattaatccaaataaagggtatcagcacaaattttctgggaggaattgttcttgcaagacagaggaaaggtaaaatctagacatatatggaactagggttgtctcaaattgaacggttcatggactgaattcatcctgaatatgagttaggtataactagctctgcattttccaaagggtgtgaatttgactgccttaggtctaaaaaggtttttcttgatttctcagtgtctaccactctgcttttctcagctgagtcacttatatcaccttcttgtattctgatgttgtatgaacatgtaatcctgggctgattgaatcacacaaacaagaacatggtgagacatatgtgggcgtgagtgcagagagcaattttatctggcttgagcctaggttttcatgaaggggactctggtggaaagttgttagggaccagattatggatgctatctggccctctttgtcccccaactccactccctcttccacraactctatgttagttgggtggccgacatacaagtgagtaggaataaagattgtcacgtgtgggctcagtcttcagaagggaggtcctgaaactttgaccataaatgatataggtccaattctgtgggaaaccattagtacagacagcgtcacaaagctacgtgttctgagctgggagaaggaatcacggtgcagttgcgggtaagtgaggaaatgtcctgagtgttgctgtgaatactggctgatgttagtagtacacttttgagggtcagtgggagaatggtgttttatcagtaacacaattttaagggtgaggcaagtttagaaagatgcaatcaagtttctttgtgtatgtagaagattattttgtgagccatctaattaaggcaagtccctttgattggaaactttgagtgggaagacttgtctgagtccagtggacctttgagtctttggatgatttggaggagaaataaggttataaaaaaattatcatatcaagatttgaaattaggagtttctctcctactccccatctcatggccttggcacatgctttatttccttcatggaatgttcttccccaactgtcagtggaactgattctttcttatcctttagactctttacctattagcacaactatccctcatttgagagattgtcccagacaaccctatctaaaaagaagttccttctacctttattctgttctttagtcctgtactaattttcaccacagtatttctcaatttataattgttttgtcttaaataaattatagacatataaatagacatataaattatgtttacagtaacgtaccctcataatactgtgccccatagtaccctcagggaatgtgcatttcatagggcagggagtttgaattcagagtctagtaccatgccagaatggatgctctgtgtttgtgaatgaatggaggaatggttagaatatagctgagaagaaaaataccatgggtattcatgagaaagtgtaccacagattctcgtgtcagatggaggatgtagcatatgcttttctaatgtgtgttataacagaaattcatacgtaatagcaacaggggaccttatatgtatagatatctcatgaaaatttcataatgctaaattagaacattgattaattcttttaaaaagttataggattagtatattttggatgtaaaagtttaaatgacagaaaaagctatgaagggaaggtaaaatatgtcctttttcaattcctttcactaatcactattaatacattcttacatgtctttttgcaaattttatgtatgtatctatgtatatagcattaatgtatttatctttctgtagataattagttgcctacttattatttcaaccgttgtgatcacaacattaatatagtttttctatttgcaatttttatctaatgtatcttttttttttcttttttttttgagctggagtcttgctctgtcacccaggctggaatgcagtggcacgtgatctccactcactgcaacctctgccttccgggtttaagcgattctcctgcctcagcctcctgagtagctgggactacaggtgtgcaccaccatgcccggctaatttttctatttttagtagagatggggtttcaccatgttggccagactggtttcaaactcttgacctcaggtgatccacctgcctcggcctcccaaagtgctgggattacaggcgtgagctactgtgcctggcctatctaatatatcttgaatgtcttctcgtgtcaacatataaagatataatcactctttttttttttaacagttgcatactactctattgaagtttccttctgttaccattttccttctgtatgaaaacttccattcttttagaacaggtctgctgctacaaattcttagttttcattcatctgaaaatgtcattattttatttgcatttctgaagggtattttcactgcatgtagaactccagtttatatattttttcccccagcgtgttaaaaattttgtgccaatttctaatggtcttcatggtttttggtaggaaatccatagtcatttgagctatagttcccatataggtgattatcctttggtgttcactcacatttttcaatctgtgtttatgtcttttaccaaacttggaaaggaaattttcagccttcctctttctttctttctttctttctttctttctttctttctttctttctttctttctttctttctttctttcttttcttttcttttctttcttttctttctttcttcccttccttccttccttctttcttttttgagacctagtctcactctattgcccaggctggagtgcagtggcatgatctctgctcactgcaacctccgcctcccggattcaagcgattcttgtgcctcagcctcctgggtagctgggatgacaggcgtgagccaccacacccagctaatttttgtatttttagtatagatggggtttcaccatgctggccaggctggtctcgatcttctcacctcaggtgatccacctgcctcggcctcccaaagtgctggaattacagacgtgagctaccacgcccggacttcagccattattctttagaaagtgatgttccccaccctgtgtgcaagtatgcagttatttttaaaatgagattggaggacaaaagagttacaaacggaaatacattttggttgtcttttatatttacctatgtagttatcctacaagtattctttatttatgtggattttagttactatatagtgtcctttcatttcagttttagggattctgtttagtgttacttgtagcgcaggtttgcttgcaattaattattttataattttaatttgtcctttatatatgaagaatagttttgtcaatgtagaattcttggtatatgtttttgtttgtgttttctgtttcagcactttagatataatatgccattctactgtcttctggcctccatggtttctaatcagaaatcattggttaaccttattgatggtctgttgtatgtaatgaattgcttctctcctgctgctttcaggattctctctttgcctttggcttttgattgtttggtttaggtgtttgtgtagtatggaaccaccttggagttaattgagcttctttgatgtgtaggatatttttttttccaaaaaaatggtacatttggctgttaccttaaatattcttttaggccccacttctcaatcccctgtcctcctcttctcctccttctctcttctcctcttttttttgggactcctgttgtgcacctgttagtattcttgattacgttccacagctctctgaggatctgtcagtttttcttcatccttttttctttctactgttcagactggatagtcccagttgacctaccttcaaagttactgattcttctgccactgcaaatctgctattgagtcctggtgattttaacatttctgttattgtacttttcaactccagatactctgttcagtgaggcacctttctcatacctttttttcttttcagatggagtcttgctctgtcacctaggctggagtgcagtggcactgtcctagctcactgcaatccctgcctcccaggttcaagagatcctcccacctcagcctcctgagtagctgggactacaggcatgtgccatcatgcctggctaatttttctatttttagcagagatggggttttgcaacattggccaggctgttctggaactcctgacctcaggtgatctgcctgccttggcctcccaaagtgctgggattacaggcatgaaccaccatgcctggcctttctcatactttctttagttctttaggacatgcttttctttaattctccgaacatattttacacagctgattgaaacgcttttgtattgagctgaaaggtggcccctgagatatgtccatgtccttatcattggagcctggcttatatgagaaaagtgtgactattatcacatatgttaagatgtgattaagttaaggatcttgaggggtggaagttakcctggattatcttggcgggccctgaatgtaattacatacatccttatcagagagaggcagaagatgtcttgagacacasaggtaaggagaaggcattgtgcagaaagattggagtaatgaagcctcaaarcaaggaatgctggcagctaccagaaggtagaaagagcaaggaactgaatctgtcctatagcttttagagggatacacagtgctgcccacaccttgagtttaaacttctggtctccaaaactaccagagaataaattcctattgttgtaagccacctagttagtctgtgatartttgttatggcaaccttacaaaactaatgcagtctagtctagtctttgtctrgtaagtctaacatctggcactcctcaaggacaatttctattgactacttcttatttttttgaggcctataagtttttaatattcccacatgccttgtatttttgttgttgctgaatattaaacattttaaataaaattaatgacaattctggaaattatatgctggctctttttttaggatttgttgttgttttcctggtcagttttctgaactaaatctgtaaagtttatattctttgttgtatgkgaccactgagtgtcttctcaattagcttggtagtcagmtaataatttgacagagatttcctgtcttcaagtatttgctgaagggctctgtctgtgctgaggcttgccttccatgctcagccagtccattgactcttctgccttagtctttacctctttattgcacagagcctcaaggttagtaagaagtgaaattgtaggcccttctcaagttattcctgagctgtgcacagccctgggcatgcaaacgtttcatgtgttcatgggtctcataggttaacaggaatatggtggtagcttctcaaagctccttatgaatgttcattcctcagatctcccttgataagtttttttgcttagtctattgtttaccccaactattatccactgtttcaggcagctgagatgttagacaattggcaaatgcccacaaagagatggttgttaacagtgggagaaccctgaggcaggtcaaataaaggaaagccttgaaaatgaggtattttccataggtcaaataatgacaattctgtgctaatggggattccaaggagttccaacccagttcagtgtcttctagtggctggtagtctgctggttttcactgtgattgcaacttactgtttttcaaggctagtgcatagctggggatgcagagatgggaatagggcaagttaaaatgccataaactcaactgtttttaccatgattcaactgttttttaaacacatgctccctggattgctacaagccattactcaatttccatagttctgaaaaagttgttattgactatttttgccaatcttgtcattgttttgtggaggagaggattttcggrggtctttaccctgccattcgtgctgatgtcactccggcatatggcttttgaactctgtgcagcttgcctcctccgagttgctgtttactgtatttatggcttattctgctttgaagaagacttctttgacttttcttttgggttgcatcgcatcccctagattctacttccatccgaattgggggatttcactgagaattatcagaattttctggattcagtttcttccgtctctataatgcgtgttgatagtcatgaaaggaactgaaagttgatgtcggaaatatttactctcttgtctctgaatggcattttgtcaaaatttgtsgtatagtttgcttactttcttaatttgattgctgcctgtatattttcctttctgtatttattttgttaggttttgggggttagagcttgcataattacctatttcctgtttactgtctttttttgaaatcatacaggattattcactgtgaaatcaaatgaaaactttgatttaaaaaatgaaatgcgtagctttttctttctggctataattagtaaggctagtttctgtctgtgaccatacctagtttgtaatactgaaataataccatcatttgtcatattwttaatatctattctcagtaggtggagggcagtagaatgtgttgagaagaataagagggtccattttgttttatctctttagattcctcagtagtgatttgattctttaagactcaagttgattctcatagtagtgttatggtatagataagtattcccctgaatatggctggctatataatatataagtaatagaaaaattagtagtagtagtaatagcagtagtgataagagtagtagcaataataaatttttaataataagaaaattgtatttttagctcacttttacaggaatattataagacattggtattttttagattttctttgcccatgtctcacagtacgttgttcttttgttcacatggataaagtattattatgaaacttttataattttatgttctttaaaactccaatcttaaaactgtcttcagagcattactgtttctgttttcgtaacaacaacaaaaaaaaccctaaatctgttgactcgtggttccgaaaaaactataaaattcagtaacttcctaattgtagtgaaaagagtttttccttgtctcaggagacaacctagattcaatcatgttgtggtagtgtggatgtaatgaaacttactacattactaaggaatatgttggcagttcatatcatatcatttcctaactcctccttatctcattgtaccagaatcctaggcattaaaaaaatcacaaacacacatctacaaaccccatgaaaccaaataactatatgccatttggaaaagtgttagtttgggatacatgagcaagtgattagtatttttttatgktaatcattttcggtttatttcatatatgtkttttctgctggacaattatttcaggtggagttgataaatttcacttcattcagtacaccatgccagtgctgatgacacagatctggagtaaatgtgattcctaccatcaagggacgtgtgtgtgtstgtgtgtgtgtgtgtgtgtaactctaggaatttcttgagtgtggtatatggatttttactaaacagcrctgtttttatttttcaaaaaacacctataatatttaaaaatatagtaattgctctttagtacattcattttcatatgtccctgtgtagcctcttttaagagtttttatgggcatgtggcttttctgatagactgaataggtttttcaaaatcttgcataatctagtgactgtgacaattatgttgtcaggaatagaattttattgcttgtaggtttacttttcacacatttatacatgtgactaaaaaagggaaaagctattttaaatttgaagtgagcttagctcatattatgtagtcccttgagggcacatgagtctcaggatttggcacttccactccactttattggataggaagaggtaatgggtcactagtcttagtcaatatctcctttttttgaaaggaaatactctgcaagggcacagaaaggaggacgtgaaagaagattgaagtatttcgctttgtggtctaagctcttacctttaactcataattatagtgctaactagaatgtcttatgtttaggaaggagttggagatgaataaaatggaacagcttattaaggcaaatgtatttgtgttaaatagcaaggaactgacctaaaacaaaagagaaaacttagtttgtattgcatacttataaataagtctatttgagataatattcattgaatatatacaatgaaatgacaatttagatactttgaaaactttgtaagctctttgaagttgtgagatgacgtactcatatccattatctttggaaagtatttagtgtggaaacgtgataatattacatagagaactaataaagatgtgtctgctttgtaagatttcatatttaacacagattacattcattaatttatttttattgaatgtacaagaagaagcttggatagayattaattaaattgtcagaaataaatagaaattgtaagtatgacaccccctgcaaagtggagwtttatggtgctataaaagcattacgtggagggatttgatgtagtcatggccctctgggaaagttctctgtgaaagtgatgaagagttgagctctgaagatagactaagagttactgagcaaggggtatggggacttgtgtttcctctgtttgaaattatatacatattttatgctacacactacatctatgtattagtaatggcctgagagatttgctctaattcatgttccttttcagatgaagaaactagaatccatcgattttaagtaacttgcctgattcatagctagcctgtgattaaaattgaagtagcactatgttttatgattcatcccatttctattaggacgggttcaagacataggaacatcagaacaaaaacggacttaactctttattcagttatttattttttcatcttaaattacaaagtacttactatatagaaaggactgtgctacttgatgtgaaagatgaggaggtaaatgatatgtggcatttgctttcagagaacttcccatctattgggaaatacaaagcataatctgaatttagagagtaacatgatagatgtcaatagaaaaatatagataaaatgtaggaattctgataaggaagagattgtgtccattgggactaagtttggggtggcttcccggaggaaatgataattgagctggtcttaaacgtgaaaatgaaaggcatttggtatagaatggactgcgtgatcaaagcaagaagttcgtcagggcatcagcaggtagttctcttagatgacactaaaatgtgtgaagttgtaatgcatgtcttaattaaataactgtctttgtttctcccttctgtaatatgcttccccctgcacagatctccccccgctgccccacgaaatgcttgaaaggtagcttgactctttgttcgaggctcagtcctttggatgttaatccaactgggatggtgtaactaaataattaattccttctcaacccctcggtctctctgattccttaattatcccgcagcagagggagagatagtgggaaatagatttgaaatatatattgacacatgattgtgggtaaatactatagataaggggtagcccttaattttcttataaaaaggagaacaaactactggcagttgttcaatggtaagtgcattgggtggaggataaagaaaggttgaatgtgaagctgctctgtggggtgctggggatacaaagataaatatgtgtacttcagggagtaagtatgatgctcaaaacatgatgaaagcctggtgtgagacaaatcatgcccagcgtgtaagaaagtgaagctattagttctcctgtgaagagttttgaaaggcttcacggatatgtgggcttttagttgcttttaatatctttatgttttgtcttcttagatcacaggttccctgtggtttgttatcatccagtagttgacaaggtggtcttactgctaggtgccaacacataccctggctcccttagtcagtaatttttttttttttgagacagtatcttgctctgttgcctgggctggagtgcagtagcatgatcttggctcactgcaacctctgccttcaagcaattctcctgccttagcctcccaagcagctgggattacaggtgcctgctaccacgcctggctttttttttgtatttttggtagagacggggtttcagcatgttggccaggctgaatgcctgacctcaagtgatccgcgtgccttggcctcccaaagtgctaagattacaggcatgagccactgtgcccggctccctcagtcattcattctacaaaggcgtattgagagcctactatgcatcagtcactgtgctaggttctgagtcttgtggtaaacaaagataggctcttttcttgtcctcaagggccttttcttgtcctcaagggtctgggaggcaagacacattaaacaagtaattaaaataaaatgtgattagtattaatgatagagtagtatggaagataaaggcgagacgattgtcaatgatcataacattctagggaattgaaaatagtcttattcgttcatattttaatttggcactgctagaatccatcatggccactgggaaagattcatatgaattctaaaattaataaaatcataccatgtgaggggtgaagagaaaaggaggattcgtgggttaggatcatgggctttggagttcatggttggagtcagggacagttctggctgaaattctatcagtatgtattsgctaggtgatcttgtataagcaacttaatgtcactgttcttggcttcttcggctgtaaaatggggaaaattacaattcatatcagggttgtagtaagatttaagtgagatgagtactttaagtatagtgcctggtatatagtaagtgtccaatgaatgctgtcttctaaaaaagatataattgctcgtaagagaatggcatttagtgtcctagtctttctgtaggattttgrcatgatcttcactgatccctgtcctcaggcaagaaatctgaattccttgtgctgcttctcccatatgcaaaaaggactatgtttctccttttttctttttagaaaggaagtataaagattaattacatcatacaatggtcttttcatttttagggaaaggtggtacatagatgtgtttcattccttcctcaaatctgtttttgtactaaagttgagaatgcttcaagtctctttctattttttaaatgcatattgctgtttagttagcttttaaggtgacgtgtggacgtttcttataaaaccaataatttgtgtcactttatatagcattgcaaaagtcctttcttgccaattttgttgtgacatgtaacaattgttaggggggatggatgcatatccagatgcttaagcagattttattgattataaataaaatagcttaaaaataaagctttaaaaatgtaattactactgccatttttacacacaaagaagtaagagtaaagaaatatgtggtgttgtcttggggacagaaggatggcctggtttcgtcttcactgtactaggacacagatgcaatctggaaagccatcttagaactgttactgtagaagaggctggtgcttccccaggagtgcacagctaggacaagagctttgcatgttttcagaaagcccctgacactcagctgttaatctgaaatatctagaaagcacatcttctcaataaaccttgttatgcaaggaatgtctcgagccgtaattcttttaattcaactaaatccaacactgatccctcatcccaccatcttgacgggaatctcagttataatggggctccctcactcacaaagttgtggggctgaggtcctgtgatggtgcatagaacaaagtattcaggtaagacccttgagtttttagttcaaattagtttgctaatttcctaatttgttagctaattagtttctctcaacagaggcatactggagttttggtgggatagttcttgtggtgtgggaatgttctatacgttgcaggatgtttttagcatccatgactttgattcattgtgacaactgagaaaaagccttttctacctttccaaagttccttagttgagtcccacaatacacatacttttatccccccggcagatcccttggactgtgatggggttgggactgttgtcccaggggtgtgagaaagtagtgggcccaggcgctcttaatggagcctcgtgtggccaccttgcttttatttcccatgcagatccaacctctttgctggagctctgcaagaggaaacttttgggtgcatttacttgtaggtgccacagaccagcccttcctcaagcttggggcaatctttttctttctcttgctgcttgtgccagacctgtccccaccatcatcccttactctcacaccaatgcagtggcttctttttgtgtccatagtactaagcttttggaaaacaatagccagtaaaggaaattctcttaggccacttctgtggtagctgggctaccctgtggtgaggaagcatgcaagacctggctctcttctcaggaggtaggatgaggtatcaaaaggcaaaatagggaatgcaaattactaaatgtgatttcaatcttttgggttattcgatagcaataaaactatgaagctcattaacatctttgtaacttaccttgcacccaaacgtaggtattattcatctcccttcaaaaatgagtgatcttgcccttcctgtatggtctgatttctttaccatggggaactagagctctgtaacttgggcagatcggatacatggcccacatgtaagactgacacaaaggcaggaaatctatggacagggttcagggctatacttactttctatttgggtttttgaactgaacaacagaacacaggaaactacctgagtcactatttttctgatttctcttgtggatgctactttctagtttaataggaaagaagttagattgttatatggaatggttatctcagggcattcgggtttatttttcttgctgaaccctttggagtgattagtgctaatccttgtttttctggtcctgttgtcctgtgaaataatcagaattgtggtgtacaaatgagttctcctctgttaaaggaggatgataataatacctactatgtaggtactgtcgaaagggattaataatgtctataaagtgcttagtacactgcctggccctcagtgagtgctatgtaagggaataatgttaatgggtccaggcactatgctaagtactttacatcttggtgctttctcatttcatcgtcctctaactgttcctgagatagatactattattcccatttcacagatgaggaagagagtttgttacttccctgaggaaacacagcctgtaagcggatgagttggaatcggatgcaagtttggaaggaagtatcctctccccaaatgtggggcagagagacgcytgggctgacctaattgttaaagcctcagtcagtgttatgctgaatttgtcgcttacatgtctgcacattactttcaattgaaagtagaaaaatgaaatagagatctaataaacattaccacaatgttaagactgaaaaaatgaatctttgtctaaatctgttgagtacagagcctacacctggaacatatttctttgatccccttcataaactgctaaaaaatatgctgtaattacaggcatttagtgaagcaagctactgggcacttttgtaataggttgcattttcttttccttaggataatgaacaggcttataatataatgaggaaattttgacttcctcaccttaacttagttttaatacaagtcattgaaagcaacagaaatcagagcatttatttatttatttatttttggagacagtctcgctttgtcgtccaggctggagtgcagcggcgcgatcttggctcactgcaacctccaccacccagattcaagtgattctactgcctcagcctcccaagtagctgggattacaggtgtgtgccaatatgcatggctcatttttgcatttttagtagagatggggtttcaccatgttgctcagtctggtcttgaactcctgacttaaagtgatgtgcctgccgtggcctcccaaagtgccaggattacaggcatgagccactgcgcccgggcagaacattttaacatttaaaatgttagcagatgttcctgtgaacttaatgttttatattttcacatcatcatgctctgaagtaaaatgaaagcacagtctcctattattttggatttggataattcataataatttagatataagggatcttgttttttctcagaaagagtcatccatggttcataatattcatgttttaccacttaagaacttaaaaaaatatgtttgagatattcatttattgtgagaaaacctgctgctcttctagcttttcattggctagtcattgtcaaaatatgcttgttattgttttaatatgtatcaagattatttctctttgtaagaaagagtatttgtttgtaagcactaaaaagactaacttagataaaatataagaatgttttacaaagatttctttgccaaagtaaggcatttaaagaaaagttactgaggccggatgggatggcttatgactgtaatcctagcattttgggaggccgaggcaggtggattgcttaagttcaagagtttgagaccagcctgggcaatctggagaaaccccatctctacaagaatacaaaaatgagctgrgcacggtggcagacatgtgttgtagtcccagctacttgggaggctgaggtgggagaatcaattgagcccaggaggcagaggttgcagtgagtcatgactacgccactgtactctagcctgggcacgcctgtctcaaaacaaacaaacaaacaaacaaacaaacaaacaaacaagcaagcaaaaagaagagttaccgaacatataccttactgttttgtgttctgacttcaaagtcagcaacaaacaataataactacaattctaacttattggggtcttaccctgtgtcagtttatatcctaagcactttatctcattgtcaatgacaaagcaataaggtaaatattatttctatttcacatatgaagggactgaggaattagagaagttatatgattttcccaattaagagagtcgatataaatagtggcaaagtaatttcaatccagttctttgtgattatgcactactcctaactactgcactctgatatggataatatagaaatgcacaggctatggcagagacacaacaaaaaaagagaattttagaccaatatctctgatgaacatcaatgcaaaaatgctcaataaaatactggcaaaccaaatccagcagcacatcaaaaagcttatccaccatgatcaagtgggcttcatccctgggatgcaaggctggttcaacatatgcaaatcaataaaagtaatccatcatataaacagaaccaaagacaaaaaccacatgattatctcaatagatgcagaaaaggccttcgacaaaattcaacagcccttcatgctaaaaactctcaataaagtaggtattgatgggacgtatctcaaaataatatgagctatttatgacaaacccacagccaatatcatactgaatgggcataaactggaagcattccctttgaaaactggcacaagacagggatgccgtctctcaccactcctattcaacatggtgttggaagttctggccagggcaatcaggcaagagaaagaaataaacggtattcaattaggaaaagaggaagtcaaattgtccctgtttgcagatgacatgactgtatatttagaaaaccccatcgtctcagcccaaaatctccttaagctgayaagcaacttcagcaaagtctcaggatacaaaatcartgtgcaaaaatcacaggcattcctatacactgataacagacaaacagagagccaaatcgtgagtgaactcccattcacagttgcttcaaagagaataaaatacctaggaatccaaattacaagggatgtgaaggacctcttcaaggagaactacaaaccagtcctcaacaaaataaaatgacacaaacaaatggaagaactttccatcctcatggwtaggaagaatcaatatcatgaaaatggccatactgcccaaggtaatttacagattcaatgccatccccatcaagctaccaatgactttcttcacagaattggaaaaaactactttagagttcatatggaaccaaaaaagagcccacattgccaagataatcctaagccaaaagaacaaagctggaggcatcacgctacctgacttcaaactatactacaaggctacagtaaccaaaacagcatggtactggtaccaagacagagatgtagaccaatggaacagaacagaaccctcagaaacaataccacacatctacaaccatctgttctttgacaaacctgacagaaacaagaaatggggaaaggattccctatttaataaatggtgctgggaaaactggctagccrtatgtagaaagctgaaactggatcccttccttacaccttatacaaaaattaattcaagatggattaaagacttaaatgttagacctaaaaccataaaaaccctagaagaaaacgtaggcaataccattcaggacataggcaagggaaggacttcatgactaaaacaccaaaagcaatggcaacagaagccaaaattgacaaatgggatctaattaaactaaagagcttctgcacagcaaaagaaactaccatcagagtgaacaggcaacctacagaatgggagaaaatttttacaatctacccgtctgacaaagggctaatatccagaatctacaaagaacttaaacaaatttacaagaaaaaatcaaacaaccccatcaaaaagtgggcaaaggatatgaacagacacttctcaaaagaagacatttatgcagccaacagacacatgaaaaaatgctcagcatcactggtcatcagagaaatgcaaatcaaaaccacagtgagataccatctcacacagttcgaatagtgatcattaaaaagtcaggaaacaacaggtgctggagaggatgtggagaaataggaacacttttacactgttggtgggactgtaaactagttcaaccactatggaagacagtgtggtgattcctcaaggatctcaaactagaaataccatttgacccagccatcccattactggtcatatacccgaaggattataagtcatgctgctgtaaagacacatgcacacgtgtgtttgttgcggcactattcacaatagcaaagacttggaaccaacccaaaggtccatcaatgatagactggattaagaaaatatgacacacacacaccatggaatactgtgcaggcataaaaaaggatgagttcatttcctttgtagggacatggataaagctagaaaccatcattctgagcaaactattgcaaggacagaaaaccaaagactgcatgttatcactcataggtgggaattgaacaatgagaatacttggacacagggtggagaacgtcacacaccggggcctgtcgtggagtggggagatgggggagggatagcattaggagatatacctaatgtaaatgacaagttaatgggtgcagcacaccaacatggcacatgtatacatatgtaacaaacctgcacgttgtgcacacgtaccctagaacttaaagtataataataataaaataaatacataaagaatagtcataatacaaattagatatagagatgaaaaagaaatgcacaggctgtcatggagattgagaggtggacaggtaagcaagcctaggattcatgaatcttaaagtatatgggttagctaaagctatagaggcgggtagagggtaatgggtggggggaagaaatgaattccaggtagagggttcggaaagcacatcttattattgttacttgttactacaaatatcaagtgaggtttgcatgatgcagcaaaagtgaggtccaaatttttgagaatctgtgttaaaaagcttgggcattatcttgtatgayagagagatactgacaggtttcacccatatcgatgacattgtaatatttgtgttttaggtaaattactcttgaatgggtgaggagatggttttaggagagacaaaactggaggaagggaagccagatttaatcttycatgtgaaagatgagcaagactttggattaagtcagtggtagcaagggatctatttgagatgtaagtttgaaaaataaatttacaggagctagtgatgcttagctttgggtgatgaagcagagaggagttaaacaaaaagtgccaggcttaagcctgtaaaactgggtggattgtagagtcaccaattaagacagtgaaatgcaggaagagggtcaggcagaagatatagtgagtttggtttggggcacattgtctttggtatagtcaaatggtgatagtcaacagaaattgaccatatgagtctgatcttgtcggcagagatttggggtggaaacagttgaggaattattatcatctgtggtaggtgctattattacagtgactgagtcatggtgcatgggggaataatgggttgtagacggattactggggtatctaggttcattgaagaatgggaaacccacagaagacacagaacaggaataatcagatgtataatgagaaccaatggtatgtggtatcagagaaacagacacaatttcagaaaaatgttaaacattgtgcagtgctgtgtagaggtcttatgagataagggttgaaaaatgtccactaaattagggaatggagacaactggtgacttttgcaagaagcgatttgatagaatgatcttgacagaagccgtgacacattgggtgtagaagtaaatgttggattgggacttgaggcagcaagtagggaatcctttttcatgtattgtggatgataaagggagaagattaagaggtagctacagatggagttttttggggggttgagatggtagaatttagcagatttctaggttatgggagaggaggctattgagagggaggtgttgaagatagaggagggagtatgaccaatgcataggtccccagtgagtccgaagtctggaataaagagataagtagaggatggaccttgcacgggtctacagacccatttctttcctgaaggaagggaatgaagatggttgtacttttagagcatgtgtgggtcatatgtgttagacagtccagtgattacacagctggtttcagccatctggaggaagaaggaagcagtgataactcttgaaaatgaatgtggtgagacacaaagagagtagtaagagattgtactggtttctgaattgctagaattaaaaacaacagcaacaaaagcaaccaaagaattgttctagggattgtgtctyagtctgcagtgacaaaaatgtggaggttgtgcagaaataatctatgaattgtcgaagacctgaactttattctttgrctttggtgactttgtctatagttgctgagacacgggcaggatgagaatattttctttatagcagtggttttgagacttgactgctcacaggtgttacttgtcgaacttaaaaaaaaataatgatgccgaagtcactctcagaaattctgcatcatcaatatttttaaaatctccccaggtgatttgactatgtagccatgattaagaaccactgctgcagacctgtggttagcaaatgggtttttttaatagaagaccagatagtaaatattttaggcttcgtggtctatacagtccctgttgcaactacttaattcacactgcaaaaggaacatagataatagataaataaatatgcccatcttccaataaaatttttctttgaaattttattatgacttaattgacaaacataaattatatagatttatattgtgcaacatgatgttatgaaatatgtatacattgtagaatggccaagtcaagttaattaacctatgcattacctcacatgcagtgttaactatcgtcaccatgttgtgcaatagatctcttgatcttattccttctaactaaaattttgtatcttttgaccagcatctccccagtgcttcctctgcttcctccaccagtccctggtaaccaccattctatcctgtgcttctatgagtttgactttttcacatttatatataagtgaggtgatgcagtaatttctattttattttttatgcctggcttattttaattaacacactgtcctccagattcatccttgctattgcacataacaggagttccttctttttaaggctgaataatattccattgtttatacatacaacacattttctttatggacacttaagttgattccatatcttggctattttgaataatgtaagaaagcttttatttatggacacaaatttgaattccttataatttttaaatgttgtgaaatattattattgttttaattttactcccaaccattagaaaatgcacaaaccatttttatctcataggccaggtaggcacagggtgcagtttgctctggatccttgctgctacccagcgtggtcctgaactcgcaggataggcatgacctgggagctaattagaaattcaattttgaggccaggtgaggtggctcacgcctgcaatcccagcattttgggaggctgaggcaggcggattgcctgaggtcaggagtttgagactagcctggtcaacatggtgaaacctcgtctctactaaaaatacaaaaattagctggttatggtggctggtgtctgtaattccagctacttgggaggctgaggcacgagaatcacttgaacccaggaggcagaagttgcagtgagccgagatcctgccattgcactccagcttgggctacaagagagaaactctgtctcaaaaaaaaaaaaaaaaaaaaaaaaagaaaaaaaaattcaattttgagcctcacctctgctgtactgagtcagaatctacattttaacaagatcaaagtgatttgtatgcagattcaagtttgagaactacttatctgctttaagccatattcccccattcccactcagctcagaaaatgtgggagcctcatcatttcttctgttgtctcagggaccttttaatggaagcatgagagcattgaaggaaaactatggcaacaggctgtcatccaggtgttctgagttgcttaacaatttgggtagtcttgcttttggttctagaaatccaagtgggaagttatcattctcctaaaaaaatgaagagtttaatttatattctagcaactatagactgttatttttacagaatgggcatactaaggttcttacagggagaaccaaactttcctttaagagacaccttgaatttattcaacagcctctataaggacttttttgagacttctgagaactaaagccaagagaatgtaagagatagttttagctttgctctctgataggataccatagaagaatattaaatatataacaactagcatggacactcagagtgagactgttagtgaaagaagtgtcccccattttttgcatttttgaggttcagaaagtgaattatttaggaaataagatgacttctgttagataaattggaagaaagtggaatttgaaatgccttaatacaactctgacatggggaagtcaaattttttttgaaccttagttttatcatctataaaatgcagataatgtttttataccaatttttccgagaattattatgaatattaaatgtatgataatttgccctgaaaagtactcattgatgttcagaagtagaataagccgtgcttctgtgtgtttaaaagagcttgactaagactgtgcatttgtaggctgacgaaacaacctttaggactgtctaaaacagtcctcaggttgaactaaaagtacttatcctgtaagaaaaaaacaatttccttctagcttcacttattacatttttgccgatttacttcccatttgactctggtaagagtaagattaataatgggactgcagcaagagtaaaatgttaatcccccaggatgtggagagaaaccacatgcatacaaatgtgtttaacattgatttcccacgttatttattttggctaatttcctttaaattcacatatatgtgtggattcaggcacctgttgaagagagtattaagcatttacttattttgtttattcatctttttttattacctcattctccctcttttgtaaaatacaaaccatcacttctttctttaagcagtaactggacaaagcaagacaaaaaagatcatgggctcttaaacttttatgctatcttatatgaccatgagggaatgacccccttctgaattcctacattccatttcaacaagtttgattttatagaaaatgtaaaatatgaatactatactggtctttaaaaataatatatatcagatagaccttaccaccagagtcattaatgtcatgccacttttaagagttgaaaactctgatgatagattactgaaatggttaaaaatgcatgcagagtggtcctttccagcgatatctcccaggacacttctgtgatgtgtacattatgctccagccaaagcagactgtatctcaaaggagcatgcatttttctgtggttggaactttgcttataatattctctatatttagaaagccctctagccaccttttactgacaaaattccatccatcctttaaagctcagctctcaagcctcttcattcacatatccttcctgatcctgccaactggatgtgatatttatctcctttgagccctcaaagcactttgtatttacctctcttatggcacttagcttattttgccttatgttttagttatttgtgacttcgacttctggacagcagggagtttattcttgaaactcttgaaagttaatgctcctatttcctcacaaagatcattgtggaggagagcaaagacagactggttagaaaagggacattatatccagtctaagttgcttttgtcttttggatagtattcatcaaaggggaatctattatatttaataaggggattgtacctatgtttgaatacgtaatacaatatgttaagtaggtgaatgaaaatgtatatagagactgcagagaaatccatgaggtaatgaggaggagaaagagcttgctggtattcttgtgatcaggaagatgaggtgacttgcaagctgttttggacagtgtaactgatgctattgatggtccattccatatcccttctgtccactctgtgttttccttctttccttctgagatagccctgcactcactgatggctgcctacctcaaatatctgtctctcctcaatctctgactgaggtcttgctttcaaatcacaggttctagcttacctaacacagggaagttcagaaactccagagattttatgtctccatggacaaccctcaaccagtgaggtgtgggggtcagagggttgaatattccacgttctctatttcttttttcttttcttttctttttttgagacagggtctggctctgtcatcaagctggagtgcagtggcacgatctcagcacrctgcaacctcygcctcccgggttcaagcaattctcctgcctcagccttttgagtggctgggattacaggcacatgccaccatgaccagctaatttttgtatttttagtagagacggggttttgccatgttggccgggctggtcttgaactcctgacctcaagtgatccacctgcctgggcctcccaaagtgctgggattacaggtgtgagccaccatgcctggccccacattctctatttcttgataagacaattctgaggtatatcatatgtcattaatcagaaagccccagtaggattgcatctcggttggccagagcagtaacctgatcggtaacactttactggcttttttttttttttttctaattttcttgttatatctccctaaattatgcttcccgggatcatgtatcaaatagggtcttgttttggatcatctcatcctagtacattctaatcaagtgtagctgaagacttggcaaagaataaattagtcctgttataaggcccaatctttttattagtgatatcataatcacaacagctataggtaaaataaccacagagtaatgagagtgagaaagatataatttatttagcatgattttggagaagaatttttggaggggtctggaggggatttgtgcagtgaacaaaggattgaattataagaaggatgaccttggggcatagataaaagtgattgtattgagccttcatgcttgaaaattgaatgtgtactacatacttctcatatctcctgttgactttgtccataatcagtataaataaaatcaacatgttttataactccactgcacacatctgacatgtctgattgctgtttcactgccactgcaatgtggaaagtgaatctagaaggagtataatagatgawtatacattatcaccctgctgcattagtgaagaggtttgcaaaggactgattttgatgcatcagtcaggaaatttttttaaaaaacaaaatttaacttgtggcaggatggtatttatactaatttcttattagaaaataattattttaccatttgaaggtagattttgatttaaccctaagggaagaaaagccaaggaaaaaaaatgttggaaggaaagaaattaaaaaatctaaaccctgagaggatttaaggtattaaaaaatatatgaggaagaaattaagactcttaggtgataagtgacaaaaaacctaacccaaattggcttcagccaaaaagagaatttattgttttatgtaactaggaggtccaggcatagaactactctcaaaccagcttgattcatggttcaatgtcactaggatcattttcagacccagcttctaatagggtagggtggtcaccaggagattgagagtttcctcaccacaataaaagatacaacaggaaagagaattcgtaccaaaatttaggaattgtttctccttgggtcttattagcctgatttggttcatgtgtccgtctccaaacaaaggactggataatgaaatgagcatattagcttattttgctttttgctttccaatctgtatgtcattaatttctttttctggcttcattgcactggctagtacccctagtacaatgctgaacagaaagggtaagagcacatcactactttactcctgatattagagaaaaatggtttagtgtttcaccattataatggtagttgtagggtttttttaaaaaatagatttttatacaaaaattagctgggtgtggtgatatgtggctgtaatcccagctacttgggaggctgaggcatgagaattgcttgaacccaggaggcagaggttgcagtgagccaagattgtgccactgcactccagtctggtgacagagcaagactccatttcaaaaaataataataacaaaaataaaaataaatagattttatctatcagactgagaaagtcttctatttccagtttgctaagtttttttttcttacttcataaattgggttgaattttgttaaattctttttcttatcaattgagatgataatatggattttcttctttcttcctgttagtatggtgaatttattagtctattttccattgctataaaggaataagtgaggctagatattatataaagaaaagaggtttatttggattatggttctccaagctgtacaagaagcatggcaacagcatctgcttctggtgagggaagcttacagtcctggctgaaggcaaaggaggagcaggcaggtcacatagcgagaacatagaagtgcatgtatccttttaatataatgatttctttcccttggggtagatactcattaatggctttgctggattgagtgacagttctatttttagttaagaggcgatatactcttcatgaagcatatatcttcatgagagccaacttctatctccatcttggcatcatttattaatgtgtctcctgtgacgaggacttctgtgacaggagcagtgcataaactgctcctctaactggcatttggtgagaatctaaccacctaccagagtatttctattgactttttgctgatgtgttggatttctgtgcttatgcattttgcttactttgtaccttacttaagtaatgagaacctactttcagggtccttcgatagtcatagctcatctcaggccagtcgccagagataaagaatatgagcctgtaccctaaaggagtgatggagatgtaggtggggaaaagatttttgcacccttacttgaatggttttgaacaaggccagatggaactttccaatccgtataatcatcaagaaggcatcccartacaacccttggaagttgctaaaatgcttttgttttatatcctttcatcttcatgttactctttagctgtaatttactccttttttgtcaatcatgaattgttcttaacttttgagattaaggaaggataactggtttgattctttttttcttgtggaatagcctgtatctcataaagcctcagatatatttataaaaattatagtgtctggccttaagaaggaatatttactgtcattacaagctgaccaaaaatttccttgggctcttattacaccaaacctgagaaataattatatgacaatataagttacagtagtaccttgtgcaattaccttagactttaagaggtctgctatacactaggtccaatagggctatcttgaaatgattcagagaagggctctgccctctgtgtgctctacaactctgttaagtagaagtgtcaggctctgtggactggacaaggaaacatggaagtggaatagcatgttaagaggctactaatttatttacgtaggcaagacactgttagggcccaagcagagaatactctgttaaactgtgagcattcaggaaaggtaggttaaggactctgtattctctgaggtttgcccttccaactttgcagtctgggaactgaccattcatttaatctgaagagtgattaagccctagggaaaatgcactcacaatgaccaaattctggttttagttagaaactagtttaataatctaaaataggaaatacctcttcctagaagggaagtttacataagaccagaaataacaagagctataaatcaagacaagaaaacaacttggtgaatatttagtatttgaacaaagaaggatccccaaggaaaagccttttccaatttttggatagtcttgtttagataggggtcctctcctcttgaccatgattctgtttctttctttctgatacttttcaaaatgctccaaatttctctcttaatattttgggtttcaacaacttttttgtttttttgcaccaaacattccagattgtttcattaaaacacatttattaaacacgcataacaataatagccaatatttattgagcgtttatgtgccaggtactattctaaatgtctttaccccttatatacacttggtaaaataggtatttttatcccttttttttttcaaatgaatgagacacatggaaactagatatcttaccaaaggtaacacaattaggaaaggccgttctagaacgtgtgctattaagcattctgtaattctgtccccgtctttcttttgagttgctggagacattaaagatgatttgatagaatctattttcattgtcaagatgagtgaacagggaaagttatccaaacttagtttatggctgacataaaaatcaagctgtcttctcttactgtgctatctgacatcctatggcctggaaaacaactgcctcaattaagaaagtcaacttacgttataagaggaaaagattttctttttcttttcataaacttctatgggggaaaatttattattagaaaaataaatccccttaacaatatgcaatacaaagtcagtgaaatttccagatactgtttattggtacctgttttttttttctgttctttcttaaaaatccacttttaaaaatacatctaggttttctctttttggcttaaatgtgttggaatgggaatccatgtatgtattttaataagagctatattaaatggttctggaaatcaaatgtctgtctctctctcagcttttagaaagtccgctctcattgcttcatcctgatcgggtaggattcatcctttttagggtgagaggaagttcaatctccaaaaagcttaagtttctggactctccagagcaagcactgccaactttctgatttatgtgtggttttagtgatgaggactactgtcttccatgtatttaggtgagaacacaagagactttttactggaaacctcgtgttgcacttcacttaatttccaataggttagaggcagcccacggcatgattatgtgcacaggggcattgtctggtctcaatatctgtgttacttacttcrttttaaactgtacccttattcctcatgtcctatctttattcttatatttatttttccattttccttgttttgcctttggggagtagwtgactgtaaactatatgttaaacacatttttgctgtcattttccatgattttattaggttttgtacaaaaatgcaagtgcttttgttgcttacatggcacaaaaataaagaagtaggtaagcttagcaacattacaatctgtcaataaatagagagttccatgcaagctttattcacagatacataacataagacttgtcatgaagaatgaaagctgagtagtattttatccaaaacacatttgattagggtacaatttatctcactgtattaaaaacagtggtaacacttgcagggacactgaatttgctagagggactgtaagcctaaaggggcaggggaggaacatttgtaaaacgggaataacgggaataagaactatctttttaactctcagtatgttgggtaaaaagagaaaagttacaacagacataaaatgggaggggccatttgaaaattcaggagaatgttcacataacccaaacctgtcaatgtgacttgaacacaggayagagtaattaaaactttgagtttctgaggctgccatatctctgctttccatgtgattagatgattcacaacttctgtctactcaatttcttcatagtagaatggaactaatttcatgcagtttgatggcaagcatgttttcatgttttctttgtctatatggcaaacaggttgagtttacagtgcaaacatgcccttttaatctctttgaggattagttttggaagcagcatctgcttctgggattctttttgactggcttgctggctgatgcaatgtaatcaatctagatgaaattgtgcattacattcttgggcatttgtattctttggtgggtttccttttccacgctgtagccatataggaaaaggagataaggaagggatcaggaaaaggaacacactggctacactaaggcactgaatgtgaagatgactggtacaggtcacttaggaatggaaggagatggatgagcactgcaatgtgcaggaaaagggcctctgccaggacctcaggaaactccacttctgggtgactttgagcaagttgcccagttttgctgggcttcagtttcctcatcagagagaaaaaaaattagagccgatgaagtttcttacagttgctattgcacaattctaagcaaaagatggaagatgatattggttttacttgttaggcaaggctcctgacatcttgtaggtgttggtaccgagacaatgacattctctagtctttatttgtcttccttggtctgaggaagacatactttcagagaaggatccacttgacttttttttttttttgaggtggagtctcactctgtcacccaggctggagtgcagtggcacgatctcggctaactgcaacctctgcctcctgggttaagcgattctcctgcctcagcctccctagcagctgggattacaggcatgtgccaccacacccaggtgatttttgtatttttagtagagacagggttttaccatgttggccaggctggtctcgaacccctgacctcaagtgatctgcccaccatggtctcccaaagtgctgggtttacaggcatgagccaccatgctcagactccacttgaatttgttgctatctctttgcccctagaggagattttgatccatattttgatagcataacttctcgtagagaaaaatgcttctcaggtcaacaaagcctgttcagtatgattccattctctgacaggttcttaatgtttacagagagatgtgccctagcagtgctgggaatagtggtttctattcctaattctggtgtctttatagaattagctgggctttaggttgaaacacaataccaaagctctctggtatgctgagccagggaatgtttttcaatttttaggcctctttattacctgaaacccaaacctaaaccttatgactactctgtaagctgcatagcaaatcaaagagatgagagcctcacctggcagatacccctcaacagcagaagtgtttaaatagccaggccttctcctgagctgttttggcaaggctaaagtgtcagtatactcatggctggaagaagtaagagagacccaatcacatgtatacagtgaccttatccctaggaaattcagtgttttatgctcttttaaagtgatgtagtatatgtattataggatatgttatataaatatcgaccacagtttctccatttgtataatggggataatgtcttttctttttctttttctttaccgctaagataatgtttccttctttaaaattagcatttgaacatgttttaattattacaaagcacatttactttgcttcttataatatcagctacttagtatagaaaatattttacaaaattaatgtttttaacaatgaggagctgggcgtggtggcttatgcctttatcccagcactttgggaggccaaggcaggtggatcacttgaggccaggtgttcaagaccagcctggccaacatggcaaaaccctgtctctactaaaaatacaaaaattagccaggcgtggtggtaggtgcctgtagtcccagctactcgggaggctgaggcaggagaattgcttgaacctgggaggcagaggttgcagtgagcggagatcgcgccactgtactctaccttgggtgacagagcaagactctgtctaaaaaaaaaaaaaaaaaaaaagaaaaaccaatgacaatgaggaaatgttagtttcaatttatgaaatcctataatgcagattttcatggtgatgccattggtgtgaccacacagtgcgttcttcttgtctgctgcccagatagagccaatttatcaacatgggaattgcaatagagtttaatactcatagagctagctaaatgggagacaggagttttatcattccttaaatcagcctccctgaaaatttggagcatagggtttttcgaaggtagtttgataggcaggtggctagggaatgggggatgctgattggttgagtgggggataaaatcatagggagctgaagctgtcttcttgctgagtcagttcttacagatgagatgatacagtgtactagtctggatgacgccagctggttcatcagaatgcagggtctgagaaatacctccaataccaatcttaggtttgacaatggtaatattatatataggagtaactggggaggttaggaatcttgtggcctttggctgtgtgacttgtgagccataatttctaatgttgtggctgatttattagtttcacaaaggcagtgtggtccccaagcaaggatgggttcattttggggagggactgttatcatctttgtttcaaagttaaactataaagtaaattcctctcaagtttggcctacacagaggaatgaacgagggcaacttggaggttagaagcaagatggagacaggtcagatttctttcactttcagagttttctcactgtcataattttttcaaaggtcttttcattaggcaaggaaattgatttatttaggttaactagagagttaacctgattagggtttgttcaattgtgagttaatgtacactattctctttattcaaaaagttgtaatttaatcataagaatgtatctcagggataagtattccaaaaatctgtcctagacttttgagaagtttttaaaagagtaaataatattgcaaagtatactggttttttaggtgctcattcatattcaatgacagctgagagaattctgaatttttacaatgatcatttggcatgggactagaaacaaaggatccctcagctatttttgctaagctttaaattatacatatggacagaaaactgggaaatatgatgatagtctaggttcttggttgaaaacaagtttcgaaataaagtctaccttacaaaaataaaaacttaaatacatttttttgtcaaaaaagataaaaaaaagaacaaagagcttgaaggccttctttgaagactacaacaaagaaaacaaaatatgaatgaatataagaattcaaatgcacaaacgtacacaaaaatgcttgcaattcaccttattgtcatcagataaattttgccgttcacgtatctttgttgattcaaggaaaattttaccctgattggctctatgaatagaaatataataaatgtagcygtgtgatattccaaaagctggatgaaatggcttttagtatttaagcataattccagatattttgttttaataaaacaatgaaagttagcatttgtcaggatattatctgaaattaatgtaaatattcaattatttatatatctttaaagttgatgaaaatataaaatattatattaaaactggcaaaaattaaaaaaaagaagtacgtcatcatttatggtcctctttaagtcttaagaagatagaaatagtaagcttcagtactaagaagaagatcatgccaaaaaaaagagtattgttctgttcagtgttaagtattgaagaatgaacagcattgacaataactttgtttttgatcttccctcgttctattttggcactcctctgcaaaaggatttggcagatctgagcttttagaaagcttttcttaggaatgaattaagagtccccccctcccccaatttacgaattggcaacatagactagaagaaaattttcatttatatttcctctaaacgagactatcttagcttaaaacaggacatattctctgaaataagagccatccaattcattccctagtgatgctggaatagttttctattaccataaactaccttacccctgagttcagacgttttctttagttctattttacctattttctttgaaaggatattaatggtttattgatttcgatgccgccaagcttctccaagtcattcagattaaatgtacttttctgtagtcttttggtagtcattatgtaaaaaaatttggaaggcaaattgaagatgataccttttttatttaaaagacagtattgctagagcatttcttaaacttgaaagcaacattaattacagttacctccttttgtttaaatgacagatgctcttggttaatgtataatgcatatatgtgcatattctatttatcatatatattggagctactattgagaaaatattctttagttacttttctagagatactcatctatattactagtaatttaggaaacctagtccttatcatttgaacacttttgttcctgaaaccatgttaaaaactgacttctgcaaaccgaaggattgacttgattatttttatcccatcctagtatgcctcccgctttctgcttacttagatggtgacctcgtggaactcctcatgaagtcctaattttccaagtcaatacccaactgtctaagaatatttttcagccattttctttttcacagtttacctgggttatagtttattaccaaagcaatttttcccacagttgcatcattgtggagggaatctcagatttatagaatttttaaaaactttttttcttttctaattacaacttccattgaacccatactattaaaataacatttatgagctttttctaattacgaaatggaagcattctcattgttggaaatttggagagctcaggaaaataccaaaatgacagggaaacacaaaacaaacagaagcaaaatgaagtcatttgcccaaagataagtagtgtgggcccttcaaatagttattccattcacctttaaccatttatgttaataatacctcagtgatttgaacttattttatgaacagatacacaaaggcctacatggttttggcctttattttctgttctctctctctctgctttttgtttcttttgtttgtttttttgagacagcatcttgctgtgtcgcctgggctggaagctgtggtgcagtcatggctcacttgcagcttctacctcccaggctcaagtgatcctcccacccyagcctcctgagtagctggaactgtaggcgcaagccactgcacctggccaagttttgtattttttgttgagctggggttttaccatgatgcccaggctggtctcaaacttatgaactcaagctatctgcccaccttggcctctccaaagtgctgggattacaggtgtgagccatcatgctgagctgtctctcttttttatttttatttttgagacagggtcttgctctgttgcccgggctgtattgcaatggtgcgatcatggctcacagcagccttgacttcctgggctcaagtgatcctcccacctcagcctccaagtagggactacaggtgtgcaccaccacacttggctaaattttttattttttgtagagatggggtctcactctgctgtccagtctgatcctgaactcctgagctcaagcaaccctcttgccttggccttccgaagtgctgggattacaggtatgagccaccatacctggcccctgttgtctcttactacctcagttcaattctattgtcattgttttggctttatagcaaatttagacatctattttcataaaccctatagtattcttcatttttaattttttttgctcattgtttcctgtgtattattttggataatttttttttttttgagacagagttttgctcttgttgcccaggctggagtgcagtggcataatctcagctcactgcaacttttggagaaaattttgagggaaaatgtcaagtaaacaacagtttatcagattttgattggcattgatttaaatataaaaattaaattgattagagttgatctgttcatcatagttgagtcttcccttccaggagcatagcactagtgaaccctcataatagcaagttttgtagatttcttcgtatacattgtatacctgtcttagtgtctgtgtctagatattttacatcttttgggtgctgtagtgggtagaatctttgccccttgtgtagcacgagcgtatataatctaagcatggtaattgcttatattagatatgcaattaccatgcttatattgtattactatgcttgtattatatatatgtcataactggccacatcaccaaaatcatttgttacttctgggtagttgaaattcacatgtcttgagctgctgtattatataaccttctttaattttatttagttttttcaattattactttaaatccagttaatactttttgtcttgaatactacaatatttatttgtttatttgatattactttagttctttgtataactttgaccataaatgaaggcaatagggagacactatttgctcccttctacttttttcttccttcagcttccagatttgttgtatatttgatgtttttatctcagttactacctcagccactatttttaactcatatatcttttctttcaataattattataccattttatattattttattttagcagctattttggatataattctgagatcgagtagtggcaatatttattcccatttctttcatagcacttgcatattcatgagtttttttgtcttacctaacttctttgtggtaggaatatgcctccaaccttttattatttctctaggaggcataggtggcatattttgtaagtccttacgtatctgaagatatcattctgttgtgtttacaagtgaatgaaaatttgtctggatatagaattcttggtaagcatctttccccattgaaaagctgtaattttattccatacacaatattgtgaagtgatctaggccartctgacttttaagtcttttttaaggactatgtctttatctacaaaaaaaatattaatcaggattgtctaggtttaatgaattacaccttatataaggtgaatctttttggtcagcmcaaaaagggttagatttagttagatttttattcatcttggtaattttgttacagaaaacgtctgattaagctaaaaaaatatagagtgggaaaaatggctcttctcacttttctctaacacactgtcataagccaatgaattggctgggcgcggtggctcatgcctgtaatcccagcactttaggaggctgaggtgggaggatcacttgaggtcaggagttcaagaccaacctggccaacatggtgaaaccccatccctactaaaaatccaaaaattagttgatcatggtggcacatacctgtaatcccagctacttaggaggctgaggcaagagcatcgcttgagcctgggcagcggaggctgcagtgagccgagatcgtgccactgtgctccagcttgggcgatagagtgagactgtgtctcaaaacaaacaaacaaaaagccaatgaattatacatttgaggaaagaacaaattaaaaagtcctgctgtttgctgcaggataggtggaactggaggtcattatgttaaatgaaataagccaaatagagaaagacaagtagtggatgtcctcattgacatgcggaagttaaaaaattgcatcttaagaagatagaagtagattggtggttgccagaggccaggaaaggtagcagggagaggggggacaaacaatgatttattaatgggtacaactatacagttagatagaagaagttaagacctgatttccaacagatccgttggttgactatagttaacaataatctattgtacatttcaaaatagctagacaggattaatttgaatgatcctaccatacagtagatacatatttaaggtggtggatatcccaattgccctgatttgatctttatacattacatgaacrtatcaaatttacatatgcagcccccaaatatgtacatctattatgactcaataaaaaaagtaaattattcaaaaaaggaaaagaacataatttttttgatggtggtggacaaaaacgaggcagggcatttyttcctgcctcctttaggcccacgccatccacttttcccacccctgtttaagcrctcaaatgttctttcttcggctgggcattcttgatggcaaatatgatgtaaatgacttcttgttcaaaggtggaagtcagaggctgccagggtggtttcctattcaatcatgccttgtgtagtgttcccaatccacaaaatcttgtccattagaccagagactgcactgcttgtccaagtcctcacagtggtcacttcagaagccactcactgttcatgcacttcttttctcataactctcactcacaaatagactgcttgtttcttattggtgcatctccttaacttgttaggaagacaaactttaactaggaactaacatttcttggtagccaaaatgtgctgtccaatacaaattcctgttattgctaggaggaattatggtttgtaaaattagctgatgctttttctcctttcttcatcttttcaagataagataaacaacaactactacaagctatagctttaaggaaagtttcttacgcaatattttgttttgtcgaatttgtttagatttcttctttattaaaatacattatttatatattgaatctccattttatgtctcccataattcttatcagttttggggggcattttgatatgttcctcccatttttcatcaatcttgcctggattgattttctgcaatgttggttctgacctttacaagttttattgtaattttagactgtattaaggcattcttctctccttactttgttttaatggttctgctaattttctttttgtttgttttttcttagctcatctttactttctctgtttggagggtccagagagttttctttaatatatgagaggataaataaatgctttctaaaatttacctgttttctgccatatttatgttaaaagtatgctctttacctcttacattttatatttattcccttttgtagggcataatatcttcatggttattattgtatcttcttatctttttcattgttaaatgaaaaaagatttattccgatcttgtatttgcccaaaaataacatggatggtttgtttctgtatctcctcaatattctcttgtacagtagtattctcccttcacatctaacattgaatggctgattagtgtaaatttatattagtgaccaagcaatttggagaaggtggagacatgggacatctaggctggaagatttcctttctggttggtttactctctgtacatggggaaactgctgwtccatgggccagctttccacagctagtttcttttcctcccggcatctcctcaagaatactgcttggctgtgtctggcctccttcctggagctcctgcctgctgtttcaggcaagaaccctacttcaatggggaaagtcagattcctaagtcacttcatccaccaaaataaactccagatggattaaagatttaaatgttaaaaaaatcaaactttgcatgtactttaagaaaatagaggaaaacatttatatactatttgggcaggaatgtacattttaaatgcaatacaagggaaaattaaattactgataggtttaactatttatttctcacaacatctgtatgtgagaaagctcactccacatacagtattatacagtaaatagaaatatttataatgtaatttgatggccaaagattgagtctttatgtataatgaatttttacaaattaataagggaagcaggaaaatcctaattgtaaaacaagcaacattgatgtgatccataaaaagaatgcacaaatggctagtgacaacataaaaaaaacttacaatctcattagcaatcaaataaatgtaaataaaagcaatgaattacagttttctttattacattgataaatgggaagaaaagataataatactagttcaggacttgggaaagtgtctttccatgactgcattctttttttttatagctgcatactatttcatgggttggatgtaacttggttaatttccctattggtggacaatatattatttctctgttatttgctattactataaatactgcactaaacattattttatatgtgaataacatatggcttttaaatctacaaaatagattatcaggaatgagattgctatcactaaggaaagaaagaactacactagtccccacttatctgcagttttgctttctatggttttacatacccacaagcaaatgtggtctgaatatactaaatggaaaattcattagatttaaattgcatgtttctgtgagtagcaaatcttgtgatactctcctttttcccacccaggatgtgaattattcctttgtcgaacatatccatgctgtatatgctactcaattgccatagccatctaggttttcaggtcaaataaacatagtatatatagggctcagtgctgtttgcggtttcaggcattcgctgggggtcttggaacatgtcctaagcagatgaggggggactactctgattgctagacttatttccaaaaatagcagtcattcacatttttaacaacaatgtatcaaagtgcccctgccctacatctaattttctataataatgggtattgtcacattaaaaaaaaattcggccatgttggctgggcgtggtggttcatgcctgtaatcccagcactttgggaggccagggcgggcagaccacttgagatcaggagttcgagaccagccttgtcaacatgttgaaacctcatctctaccaaaaagtataaaaattggctgggcgcggtggctcatgcctgtaattccagcactttgggaagctgaggtgggtgaatcacctgaggtcaagagttggacaccagcctggccaacatggtgaaatcccgtctctactacaaatacaaaaagtttagccaggagtgttggcaggcgcccataatccaagctactcgggaggctgaggtaggagaattgctagaactctgggggcggatgttgcactgagccgaggtcacgccactgcactccaacctgggtgacagagccacactctgtcacaaaaaaaaaaaaaaaaaatctatctatctatctatctatctatctatctatctatctatctatctatctatataaaattagcggggcgtggtggcaggcccctgtaatcccagctactcagaggctgaggcaggagaatcacttgagcccgggaggcagaggttgcaatgagcctcaatggtgccactgcactccaacgtggagacagaatgagactccatctcaaaaaaaaaaaaaaaaaaatttggccacataatgtgtaaaaaaaatgcatagcaatgctattttagtattgtcttctctgattcagattgagtttgactctgtttatgtttattggacatttgcatttcctgttcttttttggttgcttatactttttttttttactaatatgtagaaactctttttaaaatgttaatattttttttcccaatcctctattcatctttgactctgtttttattttttatctaatcaaatatttctgatttttcttctagaatttttgggttttctacctttggttataaaaaccttgagtaaaaagtctcccccaaaatttattctcctaaattttattctatttttacttattttcacatttgtgtctttactccactcatatgaaacatgatgtgaaataatgacttaatttacttacagatagataactagttttgacagtgttttgaataaatacttttttcttactaaaatagaattctacatggaatatattaattacatgtatatattgggacctactactggacgctattgcaaccactcaattatttgcttatttcttatttgtttaagattctgttatagtgagttttaatagatgggagtcttcaacttactattgtttttatattttttaatcttcttagctatttatacttccatatgaacattaacatcattttaactgatttcaaaatggttgtgattctaactggattgcttataagtatactttgaagcatatactttttggaggatttttgtttataatactttggcatgaagtcttcttttccaaggacattgtttgcctatgtacttgttcaaatattattttgtatttaacaataaaattttacaacaaaatagagggttttttttgttgaactatcgtgaatagcaattttctgttttaatttcttgtttttgttagatataaaaatattggttttgcatatagtgtatgtaatcaccttgtacagttcccttatgaactttagtagctttattactataattattaagccaattattttattttcttatccttatttactagaatctcagagcccaaatttgaataatagtggtaataaagggtcattctgattttaatgatgtttttctttatatataaatactatatttattttcttccaatctgacttggaattcttattagaaaatatgcctgcattttatcaaattacttttagtaccatttatgaaatcatagatatatagagatgtttctttaaggtttcaatgtaatgaatttgtcattatgtttattggtcatctttggctttctgaaataaactgtacctgatgacaatgcattactctttagaaatcttgcgaatattgatttaatttgatagtattttattgacatcatctgcacatatatttaccagtgaagttggactgtgattttctgtttttgagctttattacatctggctagtttaaaatttaaaaaacaaattagaaggctttctatttttaactatagtctggaataatttaaatttcactgaaattatgcatctttcaaaagttggataattcagctgtaagtctgtctggaactagtgcctttaaaaaacaaggctttaattgccttgataatctacattattagtggtttgtatattcatttggtctatttttatcagttttggtaatttgtatttttctagagaattatccactaatgctaggctttcgaatatgtcatcatagagttgcatataatattttcataaaattttctaactctttatctggtatatctgtttttattttctgctcgcctttcttattatttctcttttctccttatcagacctgtgagaatttttgcattttattcatcctggcagcgtgaatttttgaattcttagatcatacatttcagcttttttctttgtttatttctacattctgttttcttttggtttattttgtatcttacctttaacattttaaaaatgtttacttggttccattcagtttttcttttttagtaatgatttttcagggcatacatttttctataagcaagactttatctatatcctaatgtttggggtatgaagtagtctcttttttattgtcttgtaaatccttagtaatagcagttttcttttattttcagacctaaggattatttaggaaaatatttagcaattcccaaatagtcagcttcatttttgtgaacattttattgtgcttttaaaatttatgggtttatcagtagatgtgatccatatgattttccatgtgttgaatttaagcatattttttgttcaagtgcatgatttaattaaaaaatgttctatgggcctgaataaaatatttgttctcatttcatartatgtataattatatttatgtatttatataaaatcttgtttgactgtattattcatgttttctattaattatattattaaattttttcatgtgcttacatatttttaatgtactagctgtatggtattttgaaacatgggtatgaatctctttgtcgatgactgttttatttgttaatttctcattacatttttattagtttttgctttatttattacacttacatttaatttctgttattttgctttatttaacattatttaacttttatattatatgttatgcagcatagaaaaacaatacatgtgataaatattatatatttcacacgagtcaaagcttcatgtgatgtcagctgccttcagacagatgtgtatggttttttgaacacagccctaaatttttacacatcttttgatatttaaacaggataaattctttttttgttaggtttttgaatattacatctctgtgaaatagtttctttttcttagctttaaaagagctgcactaattgttcaatagacactatgtcagcagtcattgtgttcctgattgtttgattgcaaggagtccctcagtaaaaggaggtttactgtaaggattcagatgggaaatctcaggaatgatgtcttttctaggaatgggtctacctgccctctgcttctccttggttgggtgataaaatctgcccttgcagctactcagtggaatttttgccccttcattattttgggttgcatggattgttgccttgccatgttcctgattcaccctcactgcacatttttattaccagctttacatttaaatggctgagtctttccttttcccaataccaagtatttgggagaataatgagtttgtaccagctcaaattttagtcaggcacaggctaactggctggcctgcagatgagcagacattgatcaggtccctctgtcttagcccctaccagctgcaacaagagggagtcatgtgatagaggagtaggccacttgggctgcaggggttctcagcaggcccattacaagcgggrtgtggcctggacaggcagtgacagcttctcccctgtaatccactggttaccatgagggtctttaaatgaagagaatcatcttttcagtttcaaaacagaggaaatgacatttttcctctgccctgtcagtgttgggcagcttaattctaggatagtgaaaataagtaaaaatgccatattaagcactataattcataaactgtaacgtacttgtaaccagcattttaatattcatcaaggtcttgaaatgatgcattcttcttttctttactctctgcctacggtagagtgctgtacatgtatttggaaattgtgatggcattaaatatagctttaaagaagaaattcgctataaagtatgttaaatgagttttttgtcttaatgagatgcagcagaataataaaaatatgtgctcatttatggggcggtgaattcctgttgcatggaacaaaaggcaaagttcatgtttacatattgtaaatggatcttgtaaatgggtagttcttcatgggtttcattgattgaatttccttggctgatgacagaggtaccaaaaactagtgcaatgagagatctgataccaggaattcaatttttttcttgttcttaattaaccacatccacttctatatattactggccaactctaagcctagacaaaatccccaatatactcatgaatcacttgattcattactgaaaagggaaaaaataattttggcttgaattggaaggaaatgaaggagagttctaattattactcagtaaaaagctactttcctcatttatttatttctttattatttctggctacaaagctgtacaaagttcagtctgcagtttgggtagctccctctccatattttcttcttctttggtatctgtgggaggaaatgatgaatccgttcaagagcgtgctcatctctttgtgaagttgtagctcaggtccactgttgaggtccactgctaagaggcattgtttggagggaagaggggatgagatcccagagatagtgggggaaaacctggttctattcattgacttggagtgttatctctgacacgtagcctaacctgcttctttgttttgtctgcagtatcacaagaatggttaataaaaagaaaaaaactttattattcagtgcttctgtcatgtgaaacactgtgctaagcagcttgcatgtattgtctcctatacattttgcagaagtactgtgaggtaccatggatgatatgtagctggcaagttacagaaacaggaacctgggctccaaaccatgtgctttttctccctgtgactggttatagtttcaggagggaaaacagaaaatctgaatcagcacttactgtgtggtaagtgttgtagttgagatactgcaggctgctgtgtgagtacctgggtgagagagaagaggagaaccttmggagtatcagcagctgggtgatttttgaagtgtgagaatgagttgataaaggaagaaagtgtcaaaggcacattggggtatgttgctgttactagctgcagtgaaagtgtcttgagagtggcagtgggaaaggaaggtatgtgaaatagtcagatcatgttatgcaagttgcttttaaggaagagtatgtagttttttttgttttttgtttttgtttttgttttttgagacagaatcttactctgtttcccaggctagagcacattggtgtgatttgggctcactgcaatctccatctcctgggttcaagtgatcctcctgcttcagcctcccgagtagctgggattacaggtgcccgccaccatgcccagctaatttttgtatttttagtagagacaaygtttcaccatgttggccaggctggcctcaaactcctgacctcaggtgatccacctgcttyggcctcccaaagtgctgggattacaggcatgagccaccgtgcctggccaggaagagtgtgtgttttaaggaagactaagtgctgtggcagatcatctttctggctctttgtgctgctgtggtttatgtctccatttccatggacacatgatcctaccttattttcacttgcctggactactgtataagctgtaccccaggatacacacacagacacacacacacacatgcacacacccacacactatatatatactttcttgaagctggaagcagagcattgataaggtctcttctctgttcaccaagtttgtagagcctttctatggtttattgattaaagcccactttctttatcatggaagctattaaggttccaccccacttttccaactgtgtttccaatatttccctcgacctaccctgtatttttatccaatccacttgttcctgttcccatcctgtgcctttatttacatagttctctcatggaattcctggggttctttaccttgccacatatttggatctgcaaagtctaccttgtcaggcctagtgagaactgtgacggctgcttcttaacccactagtgagaccgttggcacccttcagaggtcttgagctactgctttttcagttctggggactttcctagcctctaccttctactttccacttttactcatctagttttccaagtctccatgttgttgtcaagttcctggagatctgttgctggggtttgtgttgttttctcctcaataccccacctcttgcctcattagcatttgcactgagaggactcaggaccagtggctcctgactcctgcgtcctggacaggctcctggatactttatcataatccaagctcagcatcccttttgacttccaattttcaaggatgattggtctgaattccatgagcttcttgatttattttgccatttatcccttcaacaaatgtttattaattacctactttgtgtcagactctggaggcatagtggtgagtcatacagtgggcatggcccctactttttgttaaacatatctatggaaagagagcaatttacaaccatctaaataaatgtaagactggtagagagtgtatgatgccatgactgcttaccagtgggagatgggacctaactaagtggtaaaaaaatgcttccttgagaagtctccagcgctgatacttgtaatcactcttaggactgtrtactcactgatacttgtcacctagtaagactgtgcactaactttgagctgtggttcatccactgcaggtccttctgaacagttctcagagatctccgaccttctagctttgggccatttaccttgccccaactctttcccttaggtgttaagacattagtgatgttttggtgatccggtgtctaacattttccctctaatgtctaccacttaatgtcatttgtcctcagatcaagtccaggcctacatgtttcacgggactgtttgtacctttttttttttttttaatctccaaaatctcgtggaacacaattaaggtggatttaaaggcttctaaatcagtcttaaatttgtaatataagctaactgcaatgtggtgggggtggggtggaattctgttgtgtggtcctgtgtttatatgttggcagtattttgtcagtatttagaatagggtgtaattaaattttcaataaagcaattatttattgactagcatttttgagttgttggtattgrggcaatcactgctaaaagttaccatatatattatttcatttaatcctatggaaaatctcaacatgtcttccatggaatcttgtataaaaattttcttggtcgttttacaatttggccaatgccttctcatccagcctcatttcccactatctttcatccttttgtctggcattgtatatgccacatttgcaaatgtcttttttctttacttagaatgcattcttttctcttcacatcagaatcctaaacttgtagtttttactctttccaggacatttcagtcaatctgtatacaatgtaacctttggtgttgtccttaaataaagtaggcactcaatgaatatttgttgaattaaacatcaggtgtcttgggtagatttgttaatttatcacatttaaactaagcagatgttttgtaatagccatgtaattactgtgatttgagatgatttgctactctttatccttgccattttagagaattaaccagttgtccaaaaaaaaaaaaaccaccaactccctaaaacatataatcactaagaatctctactacttcattcttcattttgagaaatgttccatgatttaataatacttatattatctttaaataaagcaagtttcagaaaaactaatttaagtgctacttgctcatagatgctgaatgttatgaatgaatggatcctatgagataggttctacataattttattatcagtttcaaaatgagatgcctgaggcacagagaggttaaatagcttgcctgggtgacagaaactatcagttggcagaactgacagctttacctatgtggcttcaacttctggcctatattcccatctctgctaacagttatcagaggtataattttaaatggagtctcatttcttatttaatttcattattacttttaggaacccacccttttaggaatagctggacttccaaatactgtgattagtgtctgtggaaagatattaatgttactgctgatgcatgtcatattcactaagaaagtacatgtcaaactstctgaaatcatagactattttataggaagagatgtgactaaatttatttggcaataaattcccagaatatatttatcaatttaagtaaccaaaagctattatataactttgctttacagtacctgttcctcaacataatttttaaaaatctttttccaaatggtcagccgttgctttccatttcttttcacttaaaaaaaatttttactaagaacacacttgccagatttcacttaattgcatttttatggtccagtcattaacctactgaaaaaaaagtagcttaaatggaaacattgacataaacctcattacactggctccaatgtgttgctatcataaactatccatcttctatatgtgtatgttttcacaggatactattgaaaaggtaatggaaaattaatgttgcaatggagaatttgattctgtgtataaattttttaaacacaccaacacagtgtatgtttacaacatcaaggggtttatttggaattaaggtttatcataaactttatgatatttaaaacacattacaactggccatatattatttcaggtccctgttttcaagtttttctaatttttttgacaaaatatttgttatgtgtctctctttggactggtaacagacaactgataatcattttcaataagaaaaaaaaagttttaggatcttaaagtggtcaatctatcatactttcccctgtaaattattttttggcatttacattttaaggcatactctgccgtggttggatagttcctcaaatgttaaaaacagtcgagtccaagataatcagttaaaatcatttaaataagcactattgttattactagcctcactgttttcagcacaggggcttatgtagttttcataaagaaagggagcaaggtatagaatgaagaattgagatggtgacaaaagtattggagtatgtcagcgcctggaaggccatttctttttgcacatacttgatatgtgtgtaggtgtgtggagagcagtagaagaatttcatgatttatttgaaattctataagcactgcctgaataatctaagaatcctaggtatctatttgtgaaacatgagaataaatgagtacttttcttctggatcttgaggttctatcagattttaggtgatttggaggtaggggtttgtgagcattaatctttttaagctgtgtaactctggacaagtcactttacttctatatgtttcagtttccatacctataataattcgtagccgatgaagttgccacggggctcaaatcggttatcaggtaataatgatttaataaatttaactactattattatttaaatagtgagtagatttattttaaattgttttggaggcaaaatggcagagcagagtttgacagacttaggttctcatcctggtttcttatttaacagttgttcaactaagctaccattctttctgaggattggtttttttatgaggaaagtgtgataattatacatattttgtagacttattgaagaataagattatgtatgtaaattgccaagcatagagtcagacccaatggtaggtactcaatgaatgggagctattgtaattatttacaaaaaacacagtaatagagtgggtacgtaaggaccccatgtctttataaaatagcattactttacccaacaacataaagaaaaaagtcagtgttctcagaaactcatgtagttgaacatttctctcagccaaaagaaatatattacagtgtaagtggttgtaaatgctatgttctatttatacatgatgaaggtgttgtgaactgtggagccacagtttaaatattgtgtgtgtgtgagggccttcttgtttcttaccttataaaatgtcctcattttaaatgtctctaagtgcatgtaaacatggccccaaacactcataataaaataagcaagatcttctattccagaccattttctttatttttttactgttttattacaatcctcctatcaggatctcatgtttgatcgtgaaatcacagaattttatagctggaagggacttgtctaacaccctaaatttataggtaaaaaaactgccacctgaccaatttaagtgatttgctcaaggccatatagtaagttagtgtcggaatcctgatctcttgtcttcaactccataacattttgggaagagaaatgaaaacctgtttcagacacaattaagcttttttgtttttttaaaacttatgagaggcggtgctggggtctacaaagtgactctcagctttctgctgaaaggaaagattggtggggagccttagttgtggggatccttacctggtaacagagactgcccttgtggaattacctagatggagccatacgccattgataatggatattgtgatctcaggtatgttcacataacaattatccaaggatatcaggttaaaccagaaaggcagtatctggtggggttccaagtagtgggatagcagattcaaagtcagacaagcaattgcaccttagttccagggaagccttgttaatgaatgcttggggaagttgcttatctttcagcrcttctgtttcctcaacagtaaatttataataatacatatatcttatggttgtgctgatgatcatgcaaagtaattgataaaatgaatttattataatgtctggcacatatcttaatcacttaataacttaaagctaccactataattccaggtgatcagtctcttcacagtaagagacttgttacagggagataagctctattccttgagaaaggactgagagaagttactcggtattcagagtccaagctcagtcacccacaatttaggataacattttagtccaaacaagtcttgggggtacttactggagaaactgaggcagaaacctctcccatgaaggaaccaacaaggtagataattggtttgattatagcacggagactgttatgatttatggtatatgcgtgtcagctggatatatctcagacttaccaggctctaagacaaatttcagtgaccctatcctgattagattcaacattcaccagtgggctttcattctggaatcttttagaaagatgacttattctctatgtcctcaagtaattaaaaactacttccaggaagagaagctacatagaggctgattttaatttaaaataaagcacctcttcagatgagcagaaatatccgtttaagaacttggttactttggatggtattgacttttacatcacygaaggtgtttccatagatggaagacagccacactgtggggattctggaattagatttcaggcccttaaggttttataatactacagaatctctgggtttatgataagtgaaagtttatggaaatagttggggacaaagtatgagtagaaggtacagaagtagaaaagaatatatatattttaagaatggcacatttaatttattattttttaatttttaattttttttaagagatagggtcttgctctgtcacccaagtcgtagtgcagtgttgcaatcataagtcactgtaacctcaaactgctggactctagcaatcctcctgcctcatccttctgacttgttaacttgttagaattacaggcatgcagctaatttttaaacattttttgagacaaagtctccaccctattgcccagaatggtcttgaattactggcctcaagtgatcctcctgcctcagccttctaaagcattgagattacagacatgagccatacaacccagctaagaatagcacattttaaattttgattgagacatatatgtccaggaattttgagcagagagattggacaggctaatcaagattaaactgtggggagttccaaatgtctagttaagggatttgggtttattttatgaaaacaagtgataataattatgatcctctatggataattctcacaaagttctataagatggtcgttatttatatattatacaagacataactaaagttctgtgactcgtctagggtcacactgctaagtcagtggcagtactgggattcagactcagctctgtccaacttcaaagtcaatgtcatttcccccttaacatagtgtggacattgtatattctgtttatttttcagtgattactttaaaaaactttaattgttaaatagktgtctttatgttcctttgaaacattatgagcaatgtttgaactccactcattcctcagtttgcatattgttgtttttcagtatttagttccacctcggtttttattttaacctcataatcagtcattgtggtggtttgggttctccgagaagcagaagacgacaaggctgaatgtcccatgccaggggctcactgggaggaattcctatggagcaagaataggcagagaggccttccgattgtaatgcaggatatgacatctgggaagggagagtcaaagaaggaagatggggagtgatatggtttggatattttgtttcatgccctaacatactctggagaatattccagtggttcttgagaagaatgcctattctgatgcagggtaggaggctctctgtatgcctgtgaggtacatttattccatagtgttcttcaagtcttgtttcctcttatctgtctgaatgttctattcgagattgaaaatgggttattgaaatctagtattattgtggtgttctctttatcttccttttgctccatcagtgcttgtttcatatattttcataattgctgtatcttcctgataaattgacccttttgttctgtaatgtccttctctgtctcttgtgacagtttctgacctaacatctattttgcctgatgtaattatggctacctctgccctcttttagttgacatttgcatgaaattcctttcttcatccattcacttccagcctatgtgtgtccttaaatttaaaatgaatctgttgtagacggcatatagttggatttttgaaatttggaattcaggcactttaatgtcttttgattggggagtttaatccattgacatttaaagtaattaccaatagggaaggacttaccttgtcacttttaaattgttttctgtctggcttgtagcttatccccgtgttttcctgtcttgttgtattcctttgtgtttaatttatttttgtagttgctctctctctttctctgtctctgctgtgtgtgtgtgtgtgtgtgtgtgtgtcctgtgggccttatgtaaaacatagcaatacattttaagctgataacaactttaattgcatactaaaactatattgtctccacccatttatgttattgatgtcacaccttacagctattttatactgtgtatccattaacctgttttattgtcatggttgttttttatgcttacaacttttaacttctttaccagcattaaaaggtttacataccaatgttacagtattacagtattctttgtttgtctatatgtttgtcagtgagctttaaactttcacactgtttcatattgctatctaatgtcctttccttttaccttggtggactccatttaaggcagatattgagaggatacctcttgtaacgcaggtctagtagtaaagaattccctcagcttttatctgggacagttcttatttctcctcctttttttctttttaaaataaaaattttaattgtgtatatttaaggtatgcagcatgatgttatgggatacatatagagaataaaatggttactatagtgaagcaagttaacatatccatcatctcacataattaccgttttttttttgttattgtggcaagagcagctaaaatctacacatttagcatgaatctcatatacagtacaattttattacctatagtatttatgttgtacattagatctcttaacttgttaatcctgtatatctgctattttgtatcctctgaactgcatctctgtattgtcttcccttcttcccatgcatggtgtattagtcagggttctctagagggacataactaataggatagatgtatatataaaggggagtttattaatgagtattgactcacacgatcacaaggtgaagtcccactataggctgtctgcaagctgaggagcaaggaagccagttcaagtcccaaaacctcaaaagtagggaagctgacagtgcagccaaccttcagtctgtggtcaaaggtccacgagtccaaaagctgaagaacttggagtccgatgtttgacgacaggaagcatccatcacgggagaaagatggaggccaggagactcagccagtttattccttccatattcttctgcctgcttttatcctagccacgctggcagctgattagatggtgcacacccagattgagggtgggtctgcctctcctagcccactgactcaaatgttaatctcctttggcaatatcctcacagacacacccaggaaaaatattttgcatcattcaatctaatcaagttgacacttaatattaaccatcacacatagtaccctctcttttgttctgtatctctgtatataattggatttttagaaatttagatgccacatattaagtgagattatgcaatatttttctttctgtgtctgacttatttcacttagcatgatatcctccaggcttatctaagttgtggcatttcgcaagttcttgttcttttttaaaagctgaacaatataatattttgtgtaggtactaccatttctttatttatcgatgaacattagattatttccatatttggctattgtgactaatgctgcaatgaacatgggagtgtaggtatcttcacaagatggtgatttcatttcctttgggtatatgctcagaagagggattactgggtcatatgctagttctatttttaatttttaaagaaatgtccatactgcttttcataacagctgtaccaatctatattttcaccaatggtatacaagagttctcctttctccacactcttaccaacatttgttatcttttgacattttgattgtagctatcccaatggttgtaaggcagtatctcatagtggtttcaatttgcattttcctgatgattaatgtttttgagcaccttttaatgtacatgttggctatttttatgtcttctttagagaaatacctgttcaagctttttgccttctaaaaatcaggttgttttccattattgagttgcgtgaactctttatcaattttagatcttaacctcttatcagatatatgttttgcatagattgttttcccaatctctaagttgctggtytgttttgtttatggttttctttgctatgcagaatcttttaagtttgatgtagtctaatttattaatttttgcttttccttagtttttggtgtgatatcaaacaaattactgcctatgttctcttctaggagttttagagtttctgatcttatatttaggtcttatacccatttttagtttatttttttcagggataagataatggcctgtgggccgggcactgtggctaacacctgtaatctcagcactttgggaggctgaggcgggcctcagcactggaggtcagaagttcgagaccagcctggccaacatgatgaaaccctatctctattaaaataaatacaaaaattagctgggcgtggtggcacatgcccgtaatcccagctacacaggaggctgaagcacgagaatctcttgaacccaggagacggaggttacagtaagccaagatcacagcactgcactccagcctgggcaacagagtgagacttcgtctcaaaaaaaaaaaaaaaaaaaaaagttaatggcctgtggatactgaatttcctggcaccatttattgaagagactatcctttccccattttgtcttctctgtgcccttgggaaaaattagttgacagcatatgtttggtattattcagtatttctgggttgtctatattttccactggtctgtgtgtctgtttttaaggcaatatctagtgtttttactactatagattagtaatataattttaaatcaggaagtgtgatgcttccacctttgttttctttctcagaattgttttggctatttggggtcttttatggttccatatgaattttagtattttttttctatttctgtgaagaatgccattgggattttgataggaattttattgaaatctgtatattgctttgggcagcatgtacattttaagaatattaattcttctgatccatgagcataggctatattttcttttattctgttttcagtttctttaagcagtattttataattttcagtgtagagttctttcactgcctttgttaaatttattcctaagtattttgttgtttttcatgttattgtaaatggtgtaaactctttaaaggtcagtttgtattttattggcattctcagtgttggttctatttagatattttattttttatgccgtcataaatgggatttttaaaaatgtctttttaatttgttatttgtgtataaaatgctgatagtttttgtttgttgattttatatcctgcaactttactgaatttgtgtattaattgtaatagtttcttttaggtggaatcattgttggttttttcccccatataggattatgttatctgcagatagggatatttttacttcctctgttgtgatgtggatgtcttttatttctttttcttgtctgactgttttttctagtactttcagtactatgttgaatagaagtgatgagattgggcatccttgctttgttttggatcttagtgtaaaacattcagtttttcccaattgattataattttacctatgggtttttcaaaagtgaagtgacttttattatgttgaggaactttccttctatagatttcctcatttttgaaggatatttttgctgacatagtattcttggttagaatttttctttcagcactttcaatacattatcctattcccttctggtcagtgaggttcctgctgaacaaacccactgatagtcttatagagactcttttgtacataatgagtcaattttatcttgctgctttcaaaattctccttggccaggtgcggtggcttacgcctgtaatcccagcactttgggaggccgaggtgggcagatcacgaggtcaggagtttgagaccaggatgaccaacatggtgaaatcccatctctactaaaaatacaaaagttagctgggtatggtggtgggcacctgtaatcccagctactcgggaggctgaggcaggagaattgcttgaacccgggaggtggatgttgcagtgaaccaagattgtgccgctgcactccagcctgagcaacagagtgagactccctctcaaaaaaaaaaaaaaaaaaaaaaaaaaaatcaaaattctccttttgtcttggtctttggacaatttaatttcaatgtattgcagtgtagatttctttgtgtttattttagttcatgagttttgggcttcttgaatctggatgtctatttccttccctgattttgggaagtttttagccattatttcttcaaataagtactttatcctttctctctctctctctccttcttctttgtgaacttatataatgtgcctatggatccgcttgatggtattctgtaagtccctaggctttattctcttttttcattcttttttctttttgcttccttgatgtgataatttacaatgacccatctttsagtttgctgaatatttcttatgcttgatcaagtctgctattgaatctctgtagtcaattttccaatttwgggattgttttcttcaggtccaaaatgtctggttcttcattatgtgttgtgtctccttgtggagcttctcattttgtttatgtatcgttttcctgaggccattgaacatccttgtgatgattattttgaattatttgtcaggtaattgatatgcctctgcttctttaggtttgtttkttatttattctggtcctttgattgggtcatgttttctttttttctttttttttttgtcttataacttcttgttgatatccacatgtttcaaaaagtatgtgacatataattsagattcacaagatgtaagatgccattaggaatgaggcagttgcttagtccatatctctatttctattttgtagtcttgtctcagttttagagtttattagtcttttggtcttacttagttaagccgaatatggccatctcatctccaccttcctgtttccttttgaatcttcaagctgatgcagttgatttgtgccaagtaaacctactggctggcatgggagtggtgctcatgctattctcttcaaccagggaagaggaatgctcagttgcatgatgtatagagctgcttctttaaggtgtttggggtggaatagaaattaaacgtatctaatgtaattgggaagaagaattatagtatttggggaggcatgcaaagataaattattttcagcacattctgttattgtgcataaaaatatttacatattctccacctttatttatagaacaggaatcccagagaaactgaaatataataattactcacacagataaatgaactctaaaatcaaacagaatttcttggctacccttgatcttttaactaatataacctgttataataactttggggcgggcatatacataccacgtatgttattataagtggttttagagatctggaaataattattgctttcttcaccttgtgacctactaggatgacttactaaatttttttcgtgttgttttggaggaatgttcccatttattctgctgttaacttactttggaagggataayttcctagttggtctaaattttgttgcaaaccttacataacactctcatgaccttaatcatggtagatgtgcccatgtgagtccaattcttttgagtaactaatgattgaaaggtatgtacagaatactattcagattgtatcttgttttttcttgtatttcatagagttcaatagttgaggtacatttggagaccttaatcttctagcagtttatcatggttccttctgttgaataaggctggtcccattttttttttctcttcttatagtcacacatagaatggtgtaatgattttttcattggcagattcaggctgaacttcatatccagattcatggggacttgagaaggaagaacttaaaccatgctcatgtctgtgatcttttaccttctaattattagtttcccaagaaaagaattagtcatatagtctttaagtattgtggcttatcatatagttctttctaatcatatagtagtaatttatccttctggtatctatcttaatctcacatgcattttagatgccttgagttaggcttccagatctgatcatccagtacaagaagtgagtcctataaagaacaagtccagaccctggaatatggcagtctcctcaaggtcctgccaggtgcttgttgcctgctaccttttccatcatttttttcagttataaatgtctatacatatatcagatagagccttcccctatgctttttctgatgctggggttgacttgttttaatatttggttactccatgagaatttcacctgctgctgtgggtcagcaggaccctcccataaggactcattttctgctgaatgagctgagtagccattcacacttcccatagttcgccaagccgaaagatgttttgagagtctgtatactttagattccaaccctctgtacaggaacccaaatttggatggcaaatatattttattatcagtgtatatcctattacttggtagtagctatgtggaaagggtacaaaggctgaccctctatgcttcaaggccaacttttggccatggtaagaagaatgagaagtatctaataagaaggactgaggtcctcattgttccaactataggacatacctataaatcctgatagaagtatattcagcatgtcactttaactaatattcatccttaaacttgggtgatcatctgtgargaaggaagtttggggaatctattgttagcatgcttgcctttttcagttggtccttatctttgattctctgaaactctcctctattttatgcttacagttttgccaccaaggcttataatgtctcatatttcctgaattacctgggttgctgtgacacattgacattgatttaaaaagtgtattgggttctaatatcccagatactgtcttagacgcttaactaactagcatcttgaactagcatttaagttgctcttatctgatattcagccacctaccctccccagagctcactctccatgcttgctctacctttgttcaatggcttgggcttctgcttttgcctatattctctgagtttctcattgagttaactgtctggttcctgtccctccacgctttgccttgctatcacaattccttatatgagaatttggtgctgagtttctgagcctcatcctcatatctgggatcctgcagcctgtgactctctatatatctcttgggccatttaactactgtgagtttcaagacttttgctatcaaaatttttcatctcccatatgccatactttatcttgctgactgctttcttttcttttcttttctttttttttttttttgagatggagtcttgctctgttacccaggctggagtacagtggcacaatctcagctcactggaacctctgcctcctaggttcaagcaattctcctgcctcagccacctgagtagccagactacaggtgcgcgccaccacccccagctaatttttgtatttttagtagagacagggtttcgtcatgttggccaggctggtctcaaactcctgacctcaggtgatcctcccacctctgcctcccaaagtgctgggattacaggcttgagccaccatacctggccatgactgcttcctagtactgcacttactcaaattttccatactctgggatgaaactctgctgtcacctgggcctgtactctaatgccactttaggtctagtgggcaggcctaatttcagggcctcccccaatctctgtctcactatgtatactctgtgttttctcattgataaatccagagatatgatgaacagatatgcttgggaaacattattggcaatacactatataagccaatttagaatatttttattgtaactatagttactatttttttctagcttgattctttgcttgtaggtagtgaaatgtggtgacagcttgactaaagctctgttctataaatgcctttagtctgaggtaaatgtaggctttgtcagaaatgatattttcatatatggtacatagatggtacagaactgtgattattgtaacatgtttgagatacaacaaagagtacttaaaaatatttcatacgctcaaggaatttttaccttgggttgttcctgaaaaatcaatatggtcccttgtctagcattttttgtgtagtttctataaagtagtagctgcttttggtaggctattcaaaataatctggcttagcattcttttggaatttttaccttggggtgttgctgaaaaatcaatatggtctcttgtctagaattttttttgcatagtttctgtgaagcagtagctgcttttggcaggctattcaaaataatctggcttagcattctttataatacagttagttcaggtttcttaaaaccagtttttggcytatattcctcaggaagaaaaactctgtgtcattttaccttgtgcccaagatacatgataactgccttcttgaataacagcaggctttctaggctttcttcacacaaagttttctttatgagaaaaataatatccattgacaacacgtaaagaatagaaaatatatgaggcagttgcccatttccctccttgtcattacctccacacccagtatcagaaatggagtgattgaaaatcctacatatgttggattggaagtaaaatttaatttatttgaggaacctcaaggatatatgtgagcattccaatttcctattatggaattagcaaaacctagcctggatctggggcaggaaatcagtatataatgttgctttcaaggttactctagaattacctaattcaaagcaagggcttatatttagcaatgagcyctcaacatggtttgttccatgtaaaaaatgtcctgccaatgccaaattggtagtaggtgaagttggagactccagggctcatctaccatttgtggcattgttccatccatagatgacactgttcttaatttgtaagcagagcagtctgtgcctcattgccatctggctcagcccagttccagtgccataaggtgaactgaactgtcagtggtaggaaatagtgctctatgtttgtcatgatgtactagcacagacccagaagtcaataactgcttggcattccagaaaacattctcatggcggtragttaaacttcatggaatgtctttttccagtgggtgatgaagtcatttagcaatggttaccttttgtggaagaaaatcttgttaaaaagtaagtagccctgggaagccttgaagtttatgctcttgttttgaagtagacatactacaaattttttgtattttatttaagccagggaaaatactagatgcactgatgaagtaacttaagaagataacataggaacttcgagttgtacatttttttcttttcccacttgattatatgatatattgtgttgacatggacttctgaaacccctatgttttcatctttagtcagctttataattaggatgtcatcaaatgaggctaacatgcctggaagcccagaaagcaaagtccctgggaaggagtagaaacttccaggagcagcagaaattctcaattgaccttctcaattccccgccttcacatctgctccacagtctgcacttctgtatcttatatctcaggggtggtcacatcttctgtgtggagctgctctaaatagagaaactaaacactgaacctccattccctctccttttgtgtctcctagtttgatcatgaagttctttagttttgtcgtgtcatcaaattccttgacccatcattattttctcagtcttgtaaaagatctccctctccaggagaggaggtttctcacgatgagcgtatgatgaaaatgtgcatttgtgtttggtttccctatcagtgaattttgttgtgccagaatttgcacagcttctagtgagaaggatgtctttcttcgggagtaatacaatctggtctcctgtgaggcaatgcttggttttgaccttgtcctttaaaaattctagacacttgcccttgctgctgtctccccacatcatttcattcagaagcaattgtttcttgaatttcttacaggagacagtcctgactgtttacagcccaattcgctgcgtatgatttgagctctccctgtgataaagaatctggtagtggtgtgtgtgcacggcatgttatcacctggtttgctttctgttagagtgaggcaaccmacagaatgaggagaagagaaggaggagtgatttgcagggccagtgaaggcctgggagtcaagacctaagggcttagaattcactgaggagttcctttcttgtgggaccaagtacagtagtaattatataataattataatatactataatatactactgtatatatagaaagtatatatgtagaaattgtgtgtgtgtatatataatatggtatatatatatatggtatatatatggtatgtgtatatatatatatatatatatatatatatatatatatatatatatatggatagagagagagagagagagttgctgctgtctcatagcagcaactattttatgtacttcacactgtggatctctaggcataacccgaacctgcctcactcctttaatcactgattgaagcattctacattctaaccatccatcgtctcttgttctttcaccttacttattcagctactcccatcgtgactactcctacacctcatcaggacttctgacccactgagacacctccccatgcctagccataatctcctatctttaccactttctttcttatgcagctagtctgtggctcattgctcagtaacattctggcggattttcctacacatatatctttttgtcatatccatctggcaacatcctaaagctagtgaatgtaaatatactttagtctatgtctggatagctgagagatgatagagaaagtcactcagttgggctctcaacatgtcagtattccagttgtgttaactggtcccggtgctacgccactgtcttcagtgatatgtcagaacttctctactcttttttagtctttcattctcataactccccaatcttctctcagttaataagaaggtagaagcatccagtgggaacttcctgagtcctcctcgacatgggaactccatctgcagccatgctcatgctgtgctttcagtccgtgctcatccctgcgcttcacagccagactgctcaaacagatgtctgtgtgtgcttgctccctttccttaacagttatggagtccgtgattcatgtcaaactgcattctgttcgcatcatgacaccagacacctcttgctgatgtaatggaagtctactttgtaggcattcttcagtcctcatcttacgctctgagtacttctgcctggatttcaaatgggagaggccttcagactcctcacttaactccctttttttcctactctgcagtgtgaactttcttcctaaatgatttggtccatgtgatgacttcaattatagataataagcaaatgagtcaaattttttgtctgtgtgtgtgtgttttttttttttttttttttttttttttaagactggttcctgctctgttgcccaggctggagtgcagtggcctgatctcagttcactgcaacctctgcttcccaggttgaagtgattcttctgcctcagcctcccaagtagctgggactacaggcatgcaccactacgcctggctaatttttgtatttttagtagagacggggtttcgctaatgttggccaggctggtctcaaactcctggacttaagtgatccacctgccttggcctcccaaagtgccaggattacaggaatgagccattgcacccagccaagtttttatccacagttcagactttcacctggtacccaagtcttactcatgtgaacttgtcactggactatctcaaaagctccttagaaacttaagcatcatcatgacacctttttcccccttagatttcaactctcaaccatgatattcatgatatttaccaagtcagtaaattttaccatctcaatctatttctagggacttttctaggatcacttttctagggactctttcctggcttcagcgctcccaaccaagacaacattatgtccacctctcctaagatctcattgtttggggggctgaggttggaggattgcttgaagccaggattttgagaccagcctgtgcaacacagtgagactccatctgagtagtcccagcgactcaggaggctatgtgaggaggatctcttaaacctagcagtttgagactgcagtgagctaggattatgccagtttactccagcctgggtgacagagagagatgctgtctttaaaaaaaaaaaagatctcactgggttttgtacttttcttttccagtgcctgtcactgtttgtaattacttatgtgaatgtttgattagtgtctgctactttattagaatgtatgtctcatttgtcttgtcattttctacccattgtacccagagcctagcacatagtgagttatatcaacaaatatttgccaagtacatgaatcaatgtactttatgaacttagtcaaaataattttaaaggtaagtactgatgattcctattttagagatgtcaaaactgaggctcttaaattatgtaaattgtctaatatcacacaggttaattattaataaatgtcttgggtgggattcattttgctattttatcctccaggccttactggggtaaggttggctttttaaggatcttagttggaccagacattttcttcagagtttcagtatgaaatttaataattttttatttgtgatattaactatgaaatagggcttgatttgaatacaaaacaaactaaaaaaacccctccagtttaaatgaacttagaatgttgaagcaaattttgaaaaagatattttgtgtcattaaaaacaatgctatttaaaaatgcttgtgataggatgttaaaaaaatgcagtccagaaattcatgtatagtaagatattcatgtaactgcatgaccagttcttcttgcctgttgcagagatggagccaatttgctgaaacagcagtgttacagtagagaaagagtttaataatcacagggccagcaaagtgtgggaagtatgggagtatgggagtttggaagtatgggagacatttctcaagtcagcctcccaaacagcttggagtttagtgatttaaagagtaatttggcaggctgagggagagggatttggtgctgctgattggttggggatgaaatcttagcagtgtccaaattatcttagtactctgagtgagtttctgggtggggggtctcaggactggttgtattacttccttcatatgactcatgggtctgggtagagttaagtcattcgccagaatgtcaaagtctgaaaaatatttcaaagaccaatcttaggaggttttgacgatagtgatgttatctataggagcacttaggaagtcacacrtcttttgacttctgaaatagtaaatccttatagaaaggtaagcaagggaactatgctggttatcatttcattaagccatatcttagcagaattcaagtcccttctctaatgctaatmttgtattctttcattactcttaaaaggcagttttgatccctgagcaaggagggctcttggaagggactgtaaagttaaagaagtcagttagcttgtgaaattagaaacaagatggagtcagttaggttagatttcactcaccaataatttttctgtcatatttctctcaaaagtagtttccttaataatgtaaaaacacatacaaagaaactagaaagaagaatgctacttaatagttgcttcttctgggtgatgatatcatgcagtttttttttccgtcttatatttttctgtacttccccaattttctacagtgataacatattatgttttatttatttatttttgtctttacataggaccatttaatgccttctttactagaaaagttgttgatggtaatctagctcatatactttacctgggagttgggacttgcaaaatggcttaatttggtagtttccaaaccttgttaaaaagcttaaaaagtcccaaattcttataaaaagctcatttttaaaaattatactttaagttccagggtacatgtttacaacgtgcaggtttgttacatgtgtatacatgtgccatgtttgtgtgctgcacccattaactcgtcatttacattaggtatatctcctaatgctatccctcccccttccccccacaccatgacaggccccagtgtgtgatgctctccatccaatgtccaagtgttctcattgttcaattaccacctatgagtgagaacatgcagtgtttggttttctgtccttgtgatagtttgctcagagtgatggtttccagcttcatccatgtccctacaaaggacatgaactcatccttttttatggctgcatagtattccatggtgtatatgggccacattttcttaatccagtctatcattgatggacatttgggttagttccaagtctttgctattgtgaatagtgccgcagtaaacatacgtgtgcacgtgtctttatagcagtatgatttataatcctttaggtatatacccagtaatgggatggctgggtcaaatggtatttctagtttgagatccctgaggaatcaccaccctgtcttccacaatggttgaactagtttacagtcccaccaacagtgtaaaagtgctcctatttctccacatccactccagcacctgttgtttcctaactttttaatgatcaccattctaactggtgtgagatggtatctcattgtgattttgatttgcatttctctgatggccagtgatgatgagcattttttcatgtgtctgttggctgcataaatatcttcttttgagaagtgtctgttcatatcctttgcccactttttgatggggtgtttgattttttcttgtaaatttgtttaagttctttgtagattctggatattagccatttgtgtgatgggtagattgcaaaaattttctcccattgtgtaggttgcctgttcactctgatggtagtttcttttgctgtgcagaagctctttagtttaattagatcccatttgtcagttttggtttttgttgccattgcttttaatgttttagtcatgaaatccttgcccttgcctatgtcctgaatggtattgcctatgttttcttctagggtttttatggttttaggtctaacatttaagtctttaatccatcttgaattaatttttgtataaggtgtaaggaagggacccagtttcagctttctacatatggctagccagttttcccagcaccatttattaaatagggaatcctttccccatttcttgtttttgtcaggcttgtcaaagatcagatggttgtagatttgtggtattatttctgagggctctgttctgttccattggtctatatctctgttttggtaccagtaccatgctgttttggttactgtagccttgtagtgtagtttgaagtcaggtagcgtgatgcctccagctttgttcttttggcttaggattatcttggcaatgcgggctcttttttggttccatatgaactttaaagtagttttttccaattctgtgaagaaagtcattggtagcttgatggggatggcattgaatttgtaaattaccttgggcagtatggccattttcatgttatcgattcttcctatccatgagcgtggaatgttcttccatttgtttgtgttctcttttatttcgttgagcagtggtttgtagttctccttgaagaggtccttcacatcccttgtaagttggattcctaggcattttattctctttgaagcaattgtgaatgggtgttcactcgtgatttggctctctgtttgtctgttattggtgtataagaatgcttgtaatttttgcacattgattttgtatcctgagactttactgaagtttcttatcagcttaaggagattttgggctgagacgatggggttttctaaatatacaatcatgtcatctgcaaacagggacaatttgacttcctcttttcctaattgagtaccctttatttctttctcttgcctgattgccctggccagaacttccaacactatgttgaataggagtggtgagagagggcatccttgtcttgtgccagttttcaaagggaatgcttccagtttttacccattcagtatgacattggctgtggatttgtcatcaatacctcttattattttgagatacatcccaccaatacctcgtttattgagagtttttagcatgaagcgctgttgaattttgtcgaaagccttttctgcatctatggagrtaatcatgtggtttttgtctttgcttctctttatgtgatggattatgtttattgatttgcatatgttgaaccagccttgcatcccagggatgaagccaacttgatcatggtggataagctttttgaagtgctgcttgatttggtgcagaaggcaagaaataactaagatcagagcagaactgaaggagatagagacacaaaaaacccttaaaaaaatcaatgaattcaggagctagctttttgaaaagatcaacaaaatagatagaccgctagcaagactaataaagaagaaaaaagagaagaatcaaatagacgcaataaaaaatgataaaggggatatcaccactgatcccacagaaatacaaactaccatcagagaatactataaacacctgtatgcaagtaaactagaaaatctagtagaaatggataaattcctggacacatacaccctcccaagactaaaccaggaagaagttgaatccctgaatagaccaatatcaggctccgaaattgaggcaataattaatagtctaccaaccaaaaaagtctaggatcaggcggattcacagccaaattctaccacaggtacaaagaggaactggtaccattccttctgaaagtattccaaacaattgaaaaagagggaatcctccctaactcattttatgaggccagcatcatcctgataccaaagcttggcagagacacaacaaaaaaagagaattttagaccaatatccatgatgaacatctatgcaaaaatcctcaataacatattattttttaaagttcttatttaagatgtttattaaataaatactgtagcagtaacagggaacaaataattattaaaaagaactcctaatcttacctgaatctttataaaatctatttgataatctttaggctgattatattctgaggctcagttgccatgagttcttcacttttcaatgatcattgactagttacctttgcataaaattattatgtttactggtttgttttaaaggatattaacaagggtacagatgaagagatgtgtattgtaaggtatagggaggggtatggagcttccatttcctcccagggcatgccatccttcaggaacctctgcatgttcagctatctagaatcttcttaaaaattttaaacttttatattgataaaagatatatttaaatatatgttggcggctgcagggaaaaatatgcatttctttacttattaaaaggaaatgaacagcccagaaaatataaacttattggacatatcactgatccaaaatttggcaagcctttcttcacattatatattccaacacagattgttacttcacatttacttattcgccccccatctcacccttctccacaaaaaagcaagcaaacaacctgtgtaacttcacagttgtcaatggttccttgcaatacttcagctcaaaatcttttgtacctcacctacagctttgttgcagattttctttctgtagttgagaaacactaatgcattgtctatgacactaactttacttttgccctcatggacaagggagaatgtttgaaagagtttatgtgatatctccttaatagcattccttaccaaatcaagcaacaatgtaaatagaataaaacctttttataatgtatttcttgggatctattttagttaccattgtgctatctggaagcaatcatttggttgattcattagcatttaccaactatttattaattgcctaacattcttcagatatcatgttaggatgatgaagactgaaattaagacatgaccaatacaatctcccagttccactctaccagcactgtataaaataactttatgttatgatggaagtactctgtgtctgtgctggctaatacagtagccactagccacacgtggctattgaatgcttgatatttagctagtgtgactatggatctgaattgttaattgttaataacaggtttattggaatgtaattcatgtaccatataattcacccatttatagtgcacaattcagtgatttttagtgtattcagagttgtgcaaccatcagtcaattttggaacattttcattaccctgacaagaaacccagtattcattaacaatcactccccatcttcccccagcttccactgctttatgcagccactagtgtttttttctgtcttgatggatttgcctattttagacatttcttataaatagaatcacaatatttggcctttagtgactggctaatttcagtttatttaaatttaatgatcacatgcggctagtggctaatgtaagaagcaagtgaagtgaaagaccaaagacagatgcttaaggaatgctgaaggctcaggagaagaaaatcctgcagaaagggtatgtgtaaaacagagagctaggagatgaacttggacagagcctgaagataagagactttcatggaggagggaatggttaacagtaccaaataatacagagggttcaaaaagtatagttcagtgtgatagtaagtatcccgatgacagaggtcactagaatgtggtcttggtggggaagtgagggcaggtggcgctcttatgtcattatagaagaagggaacaaaggaacattcaagataccttgaaaggggtgttgggattgatcaaaattctcttcagttgttgttaatggtatttttatggagaactgagcctatatgtaggcagaagagaaggattcagtggaaatgaagaacttacagatgattaagcaagttctggaggatgcaggtggaggtgatcagcccaggagtaagtccagtcaaggaaaacagtcttttttcttaaagggaggaggaagtgaagaaaaagtaggtggagatacagcacagtttttatgtagaaaggatgaaaattcaaatagctaatttactttggggaagtaggaatgaggccttctgagggtaaaatttggttcctccaatttcactgtgatcatatgtggagaaagaagtgctaaaacatcctccaatgggctaggactgtgggtggttagagtgtccatcgctgtccacaggaacctgtcaccaaaaaaggacagacatttttaggtacataaagccacatgaggtccagagagatactgatgtgtccatttttgccactaaaattaaagagtgcccaaaagattacatttgagttcttgaaagaagcaatgtagctccatgaggtcactttccttccctctcccagttccctccctccctccctccctccctccctcccttccttccttccttccttctccttcctttgcttctcccttctttctatctatgcttcttacactttgtagaaacataatgctttttgccttataatgctttttgccctacagggaaaaaatgaaaataaaacaaaaaaattcttaattgttccaaaccataatgaatagagtattttattttgtacattataatggatttcctttatttttttgaatcactcttttttgtttttttgacaaatgttgtaacagtggaagagttaggaaatgcttagaaccatctaaatgaaaccaactatccaaatataaaagaaaaagggccaggcatggtggctcatgcctgtaatcccggcactttgggaggctgaggtaagcggatctcgagcccaggggtttaagacctgcctgggcaacatagtgagaccccatttctacaaaaagtacaaaattagctgggcatgatgccatgcacctgtagtcccagatacacaggaggctggggcaggaggattgcttaaacctgggaggtggagcagtaagctgagatcgtgccattgcaytccatcctgggagcctgggtgacagagacagaccctgtcaccaaatacatacacacacacacactcatatatacatacatacatacatagacacatakgtgtgtgtgtgtgtatatatgtgtgtgtgtgtgtgtgtgtgtgtrtatatatatatagagagagagagagagagagagaaagagagagagagagagatctattctgtgatgatggaaatattccgtctgtgctggctaatacaatagccactagccacatgtggctattgactgtttgacatttagttagtgtgtatatatatattatatcttttgtggaagatatatatgtatacatatatgaaaaagatacaaattaatcgatattgaattaataacattgctttagaacaagctttctatatagatattttagaaattaaacttttgtggtcttgtcaacatatmaataatatttacctgtgtatttatttcttttaggcttttaaaaccaaggatggctatattgtagttggagcaggaaataaccagcagtttgccaccgtctgcaaggtaatctataattattgggattggtcgatgattttgtacaaagccagggaaagttcagttttgcccaggtcacaaccaacttaggccccctgtgttagcaactaaaagtataggatattcatgcgcataaaggataaggcagagtccaaattagcattctgtgttttttgtggtatttggctgtattttaaagtgaagaatcgtagtagcttaaattgtcctaaaacttgacctgcctaccattccaaacaaaatgggggaatcatttttagagggacctttaacactggtatttttttctttttttcacctccctccttcccttcctgccttcctttcttcctttcgttctctccctccttctcttttactatatcaggttaattggaaccatatatagttaagctactcccatatttattttatttactactggaaattttaaaactttttttcaacttaacctttatttaatgagtacctttctgaagaatttatgtttcaaggttttaggaattaagattatattaaattgttccttctcaacaaggccttaaaataaagaccttggaatcatttaaaataatttattcttagggatattctaaacttgtagcatttactaaacttcgccatcttggatcactgcaacctctgcctccttgctccaagcgattctcctgcctcagcctccagaggagctgggatgacaggtgcgtgccaccatgcctggctatttttgtatttttagtagagatgtggtttcactatgctggccagggtggtctcgaactcctgacctcaagcgacctgcccaccttggcctcccaaagttctagaattacaggcgtgaaccactgcacccggcctactagactttttttttctttacttgatgtttatattagttatcaagactttggtgttttgttttaattttagaacttaggtatctgttcattttttctggttttaatccaagtaatagaatttcatttttatttttatttttcttaaatatatccaaaggccttacctgttaaggatttttttctttttttttttttgagagacaatcagcttttatactaaattttaccatgagctttcagtgttattaaagatgactatgagggccaggcgcagtggctcatgcctgcaatcccagcactttgagaggccgaggtgggcagattgcctgagctcaggagttctcgaccagcctgagcaacaaggtgaaaccctgtctctactaataaatacaaacaattagccaggtgtggcagccatgcgcctgtagtcccagctactcggctgaggcaggagaattgcttgaacccgggaggcggaggttgcagtgagccgagattgcgccactgcactcaagcctaggtgacagagggagactctgtctcaaaaaaaaaaagagatgcctatgaaatcctgaatctcatttactgtagttaacttattatgtacagaaattacttattactgtgcctcttttgtatgagaaggtagggagcagagctaaaaaccacagcaaagggwtgggaaggaccagggagaagctgacaaatggagatagttctgattgcaggaagggctgaaacatctgaggtgggaaagaggggagccttttaaatggtgactctgagtaagtgtagggaaaatcgattcaaacatttgatctgggatcaaagaatctttattatgaasggtcaatgttaaaaatatgaaacatacggaagctgttgcctgtgaagtcatttgcgtactctaactgcagagatgtataagccagttcattgctataaacgagtacagattttcttcctgggccatatgttttggagttttctttctccagaaagtcgtggggttgggggtgggaggacctggcagtgaaaattactgtttgacatactctttagttttgaaaataactgtactgaattctttgtatttttgattcattactgccgatcaagttaacacttttgaacttcctcataaatatccataagaacagttttcaacaaaggttcttatttcaaagcagaatatttgccagaagttttagtactgaaatatgacttattgttatggtgtgttataagacattgcttataaaggagactatcagagggccttaggaatggcacacttgaccttgattttctcatatgagagttaggaatgataatccctgttatgagccattaatccaatgtctgtaaaactctttgagattctcagaagatttatgtgtacgggattcttgagttatttacattattagctaagcatcctgcgtgaatgctgcaatctgattgactttttcaaatctttgtaattatgccctcacatgtaaacttgtcctaaacaccttcttacctaagaaaaatcatctgttcctccattctgatgcaaggttttcttcccttcccagttatgtgtagcgtgtggatgtcttctaagcatttttttttactcatatttatttattactcagagccttgttattcaaactgggcttatagaagatggggttcccagttcttcacagtgagcccctcaaaactgttctttcgtcaagtacactccatcaggaaagatgggacaactttagttcctggtgagaaatgtggcagcactgtctgtgacaaatgaatggaattgacttatgcctagtctcttcccaaaatagaattgatatagtggttgattgataattcttggggaggagctatattagtgagctttcactgtaaggagttggagtgggagcaagaatattgggttcaagtctgaggttccagaaaatcttgttgtgtataaagtgaaccttgttcataacaagtcctacttaatgttccttaccatgatacagcaaagtatgaaagtgagcatatgtaagctattttaagctgatggatgccacccaaatgggtattcctatatgaaatattgaatattgacatccttttgaaagtaatgtagactgaaggcttcttttactggagagactatacattggttctcaatgtagtatgcataggaatgtcctttagccccattcccgaacattttactttagtatgtctggggtgaggtagaggaaacttcagttttaagaaggactgtaggtgattttggagcaagtttttagaccacctgctccaaaatataatatatccaaggtataatgtttaaggcctactgtaagtcttattggtaggtgaactctgtcacggtccttaatcttttctaagcatctgttttcctatgtataaaatgaagattataatacgtaattatacttgtatacaacttaggggtttggaaagtgttagagaagtgaagcacttagaataggccttgctcatgtgcacttaataaatgacatctatgaaaattagatatgaagattctggttctgaggaggagagagtaaatacacttttcccacttaccccgagcacggtgatcatacctggacagaattgcatgaatccatgaagcatgtattaaaagactttgaaaagtaaatagtaagagatttaggggagaacacctgaatttgaagtacctctaactggcagtcaacttaaccagcttttccctctagttattccttcacttgagtatagttgaacctgaaacctggaagtgagcaccaggcagtgcagcagatatccaggaaatgctctttattcccggtgcaaagaacatgaaaaagtgagctgtaatgtcagagagagtgtggaaatagtttgttttcccctcctttccattttcttatgccccagaccccaagtaatcctgtattggaaacagcagatgagcaggagccaactctgagaaagaagaactttcttcattgctgagctgtgatcccaaagaaaggagtgaatctcctttccttttccccctccattctcctgttgcatggcctctgccctggaaccatgctggggagtgggataactaaagcaggagccccaggcaactggaaaatgctagagagattgcagagagaagatcttgacaaagcaatccttgatgttgtttatgaactcttgggatcaccccttacttgcatatgcactaatttgatcctaatcagcataccaaagatgataggaactgaattagtaaatagacaactgcccaggttgtcatatgaccattaggtttggcacttactagtcagattcaaataacactgcaaaggctttgaaaccttaatcaaaatgagaatcaaagcccacagaaggtgggtaagaactggcagcctggatgtaaccaggtcaattgtctgctaaaccagcaagagtaaaaattctccttagaatttaaacaagacccagtggctcataatataatgttcaaaatgtccaggatacaatccattattactgagcatatgaagaaccagaacttgcatgagaacaggccatcaatgccaacgcgaagatgacacagatgttggaattaacttacaaagatgtttacatagctattataacaacgctctaacaagcatcacaaacactgtttaataaatgggatatagaaatatttagcaaagaaatataagatatgaagaagaaccaaaaggaaaattaaaaacttaaaagtataataaccaagaaaaaaattacacctcactcgttgagctcaatagtgcaatgaagatgacaaggaacttaaagatagatcaatagaaattattcaatctgaagaagagagagaacaaaagatagctccttcctactcaaaacaagaaataacagatcctcaggaacctattcaacaataacaaaaagtccaatatttatgtcattgtagtcccagaatgaggggagaaagtgtacatgctgaaaaatatttgaagaaataacaattgtatatataccaaatttggtaaaagttaaatgcccgtagatttagtaatttcagcaaaccataaatgggataaactgaaaaaaatctatgcatgaatacataatgtgtcctttaagaacaggtgtatgtcctgagaaatgtgtcagttggtggtggtgtgtgaatatcatagagtgtacttacacaaacctagatggtatagcctgctacacacataggctatatgggatagcctattcctcctaggctataaatctgtacagcatgtacatgttactgcactcaatactataggcarttgtaacacagtggatacacaaaaatcatccagaaaaacacccagagggggaaaaaaatgtattatccatggggaaacagtgatttgattaactgcatatttttttgtcagaaattaatgctagggaagaagtggcacaacatgtttaaaaggctgaatggaaagaatgccaacctagatttcaatatccagtagaaatatccttaagaaatgaaggttaaataaagatgttctgtataaaggaaaactaagggaatttgtagccagctgacttcctctaaaataatttttccaggaatttttcatttacagaaggtaaatgttgtcagaagggaactggaaacatcagaaatgaaggaaaagtaacgtaaatagtaaatatctgggtgaatataatggtctattcttttcctagtgaattctttgaaatatttgatgggtgaaagcaaacattaagatactgtctgatgggattttcagtgtatgtagatctaacatacagataaatacaacataaaatggggagagtaaagggactatattgtagtaagtttgctatattccacttgaagtggtaaaattttgattctaactacaatgcgaaaagtatatgcattatgattccctaagcagtcattaaacatctatcattaaacatctatgcaaaaatatagccaaaatcaaaataggtaagtgtaatagtaatgactctaaagaataccagaaagcaaaacagggataaacagaaaaaagaataaactgatctaagtcattcaaaaatatcaacaacattaaatgtgaatggtctaaatatatgaattaacagaagttgtcagaaaaaaatgacccaactctatgctgtccaattcatatttgaaattcacttcaaatataatgatactgttaagttaaagtaagaagatggaaaaatatacaaacacaaacaaaagaggcaaacactaatgaaaagaaaactggagtggggctatattaattatggaccagtttttgtcatctcagaaaacttgtttgcaacaaattcttgtgcaaatacttatttaacatttgtgctggcagagggaagatcagatgatctgaatttgttgagaaattgtgaaacctcacatttcacaagagatgttgccttttcctttatctaaaagctagattccagtagttcttatgctacaagtgattctctgtttctgcaccttcctgcatatgcaaagatcttttatttcagtactgagttatcatattttctatcatactggatgccattttaaatggcaattaaacttaacatgtgttgtgccagtaatgcacttaaagtgatggcggtgtatatgaacattatgacttacaggcaatgacaactcttcataattttctcctgacaaacagctctttcagaggccatatagcttttaagaagcaactatatttatattttatttatttatttatttttatttatgagatggagtcttgctctattgcccaggatggagtgtagtggcatgatctcggctcactgcaacctctgcctcctgggttcaagtgattcttgtgcctcagcctcctgagtagctgggattacaggcacccaccgtcatgcctgaataatttttgtatttttagtagagatggggtttcaccatgttggccaggttggtctccaactcttgacctcaggtgatccacccgccttggcctcccaaaagtgctgggattataggcatgagccaccgcccctggctgcaactaaaaagtgattttagacataattgaataaggtatatgcatagaataatgtctgcaatatcatacacctgaaattgttcatattgtttgtctgtgagcttgtcagttgaagaatgtgttgtcagcatttgggctataccagtgaacaaaacatttaaaatactttgactttgtgaagcttatattttagcagggcagacagatatggagtaataaacataataaatatgttaggtgataaatattatgggaaaaagtggtcaagggaagagggaatcaggggagtcagtgttgagtggggtggggtggcctgtgatgggggtagggtaatcaaggtagttgcattaagaagttgaatttgagcctactcaaccaaggaaaggaggagctagccaactagatgtctggtggaagatgttccaagcaaaggaatagctattttaaaactactgaggctgaagtggaatagacatgtttctggtccagcaagaagatgaaatggctgcagcaatgagcaagggaggagagcatggtaacaggtgatgttagagaggtaatagcgccatattgtgtagaaccttccagactatcttaaggattttggtttttgctttaaggggaacattagatgataggcatgttaaaacacttgcagtttttattatcatgggtcttcattattttttctcttctcctttcgtttgctactcagtttatggtgttttgttattttcttttttttttgtttttgccaatgtctcttcatttttttgcagagccctccctcctttcttttttgtaccaatatatgctttttaaatttttctggccagactctgtggctcatgcctgtaatccaagcactttgggaggccgaagtgggcagatcatttgaggtcaggagttcgagacaagcctgaccaacatggtaaaacctcatctctactaaaaatacagaaaaattagccgggcatgatggtgcgcatgcctgtaatcgcagctactcaggaggctgaggcaggagaatcccttgaacccgggaggtggaggttgcagtgagctgagatcgtgcccctgcactccagcctacgcagcagtgtgagactgtctcaaaaaaaaaaatatcttttgggggaaacagtacctagttggaatatttcacatttatttagtgcttaatatgtcaagcattttcatgtacattgttttattttatcccaggcagcactcttttttaatttaagctccaaaataatagttatgatcacagtcattgaagttgtctctcgaaacattttgaatgttagctggcatagctgaagatggaaggatcattactttggccaacgatttcacaccatctttgaaacaaaaaagagttccagtaagtcaaatacagaggacacatgggcattccagttacccttaagtgtggtcactgtgtaattttttgttgctgatggtgctttttgggtgaggccaggtttataaatttaacctgtgacttagtgaagacgcttggttttttcttggaatgacttattcactcttacggagggagggtgtctaactgctagacagggcttgaggccaattcttggatcaggtgttgtgacagggaggtttctagaaagggtgctgtatgtggtgttggtttttaaaatccgggagaataatgcagtctttattattcctaaaggaaataagtgaaacatgtgaaagaaaaattacaccactgagatggtctctttactcaagggaatcttcttcacttctctgtcctttgtaagatgattaatagatagattttatttaaactgtggcaaataaatgaaaccattaaatatttatattgaaagtaaatatattaataaaggcaatgaagctttctgtaggccgcatggcctgcccccaggctgtaaatactccttgtgactttccaatacaactgccaagcactgcctctacacagtctttgtaaaacttttccattccaaatccacttggtactttcattatggtcttgttaacgttgaatgttgtccaaagggacttgcaagatagattttccccttattgaggaggagcaaaagaggaaatctataaaagcatttctagttggtattacttcagggagatatattcataaaaaatagtgatacttctataggaagaagatcttttaatttgctattgtttaaatggtgagaatttgggtaaatgtatttgcttttactttattttagcagcttttagaacattctgcataggacaacctgggaagatcacagtattttatttacatatggtataaataagtgaatatatctacaaggtacatgttgactgtatacaagatacatgtagatatgcacttaggatattggtttttaaaatttggtccgttttacccagtttagcatctctctccctatttcctctaaacaagatttttttctgtggggatctgctaacatgtttcctatattctcatatttggtataagacttatgggcatcttttgctggtctcctatatgtaagaatatttgcttaaatgtagtaaaagcctcttatgaatgacaaaccctttcaccagcatgttccatcctaatcgtgtgcttgttccctccatatgtccttgttgaggggcataaagaccagcaaggaatgttcttgagaagggagagataggacctgaacactagcacccacaggcaggtacaagaactacctatttcttatactggaaaattatttttttcttttagatcttggatttgcctgagttgattgataattccaagtataaaactaaccaccttcgggtacacaatagaaaagagcttattaaaatattatctgaacggtaagtttggatgttgtattcatccatttaagaattaatatgtgataagcatttatctggtgttttatatgtttttttcttggcttatttgagatcaatttgtaattctcttccattttacaaaactggctggtggagagattttaaagctgtggggtttttttgtttgtttgtttagaagcacttgaacacattttatgttttgttaagtactgagtcataacmatgatataaataagaaagtcaccatgacttgaatttggttgtttctctgtgtcctgtacctgtttgggtttagtttatcataaatacaacaacaacaacaataataatttaacattatttcatactttcactttgttaaatgctttagatacattgtctcgtttaatcctcataattatcctgtgaggtaagttctgttatttccattttacatgtaaggaaagcaaggtaaagagaggtgaaatcaagagttggtttgcatttctgagccactcctgtgaatcttgatgttatttctggatcattgcagatgccacattgagttatgggtcataaaatattaatgttaattaagtagaatattttatttccatttttttccattaatgtcaggttatttttttgtaatacctgtaccaatttttcaagtttgtctgaagaaaataattattcttactgtttcatgtcagtttcactttttgtttgcctttacatgtcttctgaatctgtacaaatgggctttgtggcttttgtggatctaaatgcccacatgaacttttcttttatattgaaaatttgctctcatcatgccaataaattaggtaattttgtttaaataccatatttagccttttgaaaaggctcaagtgtttctatgtagtatacatcaaagttataagaactaaaattcygctgtttttatttttgttgtctttgtatttggggatgtctgcaggaatatctgaatcaacattcatctatctatttttcctggatttgaaatacttttgtaactttaaacattttataattttaaacactgcctgtatcttttccatgtgccaaatgctattcatatcaatagggactgtgtgttgtgggactgatagacacagaatgggggatggagaactgggtgcccttttctggtccctagttaaatataactctgattctaccgcgaagccccagagccctcaatgattaacttttctccacatgagaagtgcccatttatttcttctttttgcctctctgcctctcaagcatttgtaattcatataattaattgataaagctttttcctttcacacgatggttaccaagtttcaataatagccacttgtgagaaccttatcagaagctctttgataaactgaataaatcatgaccatactgcgagaagaacagatcccaagaaaaatatgatacctagattggtttcctgtgttttaaaacttttattccttgctaaattatgttatagagttcaactgtgggatgacttttagtagcatctgtaacatactcattgccattttccctctttggggtgaattatataatctgcaaccttcttctttctgttcttttatacacagaagtagaagtttcagcattttggtatctataagtttgttatatttttattcagacttaacaataagtaaggaatcgacctgcaaggaagagacggggcaggcgtgggtagtcctaggagaggaaatttcataaggaggtcacatcatcattggtactgccgttaaaacacagaccacagatagagcccttggctgcttgcaggctagcttttgtgctctcttctgctagtgcgctgacattttttggtaccttcttatgagttgcagttctccaagtctcttctagcacgtctctcttcctccacggtagttcaaatagtgatgacctgggaagattagaattagaatattgattcattccagtttataagcttatcatttatttttctgaacaaatatcactggaatcattagtactgcttagtgcttggctttgagaagtctcttaaaatttctcattttcattatatgatgtgtgtttttccagtattcaaaaatattagtggtgcttcataagttacatgattagacgtagcctccagcctggcatgcggtgtcttccataatctgacatcacctttcctgtccactcttcttcttacatgtttccaaaggacggccctgctatagtcaccctcccaattggtttagtttcctctctgaaatgcttctcagaattaccactattctgaaacttagtcatgcttcaaggccagttctagaagcctctgttcccagtaagatgttggcacctttaggaaagaacattgtccttttcatgccttgtccgttgccattgccaaacagaagtacaatcaacgttagttgtcattatgaatgatactgctctagggccttctcaacattctcgtcttgctcagcacatgcattacacagccacctcagaacttgcaggcattttatttcctaacaaaagtgttacattagctcatagccacaaaaaaggagccagggagaaaggaaggagtggaaccagcctttggtggctgccaagtacatgccagataagtgttattattcccacttgatatgaaaattctgacatttagggaggtggtctccaggtcaggcacatagtgaatagttagaaatgggattcaaaaggctacacctttttcatctctcatattgcctccctgaagtggcacatgaaatatgactgtgtccttgtttgtttatgcgctcaagaaatatttattgagcactaactgtgtagtaggcactgttgcaagttggggatagagaagtgaacgaaacagacaaagtgtatccatgaaaaataatacaggccaggacaaggaagaatgccagaagttaagtgtgaagctgggtttttcatttagtctggtcacagagggcttctctgtgaaagtgacatttgatcagaagcttgcaagaaatgagagaaaatgtctgagggaggctggcaggcatctgggagatgaattccaggcagagtttatggagtaagtcagaggacagtgtgcttggatctgagggagcaagagaagaggggtgtcaggttggttcagagagagtgggagcccatggcaggcagatcaagtcgtgaactcatgaaagcctttatgacaaagtagtttcttaaacttgtgaaataaaggattttttttttctggccataaaatggatttgcttattgcaacttttttctaacttgaagagagagcgtcaagggagggagtgctctacctagtagagaagaggtcaaagcatttcagcaacgtggagtcaggaagaccccgtttctcacctaggaagaccagagggccaggttgaagtggtctatgcttctccatttattcagtctctcacatattcaacaagcatttgttgaacacctactatgtgccatgaactgttctgagcactagggatatagcagtaaaatacagtcaagaattcctgccctcctgaattttcatttggtaaccattgcagactttctagaagacatacttctttttkgtagtggttgtttttgaactattacttaacacatttgtttcggtgagcctaagaagttagttttccatatttttcataataaccacttaaaaaattttttctcttgcaaaactattacagttataggctgtacctgttactcatttattgtactttttcaacatgttgatatacatgctccagtttttaaaatgtggtttgccagccatttccatagtaaaaacatatttttagtaacagtagccactcacaaataatcgactttaccatgtgagtctatcgtgtttttgcctgttgtcttctgttaaaccttacatcgcaggcactttcctttaatacttatagacactttccttgcctgatatttttattttagaaaatctttaaaacgtgaaaatgtggagggattcatgagagtgaatttgcacagcagataactttaaaaacaaactctaggaatgatgaactcactgtgtttattttaaaaagttttctcatcctttacacccaattcgaagacagtgaaaacagaagcatttatggatttttacaaagttggctcttgtaaatatacacgtgaatttcctattgtgtttcaaaatcttccttccaaagtattttccttgagcaatttttgagtactcccctccctgtcccttgtaagccttcatttatattttttagaatcaggtgattctcctatgaaaagtccaggcttttttggaagtacctaccagagttgtcagtcacttacctcagttctctgttattcttgctaagtacagtttgaagctactctctgagggcgatcagcctcactcaggacggcagctgcctgttttggtcatcagctgcgttttccacagccagcacacacgattcccctcaaatgctctcaagtgttactattccccaaccagggctgtgagcaagtcttttttattaatctaaaggtagaagactttcccctggagtttgccattttatccagggtgttgcagaaagtatgtttacccagctgctaacattgaaaactaggtaaaactcaatcatgttaaaaatccctagctaaaacagaagaggagatataatggagactaatccagcgccagataaaacaatccccttctttgcaatgctaaggagcaacaaactcttaaacctgtgctactcacacaccagatcagcatttttgcaatagttaggaccccaagagagatattgcaagttgtgaattgaaactaggaagagagggataaagatgatgtattagtgtttggggagaaataataggaaaacatgaaatgaggatgaaggagaagagaattgatggagaaaatagacataaaatttattttattctctctctcttcctctcttcaccaacatttattggccattgactgtgtaccattgtcctgcagatacagagctgaaagatgaagcctgggcttttaaggagctcatggtctaattaggaaaataaacacasaaagcattgatttaagtagagtgtgggaattacctgggtaatcatatgcacagtggattggggagcccagagaaggagcaactcctttaatctgggaaatcagggaaggcttcctggagatggtgccatctaagataaatcttgagggacaaacagaattaggcaggtaaagaaaaaagttcaaagaaggaaatattgatgtgaatgtacttttgtagcatgaaaataaaatcatgacagcagaaaaaaagtacagatggtccccaacttacaattttttaaatttaccatgtggtaaagtggtacacattcattagaaactgtactgtgagcctggacaacatagcaagaccctatgttgctacaaaaattaaaattaaaaatttaactggccctgctggcatgtgcctgtagtcccagctactttgggaaagaaaccatcctgtgaatttggatctttttccagggtagccatatatgcagcaaaatactctgttgcgatgttgtgcagcagtagtgagctgcagctctcagtcagtttggtaggttaggtatattaaatgcattgttgacttatgatgtttacaatttaatgatagttttattgggacataataccttcataagttaaggattatctatagtttggagagatgcagttgacaattttcaagctgcttttggaaaaatgttacatatgtaaagcaagtatatgtcaatgtagtcctagtgaaggcatttgtaaaaagttgtttacgttatgtcatcataaataaaactaacagcattagataagttcgccttttaaaatactgtggcaattcctttagtaaaataaatagttttggtttggaatgatttggttatttcttaaattaagtttttgatttttaattgtctatttacttattttcagagtttactgcattgtggagttaaatgtcctatatcagggccttttaacagaggtgccaaacaagtatttgttgaaatgaatcaagcatttaggctgggtgcggtggctggctgggtacagtggttcacgcctgtaatcctagcgctctgggaggctgaggcaggcagatcacctgaggtcaggagttcgagaccagcctggccaacatggtgaaaccctgtctctactaaaaatacaaaaattagctgggtgtggtggcacacgcctgtaatcccagctactcgagaagccgaggaaggagaattgcttgaacccgggaggcggaggttgcagtgagccgagatcatgccaccacactccagcctaggtgacagagcaagactctgtctcaaaaagaaaaaaaaaagtttattagttacattcctctaagttgatcatttttaaaatttgatatcaaattattttgaatagatttatacaaaatactggagaattggacctggaacatttcttggctcttgatggagcaattgtaacttcaaaggtccctatactgaatgtcaatgtaaaaaactgacatcttggcactattaagccactatgaccatttcactgccctggctaggtctttctggggctctcttcacctttcaaaaaaaataaataaatatattttttttgagacaaggtctcactctgtcacccaggctagcgtgcggtagtgtgatcatggttcactttagccttgaattcctaggctcacgtaatcctcctgcttcagtctcccaagtagctaaaactacagatgcaagccaccatgcctgcttaatttaaaatataattttttttaaaaagatagttggtgggtgggggagtggggtttccctatgttgctttggctgttcttgaactcctggcctcagataatcctcctgctccaacctcccgaartgctgggattatagctctgagtcactatgcctggcttctatagcttgaaggataaagttcaaaccattttacctgaacacatgcacctcccaccttgtcagccttgcctgggtcacacagaacccagtgctactacttttaatgtggcctaatctttcagtcctccatgtttccccatatactcattacttgacactcaaatgatggagcttcttaatctcactacctgctatcagtcctttaaaataagcacaagttttaggagcttttctggcctcgctagtctgttccaaggggcccctcctgtgccgctgcatcacagcatctaccccactcaactttcatcagtcatttacttctcttcctccttgacaagacagtgaatttcttatggcagagaatatatcctttggatttttatttctagcacctatttggcactcagtaaatgttctctcagtcagtgaacatgtgaagcaatgatgggcaaggtatccaagtgtggcagaactgaccaaagggaaaaagcaaggatccacgatgtcaggttctacaaaacagaaaagagcagtggtagctggaagtgaggactttgaatgaactagagaacctgtatcgtggtcatacaayataagaagatctgaatttgagatcctagtctttcagtgatcagccttgagcttcaggttctcatatatcatacgtgtaaaaatacctacatcacaaagaggattaaaaaccagaacagacgggccgggcacggtggcttacgcctgtaatcccagcactttgggagactgaggcaggtggatcatgaggtcaggagatcgagaccatgctggctaacatggtgaaaccccacctctactaaaatacaaaaaactagctgggcatggtggtgcacgcctgtagtcccaacaacttgggagactgaggcaggggaattgcttgaacctgggaggcggaggttgcagtgagccaagatcgtgccactgcactccagcctagcgacagagcaagactctaagaaaaagaaaaaaaaaaaaaaaaaaaaaagcatgaaaacagccagcacagtttgagcatgcagcagtactcagcctatttgaggaaaatcttttttaaaaaagttttaatttttggagtacctagtgtacgtctataaatttatgggtagcatgagatattttgatacaggcatgcaatgtgtaataatcacatcattataatgggggtatccatcagcccacacatttatcctttgtgtctcaacaatctagttatactcttttagttatttaaaaatgtacagtgaaattatattttactgtagctactctgttgtgctagcaaatactaggtcttattcattctttctatttttgagacctatctgaggaagatcttaatcctggaaaatcataaactttacttccccaattgtttgctttagcaatttctatattagttttaaattcatgaacctcatttccaagatttttttttctgccaaactgtaattcttataagactcaactttcacaatttgtgtttacaaagttatttttaactgccaatcagacatcctaataaggatgacgtaactagtattatagtagtaatttacttctaccaaaagcaaagcatgacattttcattagcctgcatggcctttttgtaggtggataaataatttgttcaactttttgaaaaaataaaaatagctcataggacttaggaatacattttactttgtactaatttcctaattaagactattaatagtactcattttctttttttttttttttttaactaaaagagtaccttaatagcccctattctattccctttcaagagacacttgttctgcgttgtgggtaatgaacttggaatttgtgaacactccacttgagttatttcttgcacttgtgtctgtactttcataaagaatgaaacactttttgcgtgttccttaattgctaccctgtgttaatagcctccacgaaaagcttcagcccatatctttaagcactttagtaaaatacacccatgacttctcctgtgccatttttatgtgtacgtttttcactgttttatttggtatctctagccttcctgaaaactgtttgacttttcagttaagtaatatctgtaatttccttattttttattttctcatgtttaatttctaacatctgtgtcaccttccttggcctttccccctttcctaaatcctcaattttattcctccctccttccttttttggcctaccccatctttctgcccctactctgcttttcacactttgaactgttttaaaattaaacaataaatgggtattatgtagtacagtcttaattggatttcacttatttgcatgaaggctttattgagcacaagttttcttagagaacagggaggatttttatcagtggttacctatgtaatacagtttagaaggcatggaaggaaactttattccatgaaagataattcttccttacacatagtttgctgatttcagaggttttaccattaaagattttgtgggggagtgggggtgggttaaaagtctgtatactcttaagtttcaaacagcgcagggagggttaaagcttgaactctgattccttagtgtaaatacattttcccagatctttgcctcagtttagattttaatgtggagaaaacagaggaatcttccaaacactggctgcctaaggtaagtgaagagggacaaaatgagaagctgagagcagttaggagccccagagatgaagatccccttcctgacacatttgccaagggctgagaggttatggaagtgtcttttaaatccgatgaattccacctttccctcaacctggcaaccatccactctcccatatctacatgtttttaatatacatagagaaacttattgttttcaccctctgaaactttttgagttggtttaatattcttttttccatatgatcacattttaaaatctcttctgccaacttttttttctgacttctattaatgtcttatgaggctgcatttcataagctttatatgtatcctcaacctacatatttagtttattgtaacctcctcccaacccctcataattctttgaatcatatcatggcattcactgtagaggggctaatttggataaatggatctgatgtttggtgagggtcacatttgttttcttatgcattccttggcagtgctgccattatcagctaatagatggtcccttgtaaaatgtctatattttatgtggtacattttctgaatgttggttatttggagatagatttaagtggctgtgttttgttactataaaatcagcccggagggtaaaagaaagaaagaaacacagctctggaaagcatccctttggcttagagaatgcaaagggaaccactgcaactccaggcaatctcctcgtgaccagggctttttccaccctgttaggagaattctttgtgactgagaatcaaatgatgtctaaagacttaaaagtgagtcagtatggaatggaatgtcatctcagtttttttttttccaagagggctataaaccattccacactaccttttaggaggaagaattaggtggtggttgtgggatatttatatgtttgtatacggaggggatgatggtgatgggagggagtccagtaaactctatttccctggataaaacatttaataccctcgtttctcctttggaacttaatgtgtatttttagatttatagaatgttagagtcctaaacacttggggagctggatagaagtttggatatcatcaaatttaaccccttcctaaatgtgagaacttagaattaatagtatcacgggccaaagatcccttgaaacgtggtggaagactccacaagtcaatgctaaaggccttcttttttgggagggggaaggtacagctctccagacttttctggctgaccttatttcgctcttgactttggaaatggatggagaatctggagtttgactcagtcaaatctggtttgctcctcggactccctgactcatccctgtcctgcccaatttcctgcttgcctttgggtcagactgagttctgctctgtactttgcccacttgggttctattcttatctcctcttagctttggctctccagcatggactttgcttgagtctttgatcttgcatcaactgatgtttctagtaagggccgacaccacctctctcccagtgctgacagatgacatccctgctgagtcccgatttccaccagctgtttagcgttctggatcattccctgttgaccagctgcttctggccatcctcacctggacaatctgcagtagttttggcatgttgctcactgcttccattggctgacggtacctaccttagttctagtttgtcatgttttccccagttcacacagctcattgatgaggctcagattgctatcttctgattatcaatgtcttttccatagcactcacggaataattgcttattctccttttctctaactacacattttatgtttacaatattcctggctaggaaaagaaactaagtgaacagtctctctctctctctctctctctctctctctctgtctttctctctctgtcacacatacacagaatcatatgtacacaacttaaatctctaaatttataaatttacattttcctttttaaatgatttttctttcctctattgtgaattgtttttcttttctcatttgctaactttggaaagagaaaaaatccagacattggaatgtctgagtttatttaagtctcagtactctgttcaatttaatgaacggaaacaaaaaaggaacatcaaaatgctggcctggatctttgtggctccaggattggccctttttggtggccattgatagataatgtatttgaaaaataggagtaattgttggtttcaacttactttttaaacacatcaaaatatacaaatatattctaaaacacagaaatttggaattatgagaaagtgagagaaattgtgaaaaacataattgtatataatttaacattctgttatctaaaatagaggataaaatgggtctctgaatgcacactaacaagcacaggttgtttacttaaatggttacatttcttagactaaaaaaagtactaaaatactaaatataaaattaaaataataatatttaaaataaaaattttaaactgtatataagttatagagttaagcatctgaccaaatatgaaatcaatgtacttgcctatataattcaaaatgtaatgaagaagagattatatgcatggttaacagcagcaatgaaatacaacatatctagggataacagtaacaagatgtgtatggggcttacatacaaaaaacctatacaactttcttggctaggaagactaaatattatagtgaagatgtaaaattttctcatattaactttcacaaaattcaaaacaccatttcaagaggattatcttcagaatttaacaaattctaaagtttatcttcaagtatacatgaaattgttttttaagtactggagataacaatccctgctatatggtagaacaattctaatgttaaagcaacataaataaattgaaaatataaggtgggaaatatatttccaagaataactgcagataatagtagttattttacaaagagactattaaaataggtcagtaaaaaattataacaacctcaatgtattaacttgaaatacttcacaaaaactgaaaacgtaaggtcaaattcatgtatgaaaagtattgtcttactagaaattaaatataaccaaataaaatggctgaaacatgtttttctctttttaatcattcacatgcttataaaaatgaataataattagtgttgcgtaagacatagtaagacatacaggttcattccctgctgtgcaaaaagcaattgttcaataggcatatagagccttaaagtgtcattcttagtgactcgataattctattttgaaatattcattcttggagtcctacgtaaatgtctttagaggaatcaagataaagacaatgataagtacacaattgcagagttgttcacaatcatgaaatagtgcaaagcacatacacatctggcattagagaaacaaataaaagcttactttggaatattctgtattcactaaaaattaaatttgccacagatcttttttactgcatgggaaatgcttattacatcagactaatttaaaggcataattataaactatgctagcaacggcataaaggaatagcaccaaagaaggaagtaaagctaatattaaccgtggttgtctctccatagaattataggtaattgtttcacatctttatatttcccactgttttccacgttttttaatgtgaacatctcagtaatcaatgaattgatgaagctaacaaatagctttggaatatacatccatttttaagagagcaaaccacataatgccaataataataataataataataaaaacttcagggatctgacatagctgatgagcactatcagcagttttatttgtagccttttgtcgttgagagcccataatggcacagaacatggaggtcaaaatataggtaagaagtgccttctgttattgatttatggaaatgccttctgttattaattcatgttcttgactttcactttgcgtgaatatcaatgccacatgtatctgagtattttctagctttatgttactcaggagaaatggctaaattcttataataatgtgttatacaattgacttcttttcagttgtagttttcttccttacaaatgcattgagaaagttgtatatttttctttctttgatttttctatgggaaggaaagtataaactcagtaagagggaaaagaaccatgtttcttgtttgtgtattacaaaatgtttcatttttcagtgggagagtgaatgttctgatgaaacacagtccaccaatgacttctgccataagtagccgaatccactaacaatttatgcatgctgtttgtggttgtttactgtattgttcaataaatcttacatacttattttaacagtaatcatatgaagcatcttaaagcaacatgcacatgcaaaagctgtacatttgagaaatgtcaatcattttctgatagttggttacgtcatttttactaaatatatcactttatcccaatagcaatagtagttggatgtgatatttgattgaaatattatttttcagtgcattaaagttaaaagttaagattgcatttagtatactctcttaagtagcctttatttttcccactccatgtttctaagcctaaggtgtttctgagtctgaaatgttccttctatcggttagcagcagggactgagtttttgatagtacttttgaccccctcccaaaagtcctctgaaagttagaagagtgtggctgtgatccacaaatgcactaggaggagcagaaaaaaaaaatggtggcatgatttaaccagggacaagtaattgttttctaatttgccagctcagtttgagttacatgtttgaatgcaaataacccccttggggcatatccaaaaagaaattaatttaggaactcactcagagatattattgcaaatggtctagttttataatttggtgcatggagtccaagggtggccaatcaggtaagtaagagtccttgggtggctgacagggtgggtaaaaacctaacttttacttgagttatagtgattaaatgtaaaatttctgtctcatatttctcccccattcttttaccatttccccttctctctctctctctcagctactattatgtttggtaggccacctggaggaaaatcatgcccgcttctccccctttccctatgtcaagctgtagtttagctggtaacataaaacaatcaaggaatgtttaattaatgtcagggatacccatgttatgctgaaaaatataaattatttaaagtagtttacttaattactaaatgacacagttaatagaagatttgagaagattcagaaacagcatagagtagtatgttagggtttgcctagaagcaaaacgaatctggggtcttgggtaccattaattttttagggagaggattccaagaaatggtattgagtgtggggggcagaggggcagggaagtgaggcagataaacagtttgccattttgggtagctggggctcagtcatgttgggaacagtctaaaaactgtgtgtacatactttggaatcatgtaaccagagggtgtggatgttagggcatttatcccccaactactatcctccagtgtttgatggtttcccctggaggtgccatccagcacactcgcatagttttgggaaaagccacatgcaaagaagaggtgcaggcgtttggaaaggaaagctgtcagcagcatggaactgtttatacttccagtaaacaatagacaacccagaccagctcaggttggtcaggggatgtgggatggggcatctgtagcctctacagctctgagtgtcagaagacaagaaaggctaaatgcaatcatggtagcattgaagcttgaatcaaactgctcagctttcaatacttgccctgtcctattaagacattagttatgtgacttctgtgtttcagaattttttcatctataaattggggataatgagcttataatagtaattcctacctttaaaattgtcgagagaattaaatgtgtgaatacagtagagggcctggcacatggcaagcacttgataagtactgcatattgtaggggtctgccagggcagcagcatagtgtgatggtagttaacttgtcttgagtaacagagttcacttaatgaagtctaagttttcactctttttggaagctatgtgccacgttgacttgcattgggtgcccattactaaatcaccttttaaacaaaaccttagcagttcctaaaccktatttctcctgtgccttcatggtaaagtacattttttattcactctgtttaaaataaaatcatccttgtttaaaccaacatgattgctgtctctgctagcttcttgtttttcacgaatctgaccaacatgacatcatccaagtccttgtttgggttcagcaatagacaccatcctcactacctgaggttgaaactgaaagctctggttgtattatttgactgccttcaaattcacacatttgtgtcattatgcaaactgcatttctccgtcttgttcacgaagatattttgaatgaccttgttagtaacttcggtgaaatccaggaatactttgtccatagtatatccctcatatacctgtttaaaaccaagcaaaatagaaaatgagattggcttggcattatttgctttaaggaaaccatattggtgactaattcttactatttccttttctaaacttcaaaagagtactttacaatctttcattcaatgagtatgtattgagcttgaactctgtgaagcatcatttcgaatcccaggatttttccaagaattaacatcaaatttacaaaatccagtttccacatctttaaaacgaggcaatatgaggcatattacaggattgttactatgattcagtaagaaatatgtgaaagcacctaacagtgtcagagcagagaggtgctcactactaagtcagtttcctttcccatgttcagagagagtgaacccaaataattgatctataaataagtctatcaaattatctatcaatccatcaattgattgtttcattcatccatccatcctaaaattcatccaccctttattgctcacctcctcttttactgaggtggtatagcaggggggtgggatggggtggtaagagcatggattctggggctcgtactgtctcagttctaatcctggctcttgctaactctgtcatgttggtaaatcatttaaatgtctctatgcttcaggcccctcatatgtaaaatggggatgatagtagtacttatgttataggaattaaatgtctatgtctatgtatatgtctgtgtctatgtctatgtaaagtacttaaaacagtgccttacacatagtatatgctataacaatatcagctgtcaaatgtcaggctctgtgtcaaggctatgtggaacagggaacaagtgaggctgtttcctgccccacagtgcttacagttagtggagcaccacatactctctattaagccatgagactgctttaattatctgccattttttttaaaagatttggaaaccgttgaggaaaaaaaatatgatgatgagggaaaaaatttcttcacaaattgtttttggagttctcttaatttatatgcatagttagatgtaatcatatgcacataacaattgtgagttctttttttgcgtttgcttaacgttctttgtgtatatggtatcaagtattttgtgtacattggttgtattttttacttcaattggctcatatactaccctgttgtataaatatttcatagtatactaagggattttgattttttttggcatttagggcatttaaaatttttattgttattagaattttattgtcatgagaatattattatattgaatattactgtacaaatggaatgattcaatcaaactgaatgaaaagatttatagttctcrttctttttttttttttgagacagtctcactctgttgccaaggctggagtgcaatggcacaatcttgcctactgcaacctctgcctctcaggttcaagtgattctcctgcctcagcctcctcagtagtccctgtacttggagtcctcctgggacaggtgtgagccactgcgcccagccaaatgtcggcttttaatatcacaaacaacatttaaactagtttttgcaaatgagagcactcatcttagctttaatgtgtttattcttcaattaatatagagaaacagtatttgagataaattacttccatgtttctcataataatgctatatgtataggaaagataacatcctcaaggccaattttattggattttattatcatattatacattcatatttataaaatatttgaattatttgagtgatagttctgtaaatagagatatcatctttaggagtcatttaaaggaaatgaataatttaaaggaaacaagactagtctgggtggagttagggagggtggacagagagcagcaagactggggagttggagtcttatttagagatttccaaaagtgacttctttctgaatgtagtagtatttcctggaagagcacttcctgtactgtatacatgcaaaagcgggttggattacctctcttcagggttccttgggtggaatgacattgtcggcaaaatttattctacctttggaatcttttggaataaaaaataacattttctatcctatgcctcttttctgtataccattttcatgttggtgtattatgtacagtaagaaaataatgttcccattcctaagactaatttatgcatggaaggcagcaaatgagaaaatgggtaaatgtaaaatagtaaatttttatgcttcacttgaaaatttctttattttaataagtttaaattaaattcagtggggacatattaaaaatagggtttcaaaacagaaaaatcaaagagaagttgtaggcttgtatattctggcgtgttgctttccattaccatatacttgaatttaggttatgtttgatatgttgcttagagtctgaatgtgcagttgaagtgactttagcttgattattaatctttccagtatgtcaatagagaacaaatagattttagggcaagaagtctgacaacagcatccccaacaaattattgtttgggcttttttttcccccacctttaggagagaggttcttgctgtgttgcccaggctggagggcagaggtgcagtcatagctcactgcagcctcaaactcttgggctcaagggatcctcctgcctaagcctcctgagtcattggtactacaggcattacaggcatacgccaccatgcctggctaattttttaaatttttttttccagagacagggtcttgctttgttgcctagctttgtcttgaactcctggcctcaagtgatcttccctcctcagcctcccaaagcactggaattatgggcatgagccaccatgtctggcctcctaatttctatctagtacttactacctgtgccaggcacaaaaataaggctttaatttacatcacatatattttatttaaacttcacgaaacttgcgcgaggtaggaatcatcattatgtgcttttattgatgatgaaactaaggcttaaagacttaagatactgtaaggtcatgatggagacaaatcctggctcgcctatttaaagatgtattgctgggttttttaaaggtgtatttaacaaataaatattgtatatatttaaggggtgcagtgttgtgatttgatatacatatgcattttgaagtaatcaccacaatcaagctaatatacacatttttcactgcagcaggttagcactgtttttgtgtgtgtagttaactgaagatctaaccttttggcaaatttcaagtacagaataaagtatcgttaactgcagtcacgttgtttactatatctccagaacgtatttgtcctcataacagaaactttgtaccccttgagcaagatatccctctcccataatcaaatctaatattaatctaatccatgttaatataccatataatgtcaaatcaaatcgattcgatatatatatggaattccacatatatatgaggtcatatagtatttgtctttctgtgtctgacttatttaactttatatattgtcctctgggttcatctgtgtttcagcaaatgacagaatttctttattttttatgactgaatgatagtccactgtgtgtgtgtatgtgtacctatatatatacacacacatatatatgtttgtgcaccttattttctttatccatttatccactgatggacacttgcttaggttgttttcttatcttggattttgttaagcatgctgaaatgaacrtgagagtgaagatatctctttgagataccggttcatatcttttgggtatataatcatgtaccacataacagtgtttcaatcaatgacagtctgaatgtagcatagcggtcccataagattataataatgaatttttgttgttccttttctttgtttagatatgtttagacacaatattcatacaataacatgctgtacaggtttgtagcctagcagcaatagactatagcttatagcctaggtgtgtggtaggctgttccatctaggtttgtgtaagtacactccatgtacgtgttcttatatgatgaattacttagcaatgcatttctgtattaagtgatgtatgactgtatacctagaagtgagatggctgaattacaaagtagttctatttctaatgtttgagagcttccctgtttgtcaaaatggctgtaccaatttacattcccaccaacagtgagaagagttcccttttctctatgtccctgccacacttgttatttttttctgatagcagtcattataacagatttgaggtgatatctccctgtgactatgattaatatttccctgacatagcgaagttgagcacctttttatatatctgttggtcatttgtacgtcttcttttatgaaatgcctatttaagtcctttgcttgtttttacattgggttatttatttatatttgctatggagatgtattagttccttatatattttggaagattatcccttaaatatatggtttgtaaatattttctctcattctgtacatcatctcttcactcaattgattattttctttgctgtacagagactttttagtttgatataatctcatttgtctatttttgcttttgttgctagtgcttttatggccataatctaaaaaattgtttctcaggccaatattaggaaactttccccccatctttttctattagttatatsgttttatgtcttatgttttagtctttaatccattgtgagttgatttttgtgtacggtgtcagatacaagtcaaatttctttcttctgcctgtggatatatagttttctcaccaccattttttgaagagattatctcttccctattctatgttcgtggcatccctgtgatgatcatttcactgtagatgcatggatttatttctagactctctattctgttccattgatttatgtgtctatttttatgccattaccacattgttttgattttttgtagttttgtgatctattttgaaattgggaagtgagatgccgccagttttgcttttcctgctcaagattgctttggctatagtctttcatagttccatataaatacttggatttctttttctatttctgtaaagaatgccgttgacattttgatagggtttatattaaatctgtagattactttggataaaatactcattttattgatattatttcttctaatccatgaacatagggtgtatttctgtatcttctttaatattctacattaatgttgtataatttttagtgtacacgtcttttaattttctggttgattttttttccctattgtttaattttattttttgttactactgttcatataactgagtaatgtattggagaataagcttcagaccacaaaagtgcccggagaggtagtgatctatagattggtggtgtgtttaatttatacacacatacatacacccagagacacacactcaagaatggctaaataagagtcaaagagtaagaacagaatatgcaatgagcatatacttcatgtagacacatagatataatatgaccattaaacatgggggcagcataatcaacattttttaaaaaatcaagtctggtgcagtggcccatgcctgtaatcccagcactttgggaggttgaggtgggaggattgcttgaagccaggaggattgcttgaagccaggaaggagttcgagaccagcctaggcaacatgacaaaactctgtgtttacaaaaaatataaaaattaactaggcatggtggcgtgcacctgtagtcccacccgttcgagaggctgacccgtgaggatcacttgatcccaggtgtttcaggctgcagtgagctatgattgcacaattgcgctgcagcctaggtgacagagtgagaccctacctcaagaaaagatatatatattatatatatataatatttcctatatgtggtaggattaagatatttattatgagattattatgtatatgatgtagaataaagcaaatgagaaattgtgggatattctaattttatcattacctatgtccttgagagccagaagtattctagaagttctgcacattaaaaaccaccatcaataaaaacttaaggtaaatacaaagccggtctaacgtacttaatataaaaatcatctacacatttataagaaaataataacccaatagaaaatcatcaaaaagatataaccagggattttgtaaaataagatgtgtaaataactgtaagcattagtaatcagcgagatgccccctttttccctataacacttggaaaataatcaaatcaatgataaaaattataatactgagttttggtgagagaaactgcttatataatgcatttgacacttactcttctcattgagaccttaagttaccctgttaaaaagtgcaactcttcacaaagggctttatttttctgcttaacttttttccatagcagttccacagataatacagattttattcatttatctctctttttggcaatcttggagatgaggacttttgtctattttgttcactgctgtaaccctacacaatgccttgtatttactaggaattcaatgaaacttgttccgtgaataaatattaaaatgttttaaaatgatacatatttaaaagatttccctttccaagaatggattgtagtgaaataagatcatgtatagagctgtatctgcaatgatgtttattgaagaagtactcagaaattttaggaaaataaaatgtaaatatcacaggttagctcaagtaacttatgatagacccttatagtgaatattcttcagccatagtaggtaactatttctggaccagaacatatgactggtaagtttaaaatggttacaaaacattatgatcattttttaatgttataaatatacatttgttacagaatcatggtatggagaaaagaataaaaagtaaacatccacaatttatacaaaaatgctaaaattatgcataaaccaaaattatttctatgtggtaaggttatagttgattttatttcttcttttctctctgtcgatatttaaatattttttctttaataatttggtattactttaccagtagttcttcacaaagaggtcctaattaaaaagacttattttttagtataagcagcctctggtgtgaggtgtgaccagacgtcggtaatgtgggtaactttcctatattatgtttccattcacacagcttaggttgtatggacggtcatagcaattctggtcaggccaaaccattgtaatatgtgatccacattttattcagaatctttacaaaaaacagtttacgtctgaactgtgaatgattagtatggacgagaattgttaatgtgttcataataactgtgaatcttaatacattaacccacataactgttgtttttaagagcaagttatatggaatgtactgagccatcttgagattgaaagcagtgcctagattccttgttggactcttactccatcttttgtgtggcctgcaaattgacatgcagacaatggagagctcataaatgctagggggagaaaagataactttaaccataatttatcagtaatatgtagagataattcctaagaggaaataagatctgaggaaattacaggaaatattaaatctgtgattctgtttacggtagaaatgccgaccaacaaattccagctgtttctctgtgggttacagaagtgtcacaggcctgtttatagttactgaattgtagactcgaggctggatcttacagagccttgttggtttgatttggatttactcagatttgtccaaagggacatttcgtataggtaatgcatgtatggaatgcacccctgtaccaagtttttgttcctaaaaacttcttcttctctagtgtcttctgcttccctgccaacagtttgcctccccacaaatgttagtgtagttttgtttatttaacacttatatagcacttacttgtactgtgcactgttctgaatactttcaaagtgttaattcatttaacttatcataataagcttatgagataggcactattttttaaaccaacacaaaagcaaaaaccttgaaggacaagagtaataatttgtggaattaaagtagctcctatatgaaaaaggtaattaaaagagaagctatagtccaggagaagaaatttgtaatttatgtaactgataaaggatttatttctagactagtacaaaattcctgtaagtccataagaagacagtttcactgaaaaaaaaaaaaagaataaaacaggacaaccctcaacatctgatgacccttagtcccatgaaaagatgcttaatttctccaactgtgggaactataaataaccatgagatataccatgctccctctatcggacaatagcaaaagttggtgagaatattgagcatggtggaagtagtgaatggcatcaattactttaaagtgcaattgggcaaaatctaatacagctgaaaatgtgtctagtttctgactgagaggctctgcttctttctctgtctacccttaggaaatcactgataagtaaatgatatttactgttactatgcagtgtgctaagcaatttacaactactataatttccttagaacaaatgagaaaattggagctcagagaaattaagcaacttgcccatggtcacaaaagtagattaagattaaatgtcagacttatcttctcaatgaattttatttattgatttattgattatcttctatataaggcagcagtgtgtagtgagatgggctatgggcctggagtgtacagacttgaatgtgagtatcttaatacttcaatttttcatattccaaataggaagcatttgtcttttctcacagcattcttgaaagaatcagttcataaaatcgttgccaatattatgagacattttggaaccattgggttgatcagtggttagttggaaagaagtcagggatgggtagagcccaggcaacactcccagtgctcccaagtggccttgggggcggacagtagctcaattgccagtggcctaagggtggtcctatatcttagagtttgtttgcatttttgttaatatctaatgagtctaccctactgaatgaacctagagaaataccaattcaagatctcctccagctaagagatttgagccttcagatccagacattgccctatctacttctctaagcctcagtttcctaaatcatgaagatcataaaactcatgtcataggaggactagaaatagtatttcttgtggtgcctggtacataaaaggcttcagttaatgtagcactaagatactgtattttaaaaacctactgcctttttaagccctctgtgggactggcctttagcaccacatcacttacagagctttgtgtggtctactttcatgaacttcaccaccagaagtcaagcagtasaaggtggtgattaacacatgagcattggacccaagatagaatttctgcttggtgcataatgtttacgtgaatttaaaaggtaacttaaattttctaaaccttgatttgcttatctttaaagtgaacataatgatggtattaatacttaccccacaggatgttggaagaattaagtgaagtaatgtgtactagtagcttagcacagagccttgcatttactaaatgcttaataaatggttcatttttaaaaagttaatcttaattagttaagatttttatgaagatcctattgataattgggcttgtgactctaacccaaatctattcaaaactcatgtgtattgtagcacacttcctgtgtttgtttgaagacttccagtaacctgactgcctgtgaatttcctattattagtaatatttttaatatacatcagacaatgactttgaaggaatgtagaaaacaatggaattttattttcaaatatatgtgtctgtctatatatctagataatataggtatatatatatctatatacattctttttttttttttttttttttttttggagactcggtcttgctctttcacccaggctggaatgtagtggcatgatcatggctcattgtagcctcaacctcccaagctcaagtggtgctctcacctcagccttccaagtagctggacctacaggcagtcaccaccatgcctagctaatttttgtattttttgtagagaatggattttgccaggctagcctcaaactcctaagctcaagggatcctcttgccttggcctcccaaagtgccagaattacaggcatgagccactgtgcctggtctcatgtatacctaatttgtggagggtttttatcatgaagggatgttgagttttgtcaaatttagtcaaatgctttttctgcatcaagtgaaatgattattctgttagtgtgatgtatcaggtttattgacatacattaggttgaaccatctttgtatccctgggataatcgttttaatatgctgttgaactccatttgctagtattttgttgaggacttttgcatctatggtcatcagggatattggcctgtaattttcttttatttttgtgtttttgtctggtattggtatcagagtaatgctggccttgtaaaatgagtttgaaagtattctttcctcttcagtttttggaagagtttgagaataattggtatttgttctttaactgttttgtagaattcagctgtgaaaccatcaggtcctgggctcttctttgatggcagactttttattactgatattgtttcattataattcaattatggtaggttgagtatatttaggaatgtatctgtttcttctaggttatccaatatgctggcacatgattgtttgtaataatctctcatgatcatttgtattttgtgatgtcagttgtaatgtctttttaaatgtttttggattttatttatttgagtcttcttctttraagaacttggacccctcaatgatttgttgagtttatcttttcaaaagccaattctttgttttgttgcttttttatttttattttttgtagttcctattcatttatttctgctctgatttttaatatttccattgatttataattttggggttggtctgtttttgcttttttagttccatgaggtgcatgattagattgtttattgttaatctttttactttttgatgtagacacttactgctataaacttccctcttagtactgcttttgctgtgtttcataggttttggtatgttgtgtatccatttatattcacgtcaagaaattttataatttttctttcatttttcttccttccttttttttttttttcaattgaagtgaagtcttgcactgttgtccaggctagaatgcagtggtataatcatagcttactataacctcaaactcctgggctaaagcgctcctcctgccccagcctccttgtactataagcaaattctacaaattctaccacacctggctaacttttttttttctgtagaaatagggtctcactatgtttcccaggctgctcttaactcttgttaaggagcatgttcaggagcatgttgttttatttccatttgtgaattttctaaagtttccgctattactgatatctatttttatactattttggtcagaaaagatagttcatatgatttcaatctttttttttttttttttttttttgacacagagtttcactgttgttgcccaggctggagtgcaatggcacgatctcggctcactgcaatctccaccgcccaggttcaagtgattcttctaccacagccttccaggtagccgggattacaggcatgtgccaccacacccagctgttttttttttttttttttttttttttttgtatttttagtagagaagggatttcaccatgttggccaggctggtctcgaactcctgaccacatgagatccacctgcctcagcctcccaaagtgctgggattacaggcgtgagccaccatgcctggctgaatcttaaattttttaagacttgttttgtaggctaatatatgatctgtcctggagaatattttacatgtagtagagaagaatgtgttggatggaatgttctacatatatatatttccatttggcctagatcattattaagtctaatgtttccttgttgattttctgtctagatgatatgtttattttttaaaatgtcatattaaaatcttttactactattgtattgccgttaatctctccttttagaactattcatatttactttatgtatttaggtgttctgatttgggtacatatgtatttacaattgttatgtcctcttgctgaagtgactccattattattatataaggtccttctctattgtctttacagtttttgcattaaagcctatttttttctgagtctaggaactcttgctttctttcggttttcagttgtgtgcaatatatttttccattccttcactttcagtctgtgggtatccttaaagatgaagggagtctcttctagtcagcatactacaagagaaagaaaagaaaaccaactggtttttctttccttttacttttatttatttatttatttttaattcattcaactactctgctctttttttttttggaagaatttaatccaacaaattcgatgtacttacagataggtatggagttaatactgccatttcagtcattgttttgtagttgttttgtagattctttttcttttctttctctcttgctgtcttcctttgtggttatttgaatttttttctagtagtatgttttaatttcttgttttttactttttgtgtattttttctttgtgaataccatgaagtttacaagaacttatgatttttgtaatagttatagcacgtaacaatagttatagcacattattgtagttaataacaatttttgattgcaacaacaaaaaactctacattttcacttcactccctcttctccacatgttgaatttttgatgtcacaacattcatcacattacattccatattctttaacgaattatcatagttgttattgtttttaatagttttatcttttaaccttcattctaaagatataagtaatttacacaccatcattaccatatgagtatattctgaatttgattgtgtacttacttttatcagtgagttttatacttcagatttttcatattactcactcatgtccttttctttcagcttgaagaacgatctttagcatttctggtaaggcaggatggatttccttagcttttatgtgtctagaaaagtctttatttctcctttatttctgaaggataacatgctgggtacagtattcctggttgatggttattttccttccatgtgttaaatatatcatctcactctctcctgacctgtaaatgtttctgttgagaaatcttctgccaggtgtattgaaagttgcttatatgttaattgcttcttttctcttgttgctttcagtatcctctctatggttttgatatttgacagtttgattataatatatatttggttagcctgattttgatgaaatctgtttggagatctttgatttttccatgaacaaatatttatatctttctccaggcttgggaggtttcctgctgttatttctttaaatgtggttgtacccctttacctttctccactctcttgaatgccaacaactgctcttttaatgtggtctcatacctccattaagcattcttcatttttttttctttttctccactgcccgtatattttcaaataatctgactttgaattcacagatgtttcttctacttggttaattctttttttaatgttctctattgcagttttttttttttggggtggggttcacttcattttcacctccaggatttgggatttttaaaaattattttaatttctctgttacatttctctgatatttgtttctctgtattttctttaagttcactgagcttccttaaaactgctattttgggccaggcgtggtggctcacgcctttaatcccagaactttgggaggccgaggcaggaggatcacctgaggtcaagagatagagaccatcctggacaatatggtgaaatcccatctctactaaaaatacaaaaattagctggatgtggtggtgcatgcctgtagtcccagctgctcaggaggttgaggcaggagaatcatttgaacccaggaggtcgaggttgcagtgagccaagatcacaccactgcactctagcctggtgacagagcgagactctgtctcaaaaaacaaaacaaaaaacaaaaaacaaaaacaaacaacagaacaaaacaaaamacacacacacacacaaactgctattttgaatactttgtcatgcacttcactgatctctatctcttcaaggtcagtccccagcaccttattttgtccgtttggtgatgtcatgtttccctgattgttcctgatccttgtggttgtgttttgatgcctgtgaattgaaggagatatttgttacagtcctcaccatctggttatgcctagtaatgttcctcaacagtaaacctgtccagaaatcttgagcagacccwctgtagtggtcccaaagcctatgatcactatagctattgcagcactagaaggagctctaagcccaggacaaccatgrccagtgccacccaggcttgagttccttgacttatacagctggtacagaagctgtctggaatcaatctgaggaagactcaatgagagcaccagctttgtgtggaggctgttcgtgggttcaagcctggaagacctgtggtctgtgtttcctgcagcataatgtttttggctagtttctcttgtgtggtaccttcactggccagaatgcagagcaaccaccagggtttgtatatttgttgctatgagctccaaccctgtgctttgtttctaactgagcctaggtggtctagccctgctggtactctcaaaatttctcatgagatctcggaatggtggggaacctgaatgtctgctttgagttccacttttcccactgcagaaattgtgaatgtagggcaattcacagtgtgtggtgctgttttggcttgggagagaagtgacagggccagagaattgttcttcttaccatttcattacagtttttctcagttttttggtgcaataggatgtctcagcctctcaagtccttgaatattcagactggtacttttgcctgatgttagttactagttggatttctttgtggaggagttcagctatacaatgcctattccttcatcttgctgctgtcactctaaaagaatggatttttaaggtcatttgaattcctgagatcttatgactctggaaagtataggaagtccctaaattgaaacatgatgttttaagcatttttatgttagtcagtttttgaaatgtgaattttttttccctaagacatactgcaagattttctgcaagacatacagaatttagggactggtctcaaagaaaaattaagaggagatgctgtgctattccattttaatctaagagtctcaaattgtcgtccttctctcagtgtctgggtctgattaaacatagtctttccaaggttttaggagacaattatgtaccacattaattcaaactaatgtcactgagagactcttattctttccaaatcatcatatattcactcattcagcaaatactgagtgccagttatcttctaattactgtgtaaatggcagtcaagtaacagtctgtttttagtgtgagagaagatagtggtactggggaaggagacagtcaaacagacttgagatacaactaacattggtgactttttggaaggaggaatattggaggcaatatgtttttaaccagatattgctatagtctgggtgtgcggaatcaagggccaggactgtgatagttacagtgcgaatggaggagtagttgattctataaggcaattgtatctaagttgtaagaaatgatgaaaaggaaggagttccaggtttagccaagggtgtgagttctggcaagtgaggaatcctaggtttatgaaggaaatggaaatcataaaatcttccgtggtcatgatatcatggggatgctaatgcatctgaatggaattatcctatgatacttagaaaaagggaactagggaaaaaaaggtctgggctggtaatatggatttggatgtcatctgcatagagatgacaagatggcttaggtgagtaaaagagaacaaagagtactgggagtgtcaaaaaaaaaagcacaaatatccaaagcagtatttagagaaccaagggagggccgggtgtggtggctcatgcctgtaattccagcactttgggaggccaaggcaggaggatcacctgaggtcaggagtttgagaccagtctggcaaacatggtgtaacctgtctctactaaaaatacaaaaattagccaggcgtggtggtgggcacctgtaatcccagctatctgggaggctgaggctggagaatcgcttgaacctgggaggtcgaggttgcagtgagccgagattgcaccactgaactccagcctgggcgatagagcaaaactctgtttccaaaaataaataaataaataaataaataataatctaggaaaccaagggagaatggtgtcacaagaactccaggtagaatagttaacatcatcaaatactacatagtgatgtagtgtgacaaccatgaaaagaatattggatttgacaaatgatcactggagacctttcgagactgggtaagaaaaggcattcatgaccaaaccagatttcagaggctcgggagtgatggtggattgaaaacagatatataagagtaattaaaagggttaggaatgtctagaaaacaatttttttttcaaatgggaacttgtttttgttattgataataatatggaagatactactaatcagcagattttggatgcatcagaggcaaagcgtatgttgcctcctgtcaagtttctcatctacgtcagccatacatctctagtctcacctacatcagcccattgtccgcatcagtgctgagtaggtcagtcccctgcctaaagacctctctgggttccttgttgcaagaagaaatccaatattcttagcacagcagacaagttgctttgcattctggttctaaactctctgtcacatttcatcttctgccacttggggcacgggagatttcagattctttccaagttagatctttgtatatattgctctctctacctggaagagcctttctctcatctttcatatgtctaattctaacttgtctttcaacacttggctcaaatatcgcgttgtttttgaacgctttcctgcctccgtgggtccagtgcaagtctccctctttgttgcttcaaccataagttgtttcttcgtaactttgtttcagcatcctgcattgtaattcatctattttcatagctgtgttctccattagactatatgaactcttaacacagggacggtcttttttattgcaatctccatggcagatgcaaaacaaactcttgctaaaagcatcgggaatgaatgtgtatcaatgtaataatatatactgaggtatatacgatagaagtgaagaagcatattattagtgcaaaaaatgaacagtttcacctctgctccttcattttttagctgtgaccatatataatgaataaaatatgtgaagctatgcattctgagtgtattctgctacagtcattatgtgttagaacgtggttttggagttaagcagtctcagctttaaacatgacatctgactctaaaagctgaatgaatttgagcaagttaatttctctgaacctgagtttcctattggtcaaatgaggataatactgtatagtgtggttgtgaagataaaattgacaaaatatagactaaacaatttaataaccagcatttcgttgtcactaatgtcacaattatttccaactctcaccttcatgactgagatctcttgttagtttctgtctggtcttgtatttgtctcatttgcaactttaattcattttataaagagaaaaatgtttcatttcttaagtggaatgttgatgttaggaaatttaacatcagctgtgcttcacctatctaaatgataccatttgattcataatactcattcccagtattaagtgaatttacaaaaatctagaatgaaatatatgtgttgatttagtaagttgccaattaaatttgaattgtttgtgagtctccaaataatttcccagtgaaggccctaggttcacttgctaagctggatctgaggacattctttttgtcttatcttctgaaatctattgccctgagtgatttagatcagctttttaaattttttttagcagaatttttgtggttaataaaaacatgtgcttacagctttttgcataaaggattccacatccgatttagatcaagagatagatttttagaaaaaaaatgatggatatgtcctctgagagcagtggaatgcaacgatgttctgtctctctctgattgagttcatggcatttcagaacccttccacacccacacccacgcaaagacgcaaacagtggtcacaactgcagctcccgcagtctcatttccagagtgcatccattgttttccataacatgaaataaatccctctcttttgcccagtggtgaaaagcttatataaatactaaaacttcaactattcccctgagttttctgttggctaacctgcagccatgggttgtttggatattgacatgcattttctgtgtagatctttcaggccactttggtgagtccagtggtgataaattctgttgtcttgaaaatttatcaggctaactgttttaacactccatttatgaaaacttaagtaattgacaccctattcgaaaaggctgcaggttcaaagtatctcttttattctttcagcatatatcattttgatgatatttatctatatatattttaggaggccttggccaggagatgactggaacagtcattgaaaagaaagtaagaatgtaaagaattgattagagcccaaacatttaaccttgcattgttattcttatgaaagattttttaaaactatatttagaagtgaagtattttattgtataccaaataggggtagttaacattagtgggctgaaattaaaatgtataataaaaaatccttatccatcaaattggagagaaaatggaaggcatatacttaaaaacaaaaatcaatacttggtgtatagtgggcaatcagtaaatgaatgtgtggataggattgattagactcctagtgaaatgtaatactacctttataaaaaatatttattatatccttaagtaaaaacttatatgattgaacatcattgttcatatagtagccttattttggaacatacatttattccatttttttctttttatttctcgtttttcatttcttctcttacatagcaatcaatgaagtgtacttcagtattgaaattattctttttgtttgtttgtttgtttttttgagatggagttttgctcttgttgtccaggcctggagtgcgatggtgcgacctcactcactgcaacgtctgtctcctgggttcaagggattctcttgcctcagccttctaagtagctgggattacaggcacccgccaccatgcctggctaaatttttgtatttttagtagagacagggtttcaccattttggtcaggctggtctcgaactcctgacctcaggtgatccacccaccttggcctcccaaagtgctgagattacaggtgtgagccaccacgcccggctgaaactatttctatgctttttttttttttttaatggtgaaagaagtaaatttaatacattttcctctggagtctgcagatttgaagctaattctagctatgtacaggagaactgaagggaagtccatgaatactctactattgtttcactagccctttcatattagtaaaacattttagtctactttggctaatattttaaaaatgtctctttggttacctagattattaattaattaaaacaggtttgatattttaataatcaataattctgaaattcttcataccttagaaactaattgtgttgtggtgtccctatagatccaagattttatttctgtgttcactgtttttacagagaagaaatataaaacaataaatctcataaatgtgttagcttcccttccttgagacctattagagaaaataaagaaaatccatgtgcttttctgtctatgaagtccaattttaaattatagtagaaataaaacagacaaaggatttggatgaatttgagttttgttggttaaactgaaatatcactctttgcatgtcttgagttgtgctggttagtaaatcacagtgcaaaggttgtttgtaggccaatggttgtgaccattaatttttgtgtacttttcccaaagctttcttaaaacagctatattagtattttttttgttttgaagaataatatatcagtgcctatcctaacccgatttccactacctgagacctaaaagacatattgcccaatgacttcacgctcaaagtacaatgatattattattattaaattcataaattgctcagagagttcatagcaatagaaataggaagaattacatctctaaatgatggatttttaaacactagcacctgggtggctactcttatccaccacagggccactcaagtcatttcatacagacaaccttctctcaaatgaggtgtaaagaaagactaggaaacatagttttatgactattgcttgctttcaaagagggccacatgatagaagaggctgtgttacattccttcctgtgtaaaaaatttatccttgtttgtcttcttaggtttgaagaagaactgaccagcaagtggttatatctttttgaaggcagtggagtcccgtatggcccaatcaacaacatgaagaatgtatttgcagaacctcaggtttgtttttgaagtttaacaacgcctctgttttctgtccagattgacttatatcaaggtacctttgccattgatcgcaagcttaagtcacatgatgtgaattttcaccatcatattaaaattgtttgtgggtctgagataaaaagaaccagaacttagaagtgcctgtccataagcatacttatgtctctgttagatttaatatactgkatttcttcatcagccactacatgaagtttctgtggccagggtatttaattttcctgaaaaacagaaatatacacaattgagatattggggttgggtactcagagactattctttgtaggaagaaatatgagaactttcatacctctgatcatatgattatcttaaacctctgatcatatgattatacctctgatcatatgattatctctctgatcatatgattatcttaaaatgtacagagcaagtcatatttaattctgcagatgagaggactttgtttgctttgatgaatatgtgttatttgtaaggcataaattttacacagatagatatttgtgctctacgttgcttatcaggctcctttttgggctccaggaacagggtcacctgaaaatatatttactttataacattgttcaagtgattatttttagattatgtgaaaataatgttttgattttattacttcaatcaaaaaactacaagcaatttaccatttctcaaattcatccatcgatccccaaaagtacagggagtccattttaaagctttcactatgattattcaactgtcttgtcagtttccaaaattcaaaaccatggggtatattttcttgggttctttatatttatatcgtggcaggtttttcttagaaataaattactgagcatagaatacaccttttgagggaggagacctttgttggaaaacctttggtgccttttatcttacatgaatatctgcttaaaagaaaattgaaatattttaaatttaatggttactacatttactggagaaaaaaagtgaatgaattcaggaattctgcttgtgctattttttcggccaagattgtgaatatctcaaggctttgttcatgttaaaactttggtcaataatggtcaataagtatttgagataaaggggcccatttggtgtgtactatgtgaattcatctgaaagggaccccacaccatcagtggattaatgcctggtgattctttacaaggaggtagcattgtgcatactctgaatatagtagaccaggggactgtttttctcactttataactttgagtgaggccaagccatcatttgaagctgtcgtgtattgaggtgtacgtagaacttcatgtttacctcagtttgagggtacatttttctggagatatttcctaagagtttttccatcagcatttctattgctccatctgtgttttattagagatgaaggcaccaaagcaaagagttatttttaaataattatattatttaaaaatatattaagtatattctaacactacctattttttaggctttgataaacaaagatttataatcccacccactatcttaaaataattcactttattggctagctcaaagtgaatataggataattaggatttttataactaattttctcttgtggttcaatgtaattactttaatctttgcatctcaattcttctggaactacaaaaatttttgttattggtctatggcatattttcagtcattagccagtttccaaaatggagaaaatttatattacctaagtcaacgtacaagcttttcatactattacaaatgtctctacaaactgccctgtgtgtaaatttgtgtaaaacagattatttttgaaaaccctccagatgacatctaactgtgatgacttagttcattcatttattcaacaaacttatgatatatccagtgcttgtgacttagcagaaactcagtacacaatgtgtacctgctatttaagtccattttgaatttatttattagaaaggtaggggttaatgagttgtttaactctggaatgtgcaagttttccaaataatcaagttgctcctctgcagtcccccctcccctttttaaaatcctccccaccagaactatcatcctgtgtactcctgagtgaggctgacaagctctatcttcagggctggttgtaaaacccttggtgatctgagggaactcagtgtaacataatggttaagaccatggagtcaaaattggtgggcagtttattataaacttctagactttagtttccttaagtgtaaaatggtgaaatagcatctgagatactgtttatgaagggaacagcacaaggattgcaggatggtaaacagccaatgcctagtagtagctgtggttatgatggtgccctttaaggttatattcttgtttaacttcttttacttacctttgtgtagtggatagaggaaaatccagtgtagctttggggatggggatcattaagttaagcttgcactctactatccttttataaaaatatatctgcaaaatctatgccaagaagagaagttcccttcctcatttctgatgattgaaaatccttttatttttcattttccgtaaaagttttttctaagtatgatttccgtttaaggtatcctcccttgttttgcctctgatgagctgcagagtttcttggcgcttggtgcatggaaacggccacttctgttcagatgtgggaacgcaccactggcgcgtgtggcccactctccatgtgcgctgtgccagcacagctgctagttcaactggaaattgctttgggtgaagtacaaggcctggaacatggcgtaggaatggagactttgataaagtgaaaaggggtatgtctaacaacaacaacaaaagccaggattgggagactcagtaacggcagaaaaatttgagtgcctacttctcaagtagaccatttacagcatttcatttgtggtttgaacttggagacaacaaaaatttacttgatggtagaaactatttctagcctaacaatttcatcatagtctcatggattgaggtaacttgatttttcgattcaatcaaaacaacagatgatatttttttttcatggataaatgagagattgtctaccttttatcctctgattatatgtgacagacctttgcacagttaaagtgatcctgcaggcatacactgttaagtcaatcaagaatactgcaggctggttggagggggattggtctgcatttactgaaagttctgaggagtttttattcaaaacccttagagtgggagttttattgtctttctcaatgacaaattatctgtggaaagctctgtgcattatagatgtataatatagattatctgcatatagattttaatagccagtcatttttccaagtgctttcttaaaatatcttcttttaatcaagccaagattgtgcagtacattaaaggaattcttaaaaagtttcaaaaacttactagatgacctcagtatggtcctatttaacatacccttgggaacatgtgcatgaaatacattgtggtttgagggtttccaactgaaacacacttaaaagaaaatacagcttttaatagaaactattcaaattcctgcaaacataggtatatatctcaccactgagagggattaaaagcatcattgtctacgttgagaatgaaaagggaatgtgccattctgctttcaggctttgcttaagactttttacttggtgattccagcatatcaccatctttgattaaactgctcaattaaaaactatgagtgattgaagcctctgattagtgtttttctttgtcatggatgccatgacctgagggtagggaagagagggcacagggtgtcacaaacctggtgttatttaatagagtcttcacatttgtaccacacaagtcgaatatatcaggtgtaagacatcaccctgaagcatcacttctgagatctattgggaggaaaatatcagaactattgaaatatcacagctggccctgattttaactagtgccaaacacctgcaggctctaaaaggataccaaaacaaaaccccaccctgtggcagcaagccatcccttaacaaccctttcttaactttgcatcaccatcaaaattaatttaacattttctccagaaaccttattcttcctgtcccagaaggccattacaacccctttagcaaatcttttgtatgggatgaatatgtcatagaaacagagtgaagtcttgaaatatttgatggctgaaaattgtctgttttcatctcattatttgtataagcttttgaaattggagagtttattaatctctagactagctcatattatctgagtgattttgttttagcacattttggcaaaatatctgagcatcttattttttaaaaaaggccaatgttcatatagcaaacatcagaagcacccccaaaatacagttatttttcaagacctttctatcacacacacacacagacacgcacacacacaaacacatacacatacacatacacacaaacacacccacactcacttctgatgcattttaaagatcacctttcaaatgacattagttaatatttcttgaaatgcagtttcatagccctcagagggttatacaagtcaagcaaaattatattcttgtttctaatactgctgggaaatacatatatacagtggtctttgcaactggaaaactgttggtaaagatctgatgtaaaatagtaggtctggaaataattcctagcaggcaaggagataaaaacataaattttatgtgtgtctctgaatatacatgacacattcaactgatgtacaaatttagatacatcatattatttgtgtatttgttttatcatccctgggtgtaatattttaagtatttgaagaaataatgtatttttgatgtaggtgattaaataaaataaaaatggagagtttaagctcccagttttttattaatatataaagtatgaggcaatagtgtacagttttatcttgagttgagaaaattatcgtattgcaaaaaacttcctgtgttattatttaagaggaaatgttaaaatgtcgaataagaatcaaggacttagtataacattatgggcattttatgttctttttcttctatatacctacaaaatttggacacattttttatggacacaatgtctttaagctataacacacagggacataggagatcataatcatttcttcattcagtcatcccttccttcattcaatcatcccttccttcattcagtaaatcatcattgacatccactatgtgtatggtcttgtgtttggtatttggcaaggaatggtacgatggtagaaaatgaatcaagaggacaaagctgtcaaaatttcaaggactttgcagtttaggttaaggtagaaagtgttcagtgtcacagaagggttacccataaatgctctgagcatttctaatagcaagaaataacaggcataaaacttggggttttcttgtttaatgatgtaacaaaagtttaaaatctgacaaaaaaaatttaaaatgtcttaagcatatttgccccagaactctttatcctttcaaatgcctgttgtaattagtttattctattattaataaatttcttcttaatgactaagaagaagataatggagggtttcagcttttactatttagtaattttgaaattatttgtgaccttgatacataaaatatattttgatgtcttataacattattctttctctgtttctcgctctttctctagcatgtgctatagtttattcatcaagctccacatatgtactttatgttttctgaacacttctataatatttcagagtggaaatatatagtacaatcattgacttttactaaactttgaacttgcaagccaaagacataattgttttaatgtgtaaaaaattaaaatcaagaaaactgaattatactatttgggggcattttgcaacccagaataaagagtaattagtaccagctaatttttgaaagcagtttagcacagtgctttacaataaaaatctaatgcaagccatatttatgatttaaattgtgtaatgggcaaattttaaaaataaaatagcaaaattaattcaatattaaattaatagcaaaatgtataattttaattatatattttatttaacttaaaatattcaaaatataaatgcaattaaaattaaaggagaacattaatgaaacattttaaatgttgtgctaagtctttgaaatccattgtgcattttatgcttatagcacttgttgcagactagtctcatttcatgtactcagtagccatatgtggctattggctgcaatgttggcgggatcaagctagccaattataaaaatatgtgggagtttgttcttcactttattctccagctttcctcactttttagttattttaattttcatttgttagcctccaactaaatttaacatataattttagacttaatatcatcatagtatttgctttgaaggcataagaatttcgtattttaaaagtcctatatggagtacgtaattagcatgcattctactacccgtttctttttggcaacctcctaaatttgtattggaaggaaaagcttttactcaaacaaatgatttctatagtaacaaaatgaaaacaggtaataagttagcaactatcttttctcatacaaataatgtcagattttagggctttcaggcttggtttttttgagggagttgaaaagaaaaatccgaggcctagatacagaaaactatcaatattaaccttgattgagagacataaaaggtttgaatatatgtagagacgtagtcattcatggctgcaaacactgaatattgttaaggtatcaattattcccagattacttatcgctttaatataattgcaatcaaagtcctgttagaatatttttctgaaattttttagcaagtggtttttcaagtctaccataaaaaacatgtggacgagaatagcaaatattttgtatgtttaaatataagtaatgagaaggaagcaagcattatcatacataattaaatatattccaaaaccacaataatggggctagcaaaaaataaagagatagatcaatgaaacataaagaaaaactttaaaacatgcatagagatttggcatgtgataaaaatagcatgacaaataagaggagaaagggagacattttctgtttgaaataacggaaattaactgttacttttctcttaagattatatctatgctttatgcccagataatagaggtttcagagtttactgtagactatttttaattaaaagaaagtattcatgaaaatcagttagattttaagaaaaggaaaggttttctaagcatcaatgcaatagcagatgtcagaaagaaaagaaatcgataaatttggttagtaaaagtgaaaacctgtaaagtacatatcggtrtgataaaaatacaaagtttagttacagagcaatattaagttattgcaatgaatatgaccgaatgctgttgtaacataaatatcttaagagctcttagaaacaatagaaaacactaaaatttccaagagaataatgggcagaagacataagatgccactttgtacaaactcagaaaatccaaagaatcaataaacataaaatgaaggtcagctttgctaaccgtaaatggaaagatacgttcgtcaaagagtacaaactttcaaatataaaacttttcatttataaaggtacttataacatgagtaagttctggagacttaaagtacagtatagtgactatagttaaggaaaatgtattttctacttcaaatttgttgggagaatagaccttcttcttttttaaaaaacaaacaaacaaacaaacaaacaaggttttgctctgtttcccaggctgtactgcctggataattttgtttattttttgtagaaatgagatctcactatgttgcccaggctggtctcagcctctggcctctgcctgtgctcctgcctcagccttccaaagtgctgggattatgtacctggccaagaatagatttttttttttctttgagcagtgccttggtctgttgtcctggctggagtgcactgacacaatcttggctcactgcaacctctgcctctcaggctcaagcaactctcatgcctcagccttcccagtagctaggattagaagggcgtgccaccacacccgctaatttttgtgtttttagcagagacagggtttcaccatgttggccaggctggtctcgaactcctggcctcaaatgatccgcacaccttagcctcccagagtgctggggtaacaggtgtgagccaccgtgcccggcctagatccagttgtctcggtaccattgttgaaaagacttttattttctagtgaattttcatgtcaattaatcttgctcaaaatcaattcaccattaatataaagagattatttataaattcttgatgatttaggaatgtcttatttagtatccactgttatgtatttcccaaactttctaatgttaatttctgatatcactcattgtgtttgaaaacatactttgtgtgatttcagctcttttatattcattgagtcttgttatgtcctagcatataatccattttgtagaatatttcatgtatttttggaagaatttgtattctgttggaatattttgtagatgtctatttggtccctttgtctgtcttaccagtatgaaggtatctctaattctagtaacatttttgttttaatatctattttctgatattagtgtagccactctattctctttcatggtggttgattatattatacatccttttatttccaacctgtttgtaactttgattctaaagtatgtctcatgtagatggtagataggtggatcctgttttttttctttaattcaatctgaaaatatctaccttttgattaggttattcaagccattcgtaatgttttgattgataggttgcatttacatctgccattttgctttatgttttctatgtgtcttatgtcttttttacccctctgctgccactttattgccttcttttgtactaagctggtattttctagcatacaattttaattcccttaagaatttttaaagtaatatctttgagttttcttattgttttatctaagccttgtaatatgcatctcaatttaccgaaattgacttcagttttgtactgatttaattacaacaaaacaatgttttctgctacacacttcctttttgtatgtgtgtgcatatatacatatgaaacacatctatgtatattaaaaactcaacaatatactcttatagtattagatttatttaatattatgtcatataatgttaaatcttttatggaagctggtgaaagaaataagagcaagtctatattgataatatttgttatagtaatctttttgttaaccctatcttattcttagtttcttgctattgatttgagttattaaatggtatctttttcttatttccatatagctttttgctcttactcacaatgattgtgtaattattgtcaaatatgttacatttatatatgttaaaggcctaacaatacatttatatacatattgtttattgaaattkctttttaaatcaatcaagagaagaaatattcaactgtattgttttgtgaaattgcatacatgattacttttactggtgctctcttttttatgtgtgcatggattcagtgtgttgatgatattagttactttcaccctaaaagattttctttggtgttcattttaatgtaagtctattagcaatgtgaatttttttccacgtttttttgatctgagattgcctttagtttgccatcttttttgaaaaatattttgctgggtatgattcttgttagacagtttcttcctctgaacactttgaatatgtcattccactgccttctgacttccattgtgtttgataataagtaatgtggtaatcttactagattcccttgagtgtaatgtatcatttttattttgctcctctgttcaaggacgaaagatttcctctgtctttgaacatttttggtatgatatgtctggatgtttgtggttctattaacagttaatctactttgagttcattcagcttcttggacgtattgtttatacaattgatgtgtttgagttcattgaggttcttggatgtttttcataaaatctgaatagttttcagccatttttttctttgatttttaaaaattcttctttcttctagtacttccattatacttatgttcttctattttattatgtttcatatttctctaaggctctgtttatttttctccaatcttttttgtctgtgttctgcatattgcttatctctattaatctatcttataagtttgctgattcttcctactgccagttcaaatttatggttgaacccctcaagtaaatttttcatttcagttattgtacttttggactccagaacttatatttggttcgttttaataacttgaataatttctacctccttattgatattatctcctttaggagacagtgtcaacataccttcctttacttctttaggcatggttttcttttgttctttgagcatatttataacagctgatttgaagtttttttttctcctaagtctaccatcaggatctcttcaaaggaagtttctgttgccagctttcttctttctgtatgttggtcacactttactgtgctttgtgtgtctcataattttttgttgttaactgaacactttagatctcccctccccgacctttaaggttgttttgtttgttgctcactagttcaaatgacgttaactttgcccaaccagttctgcgaaatgttcctcgccacccaccttttctacagtgcatagcttttgaggtcccagctctgagtctttccaattgtttttatctgccaccttggggtaggagattttaatcttgacctctaggggtcactcttcatatgttataagctactaattgatcaaaggttgttcttagccagttatattttttatcctttaccgttggatgtgtgtgcttgacttagagactgctatcacagttaaggtagtttactcacccccctacccctgctacccatccacattcagccggggtctggtaatgtgaagattccctctgccattgcttctgagaggacccagcctttagatatggacatagttgcccagacttccatggatgagtgtgattttgaagcctagctttctaggcattgcccttgggtcagagcagcttactgttcactcagtgtttggttagagtttaagtacctcgtgccagtgaggctactgcgttttgggtgggtcaggatgcaacctgatgaatactttcaggtctggccccaaattgtgctttgattaccccttcttggtaaagccgaacatatgtgtacatcctttcttgcatacagagttgcctgtgatctcagaagggctcatcttgattgtctcttttcttgattctattaaacttgcttgtctgctgttttgctagtatcatgaagctaacatctttctcttaattgctccccagaaaaacctgtattgttttcaacaatgcccttagacttagagctctccactctctcttccacgtaaggatagcctcctcaggcagagctggagaactcttcatccttatgacctacctttctgccaggccaaaaccttgttgccactgtaccagacttctggggtaagttccacttttcctgagtaacattcctgctctaagagtgagaactagaagtggtggtggtgagtgcccttagtctttttggcttggtccttctgcagtggatcgttttacctacaattaagctgtaacaggggcaacaagaaccccggtgccttggcctgccgtgcctaaggtagagcttccaccctatgtgtggggatgggatgggggaaggcagaccatgtcatttttgctatgtctgcctagaatatagcttctgcagcacaggctatgagaagtgaaaaacacagcagcctgctcctcatggggtaaagccatagtcctagagtagaaggtaggtggagaggaagccctccttatcttggctgcacctgcctggagtagactgcctcggttaaagcttttgtaatgcagaggtgtagagcttggtagtgatggtggaggttaatggaataagccatggctcaaatgccatggaccctcaccattcttactaagatttagttgattctcttgaatgaatgttttttcatttgccatatgacctacagtaatttccagagaatttcagtttaaaaaaaaaattttcaccagaaaaattgctgttttgctaagaagagggtatatttcaaaagtcctgtcctgcacactttaccctgcctctttccaagataacccaaatgtatctttaccctatcagaataaatgtgctaaatttattttactctgagcttggtgcttattctctttccagttatttcctacaccctcaagaatgtctgactgtgccctgctgtggtgttcagcctccttgccctgaccttgctagctgtgatctcctatctcgcttttttttttgaaagaaaagtgtggacgttttacagtagtgtgtttggagtaatctcccaaagaacacatgggccagaatcatcctggagctttgttaaaatttatgtttctggactaacaaagtccgttgatttctagtatctttcatagggcttaggaattggcataagtagattgccagaaattattctggtataaactatgtgattcataagcaactttatacagtcatattctcaagtttttctctcatgatctccctggttatttccagtttttagggataccttttttttggtcctttggccaaaatactatgactttcattaccctaatctactgtgcacttccgcagccacactgtctttggggctatgtggcaggagatcacaaagggaaaaagaccaatggtatttggctgtaccctttggaaactgtcatttctttaaacctagaggaatgtttcctttcttagggttttgtcttttgttcactcccattccctcttttgtcactgctgctgttaccattgtcagcagaggattgcctgaagtccagcgggtaggcaaatgaacaaaataatttttttttaattgagggttttttttacattctctctgagtgttttgcattccctttcctataagccagaactaaaaggcttctcctgggctttttctttccgtctgcttttcagggctcacttctttgtttgttgtgtgttgagttcagaccaggggatacaggagtaaaaaagttaatcatgttaccacttgtttgctggtatttgaattctgttcttcttcctcagtccatctgctgctatttacttttgaatcctcaaatagctgctccttgtattctgtccaggatttagagctgtgttcagtgggagagatggtgtagagttattgctccattgtaccygcaacctgaatgttccaactttaaagcaacattttcttactatttttgaaaaaagttttttgatcatttgcttgaagaraatcctgacatagttgttaagttgaagtgctctaaaagtttagatattttgtaagtacttattcatgggaatttgaattttcatagtatatataattcaagctatggaaatatattgtataaaataataaataaccagaattataaaacattatttattatattgattataaggtaagcgaatgttatagttttggaaatgtatatagatatatttaataatactgtattgctttttaattacatatataattctgtttttttattaaaataaaatgattttgttgaaaagacagagaaaatctgatatagaggaatgaatggttagcttgttcttaaactactttccttaaatatcatttttctatataaggcatttgatagttatctagcacttattccgtgttctctggtaaacacagtgttttggagtgtgagggaaaccagaattttcagaaagagagataaagtatcagagtctgcattggtcggggtgagggaggaaaaagaaatcttgttttttggtatctgagcagtactaaataatctgtcccatactttacctcaaatataatataatcctggaacgtcttgtggttctattaagtaaggaagttttcacaaaatgataggaacatgacagaagtacaaagaggcaacgttaagcgttttcaacagccactttgggaccatttttgttacaaaattatattaatggattatacttttcggaataaaataagtattcatgaggtcgtacaaaaataagtaaatggttgaataaataaataaataaatgtgaaatgtagaatttcaattaataaacttagaaggcagaagagaaatagaaggttacccttaggtaaacaccacagtaataattgttgtgggaaaaaggaccattggtggatgcctcagagtcacctgggaaacttttccaatatacagattccagagctccaggaagagaaaacacaggtttaggatggagttagggatatctgaagttttaaaagattctgcaaggatttcattctagaactacagaatattttagatagagtgctgttgctgtgtacatagttttcacagttagacatagtatttttccatcatcgtcattacagaggaaaaagtaataaccttactgtggaagaatcttatagacatcagcttaaccaagtcatcatacatcccgagagcgaacttccatatcatgtaccccttggtatcatgtataatctcaatttcctgcccgaaatgcatggcttcaatctaattgtgggaaaacatctggccaacttaaacttagggaccattgtccctaagctgaccagtattcttcagaagcatcaaggttatggaagacaaagcctgaagaacagtttcagactggagaaggctgaacgacatgacacttgtatgctgtgtgggatcctagattgcctcctaacccagagaagagaacattactgggtcacttgacaaaattcaaactaagtctgcaggttagttaatagccctgtatccattttaattttttggttttgataattttaccatgattaggtaagatgttaatagtagaagttgagatgggagtatgtgaaaacttcactttacaacttttttgcaagtctgaatttattttaaataaaaagcaaaaataacacaaaacaaatttcatttcaaatatctcacattacataaatgcaaagacaaagagccttgaatttttaaaaaatgttaaagcgtataatggcaaagggggagccctatatatgccatggttttcatttttgtctcatttcacacttattgattacaataatcctccttttcttgttccaaaaacatgaaagaatgagtagtataaagcctgaaatattattaatatttcttcatcatacttgagattttatttttgatgcctgaggaccactaagacagctacacactcaatcaaatgttcaaatcaaatctattctccacacaattgtagttgatcccttgtcaagaatttaaatgaaagataatttaaattcatttttctttacaaaacagatttttgctaatttacaaaatgtaattaaatgttaccagaatgcagttactcctggaagtacttctctacagattctcagttttgcaaaatagacatgtctcatttaacttttttgaaaaatggtgtatcaccaaaattggtttcagatgctgtccaattcctagtggtacactgaagtgtcaatacttgttctaagaccttctatatcatgaggtggaggttctcaaatacattgtgcctcagtgtcacctgggaaactttcccaatatacatatcccagagctccagcaagaagaaacacaagtttaagatggagttatggatatctgaatttttaaaagattctgcaaggattccattctagaaccacagaatactttagatagagtgctgtggctgtgtacatgttttacacagttagacagacctggctttttctttgggctctgtcgtttactcagtgggtgactttgggcattactcaacttctatatgcctcagttttctttaaatatttatttattttaatgatttatatttcatttatttcatatacgagtgagatagtacatgcataaagaactttaaaatgatggaaattttttttttaagatggtaagatgtttgctggaaaatgtggaaaatgtggtgaaggggtaggtactttaggcagaagtagtaactggcatagaaatggtaagtgtgaaactgctggggaaatatgagaaactcaggttgtatgcatggccagaggatagagtgcagatgagagatagtgagatgagaatggggaatctaagagtcagttttggaatgcctgtatgccatgttggggagtttgatctatattcaaattgtagcaccatatactatgatgccagctactggaagtggagcagatagactcataccagcaggagaggattctgctgatcctgagtatcaatatccttctgggcaatggagcccagcatgatccgggatgtagatacgcctgtatacatctacagttgacaaatgtaggggagatcagtcccatggtggagctttagtttagaagatagcagtcttcaggtccaagccacatttaacacaacctaccaaaaatcatacatcgtgtgattttttgggatcttgcccaccataactgttcaacctttgtcttataccctgttagtcagaactctgggcctcagcttctggtaaactcaaattctgataataatcaagctatggatgaccaatgaatgagcmctgtaaaagctatactgtgcttcaggttaccagaaatcagctacttyagtatatggatatgtgtgggcatcttggggagctatattgaactacaactgggctaagctaacctgctctgagctctgtttttggccatttaggatcataaaacttgttttaaagaggcgttctgtgataagattcagttcctatttcctgagagctccatttcacttattctcaaattgtcactaaagtagggggaagccaggacctacctaacctcagggatactcttgtacaggagcaaacacagtaaggcaagatgctcttttatactctaccatcctcttacacaggcactcaatgacatcatggctttgaaaaagtgaccttcgtcctgaagatatttatgagctataattaggacttatttaaattaggggattctcctagagataatgcttactgtgtgatctttaagctcagggaagtatttttttttttttttttttttttggagacagagtcttggtctgtcacctgggctggagtgcggtggcgcgatctcggctcactgcaaactctgtctcctgggtttaggccattctcctgcctcagcctcctgagtagctgggactacagtcacctgccaccatgcccggctaatttttttgtatttttagtgtagacaggatttcactgtgttagccaggatggtctcgatctcctgacctcgtgatccgcccgcctcggcctcccaaagtgctgggattacaggtgtgagtcaccgtgcccggcatcagggaagtatttttatgcaaactttagtacaagtacaattaaatatggactgttttttttttcagtgactcagaaacttatgcatagaaaagaagatgccttaaattgacgttgatgtttcctttaggctgggcttcacagtcctgatgtagagtcaccacagctcagtttgttttctgagacctgaagattcagacttcatttattatcaaatatttcatgagtgccagctgtgcaaggcattatgctaagcaccaggggaaaagaatcacaatttaacttactattttacagaaaaatatgagatttattaacaaacaaaaatgccaagctaaggccaggcgtgggggctcatgcctgtaatcccagcactttgagaggccgaggaggctggatcatctgaggtcaggagttcaagaccaacctgaccaacatggtgaaactccatgtctattaaaaagacaaaaaattagccrtgtgtggtggcacatgactgtagtcttagctactttggaggctgaggcaggagaatagcatgaacccgggaggcggaggttgcagtgagccgagatcgtgccattgcactgcggcctgggcaacaagagcgaaactccgtctcaaaaaaaaaaaaaaaaaaaaaaaaaaggcaagctatgtatttgcgatgagagatttgcttcaaagccagcaacacatgacgtctctttaccacggcatacttttcaggtattaaggaactcatggagagccaaattaataatcaggatattgatgataaagatgagatttaaagaccatggaagttatttttaaaaacatgtttttatttttaaatgtgaaataatttgattcacagaatatcctgaaagtggttagagaggtctcgtggacttctcacttgatttccctcaataattacatcttatataattatagtataacagcaaaacaaggaatctggcatagttacaatgtgtgtgtatatagagttgtatgtcattttaatacatgtgtagatttctgtaaccatgaccacaatcaaaacacggagctgttccatcagggcaaagatctccttcatgctaccccttgagagccacacccacacccaccctcattcctgatccacggccatcattaatttgtcttccagctttataattgtatcaattcaaggatgttatatgaatggaatcatacactatgtgacctttttacaaaaacagctttattggggtattcacatactgtaaaattacctttttattaaagtagataatccacggattttagcacattcacagaattgtgtaaccatcaccaccatctaatttcaggacattttcataactgctaaaagaaacaccattggcagtcgcacccttcttccctccccttatcgctggtaacctaatctactttctgtttttatgaatttgcctattctgaacattttatgtaaacagaattattgaaaatgtgtacttttatgagtgtcttctttgacttagaacaatgttttcagtgttcttccatgttgtagcatgtatcagtacttcattcctttatatggctgaataatattctgttgtgtgggtataccacattttactcagccatttatctgttataggcatttgtattgtatccaaatttgggctactatgaatagtatgtctatgtaaattcatgtagtcttttgtatgagcatatggttttccaatgttctgagtatgtacctaagagtggaattactggggcatatgataactctatgttgaacattttaaaccatggccaaaatattttccaacgtggctgcgccattttccaaatccaccagcaatgtgtgaggctttgaatttcttcataactttgccaacacttctttatttttttccatccctctcttccttcttccctttcttctttcttcttttcatttctttttaatatagccatactggtgtatatgaagttgtatctcactgtagtttttatttgcattacactaatgacaatgatgttgaaaatcttttaaggtattattgacgcgttgtctgctttgaaaaaaagtctattcaaatcttttgtccttttaaaaatttggttatttgtctattattattgagttataagagttcttgagagcatctggaaaaatgtcttgcaaatattatcttccattctgtaagttttcttttcattttcttgattgtattctttgacacacaaaagtttttagttttgatgaagcactaattacccatttttaaaaacattattacttgtgcttttggtatcatatccaagaaactattgcctaatctgaggacatgaagatttaggaatatgttttattctaataatttaatggttttaccatttacagtcaagtctctagtccattttgagtcttttttttgtatagggtatgaggtaggagtctaatttcattcttttgcacgtgagtaaccagttggcacagcaccagttattacaaagactgctctttccccattaaattgttctggcacccttgttgaaaaccaattcactataaatgtgagggtttattttgtttcattaatttatatatctatccttttgcccataccactctgtcttgattactgtagctctgttgttaagttttgaaatgaagaagtgtctgtacctcatttttcttctttttcaagattgttttgtttttttctaggccccttccatttccacatgaatttttggaaaaccttggcaatttcttgtaagaatccagctgggattttgttaggaattgcattgaatatgcaattttcgttcatactgatgtcttgtcaatattaattaagtcttctgatcgatgaaggtgatatgtttttccatttatttatgtcttctttaattgcttccaaaaatgttttgcaatttttagtaagtaagtctttcacttctttagttaaatttatacctgagtaattttttctttttgatactattgtaaatgaaatttatttcttaatttcatttttgaattttttattttaattgctgttacatagaaattaaattaattttgtaggttaatcttgtatctttctatcatgctaaactcacttattagttccagtagcatttttttttttttcgatgtgaattccttaggattttttaaatgtaagctcatgttatcttcctatccaatctggatgactttctttycttgtctttttcttttcttttcttatctttttctttcttgatctccctggataggacctccagtagaatgttaaatagcattggtgagagcaaatatccttgtcttgtttctgatttaagaaacaaagcgttcaatctttcaccattaagaataaagtttactgtgttcttttcatgggtaccttttatcagggttagaaggttcctctgtattttgagttgttgagtgtttttatcataaaagggtgttggtttcctttagctgtctgaacatatttataatgactgttttgaagattttatctgttaagtgtgatatttgggcctagtattgatgttcttattgaaatttagcagattttacctctctaagcatgtctttctttgctgtatgctctgaggatgatttatagaagtgttacatgttgtttttaataatgattttcaccacttatggttgatttgctgtagagtagttggtccatgaaggtcctcatgctgtcattctggaagttgccaccccttctacccatcccggtakatcttaaatctatattgctgtatgaaagaagccagccacaaaaggatgcatattatataattccaattatacaccattatctgaaaggaaaaactatggagtcagaaaacagaatagtggttgctgatgcttgagaatggaggtaggcggtgattacagaagggtagcacaagagaatttggcgggagattgaactcttctatatggtactgtggtggtggacacagaactttatgcacttatcaaaattcactcaagcctacagtataaatagtatatatatgaagaaaaaatcaaccgggataccaagagaacccaagatggaatccagaatgtgacaaatgaatgaccacactgaaatgggtagggaagaaagagctgattgcagtagccttgaaaccagttattttgaccagagcctgtaaggccaagcacaatgattattacatccaaacaatgtcttccaattggtaaatttgtttttcaaatgggtatgggctaacagttatgagactattttatctgtatactaggtttgaacacataagcaaatatattttagataatgaaagccagattacttatgttgtagaaagatgtcattaataaaccaagtgggaataatagaatgaaccaatgtcaactcagatgttgtttttaaaatgcaaacagatacttagatgcagaaataaatatagatatgttatgcatgcattaattagtattcatatatatgatgttctagaagcagttgtatcccagatgtcaggaacttatgtagctcccagatcttgttttccaaatattcttttcctatttaaaagtatcagagcttcttagagtagtggttgattccagggtgggtacaggaaaccatctaaaatatgtctgaaagtctagtggtgccagaaaagtcaaaaatatataggagctaaccaaaaagaactcccaatggccaaagttagatcaaatttcacaaaagataatccaaatgacaataaatagaccagaattatttgagttacaactcaaaagaataaaataaatattcatgatataataaatgcttaaataaataaattagggaataagggaatataataagttttctttataaaagttttccagttaacaaatgcaccttaactctgtgtgcttggtaacttctccagaaataagacaccaatatcatgtattcctggatataatttgcaacaaagggcacaccacttttgcgatagtatctccaaaagtccataacctcaatctaatcgtgagaaaacatcggacaaacaaattgaagtgcattccataaaatatctgttcacaaatgccatctccatgaatgacaaggaaagactgagtaactgtcctagaatgaactaaattccaaatgtgatcctgagttagatcctggtacaggataaggacattagtaaaacagggtggaatctgaataaagtctttagtttagttaatagcattttgccaatatgagtttcttagttttggcaattgtaccatggttatgtgagatgcttgcattagaggaagctagctagagtacataggaaccctttgtagtatgttttcaactcttctgtgtgtctgcaattatttctaaataaataattttaataaataaaatattcagtgaaacaacactgcataagagatggcacagaatgctgtatgttcagtagacacagaaaattcttggcgccaagaagagaaaggattgagaaaattttgacattatatgtctgaattaaatctctgaaataaattgccaggagaatagaaagtataataaacattttaatgggccaatgtataaaagataagacaagctgttgatatattttattagctcacaattacaaacaaagaaatcttatattaagttaataattaataaaaattacttttccttccagtaggagaaacctatattgcaaagacagattcagtgtgaaactctaatggagaattaggataattcagatagataataaaatagataatttagaaaggtgtccaacagactcaaatttgttgaagcactcatttcaactgctcatttattccagatactgagtaaatgatagagttaccaatagcaagtggttctgttatatcatattatgctttggaatttggactattttaaaaagaaggtggatagcttctaaattcaaagtttgaaagactatggaaatagacaatgggaaactggctttacttattacagacagaaagaaaaatccgacttaagagttgaccatcaattcatacttaggacatactaataccaagtttcttagacaaacggaataaaaacaaaacactaaaaggacacatggtatccttacaatactagaattttgatagttttcaacaaatagcattgaatattattagaaaagctaaagatgggacaggttaaataaattctggtgtctattaaactttggaggggtttttgtggttttctaagagttttggtcagaaaatctggcttttagtactgtaatctagagtaagtctgcccgtgaagcttagcttcatggtttatgaagtggtgcaaatatctatctcccaaggttatcttaacatcaagagaaataatggatatgaaagaactctgttaatgtattagtcattatattttaagcgaaacttctaccttcagaggagcccacagaatgctacaacacaggttgtagcactctgtacaattagcactctttcaaggcatttgctacaataggaggaagaaaagtacaatttcttggccttgacaaaccacattcgaggtgagagatttgccactctgtcttctcacttctgttatacttctggttcatggacacaagtgacccaggtaaaatgacttgaataagcatttcaattaaaaaaataataaattggcagcacatccatgtgcctctgtagagtgtctgaaggacgtgtttattgctgcaatttaggtggcagaacaaagaatggagatatttaaaggggacacattttcttgtatttatccttcagattgtcaggtatactttctaatattgtttctaaaataatatttcaactcaaaactagtaaataattttattgcaaatgtggttaaaggatttaaaatacctgtaattctcatacactggggaatacaggtgaaaacactagattataggaaatatgataaaaggaaaactagatattgtcagtgatatggtttggatctgtgtccccagctaaacctcatgttcagtttgaatccccggtgttgtaaatggggcctggtgggaggtgattggctcatgggggcggattcacattaatggtttagtgccatccccgtgtgatgctgttctcatgatagtgagtgagttctcacaagatgtgttttttgttttatttttttaaatgtgtagtacagtgctttccctgcctatctttcttgctcctgctccagtcatgtgaagtgctggctctgccttcacctttccacatgattataattttccctttctaatggaaaattgggctacacaatggaggcagggcgttctcttggaagtctcttagtacttccgtgttaaatagtagtaaggattcagacacttcaagaaagaaggcataggttactgaccagtgaagtcttggctgatgttaggagaaacagggaatagtgaaagaaggaagttataaacagtagtgacagcctcatgaacggttgcataaataaagactgtagcagctatgcctattttattcttttatatctcttcgtttttttctcattttattttttttagagattaacttttcatgtagtactaggtaagaaaattcaaatgagacagtgtctgaaattggggaataatgtagtatagggatgaatactatgattgctgggattttgtgtctactcactttgaagagatagtgtcttcatttgcgctaataatagttgcatctttgttaagtggaaacatagattggtggtgctggtattatatgaaagaatatatttagatgtgagttcaccaaagctataccaactactaagttgtttctcggctggatatttactcttctatattctgttttgtgatgttggacctgggattctataaaccacatttctgctttgcaacctgacttcatgtttgaattttacagagaagagacattagagggaattggcaaggtaggaagaggatgaaaagacttccccttttctgtttttctgctttctgttcatggacttcattttgtctatggttccaatagtcatcaccctagtaacacttgttcaccttggcagcagcagttctttcatgtaccagcaactaattcaaacttgtagtttctctaacacttgcaaattaatttcaaaatgtactgtctcagagaaaccaactctaactgggcaacccgtcctccttagagaggtctgagttttagcttcaaaagccctttctctaagtttctaagttattaattctaatgttttccattgtttatccccagccataggggtgataactacttacactagttgctaccattgtaatatcttagagttctctttttatccttacagttacctggttaacaacttaatttttttactaaattattctatcatactatccctgaaaagagaaacgatgtgttttctgtctcctcacttgacccatcctgatattgaatgtgcaagaaagaaatgttaatttggagaaaaaattttgtaggaaatatgtaatgtataataaaggaaaacatctcataaatattttagattttccatccaggcagtagctagactgagttcttctttttcctcttagttttaactgttgagtagacctgtttgcagttgctatacgaataacccacaaattgcagatataatacaaaatgtttgtcccatgtgcatattgacaagtcattttctgcctcttgttgagggtttcacgctgctattataggtgaggctcttaagaaatttcaactgacaaatattttgctaactttccaaaaaattttagaattcagtctgttacaaaaaatacattttatgcataaaagctttataatatgtaattaatgtttgccaaattattgaatgaagctgacaaaatatgggaagtgaatatcccttttgattcatatattattaacaggtaattttacgatagtgtcaatggaattaagaaagacatgaagaaagtccttatagcaaagactgagatatttagggaaaagtggtaagtccctttcaaccaagaatattggtggatattattcttttttatatgatattattggatattagtggatattattatttcttatatcaaaatcccccaaatgaattttatctaacatgcaggcatttatgatatctaaagatttatgaagccagactatcagcagatacaatgaaattatgtataattcaaataattagaaagtcttatggcttgacatttaatatctatcttaagaattttaatatgtaaatgtacctgttttctccatggaaaagactatgatgtcaaaggcaagaggatatcttagtatttttataacctgatgagtgtctgattttattagttttctatgattgctagaaaaaacttccacatagtggcttaaactaacacaaatttattctagttctggatatctgaagtctaaaataggtctcaccgggctaaaatcatgatgttgacaatgttaaggtcccattgaaggttctaggggaggatctacttctttgccttttccaccttctaaaaactgcccacattccttggcttatggcctagttgaaaaagagctctgagaatcctagtaaaggagaaaatcattatcaagataaatcccatgcatgcatggattgtttgctggactttttgttctgtttactaaccagtctatatatttctggagtaatttcttgctagtttttaactactgtggctacatagtacagtagtaggccaaattttctctcaatttttttcttttaaaacaaatgttcttgctgatttcatggatctattatatatagattttagaatcacatgagaggatttcatctaattcatagattaatttgggggcaaatttatagtttcataatattgaatctttctatagtagcatggtatttctctaggatttaagccttcttacgtttatggtaaggttggcagttaaaaaaaatgttttgcacatttactttacccttgtccttagttagtttattagtattatttgttttccgaatgagatctttaagagttttattttctaatttgtgattgctagctactgattttatatgttgatattgtttccaactggcttagtaaactcatatttattttaataatttcccaaatgttttgctggacatcagattgttggcaaagaatgcctgttttttaaatatgccatatatctgatgtctttttgctaggacatcttgtgtttgctaggacctacttttagtcctaagtgatttcttatgatcttccaaatcattaattgaatctttattctcatccatcttgctagtttgctcgtgtatttatttttaaaaacatttgaccacaatgcttttaatttccagaaatgttaattatttgtctccctccaattctttctgttcttcctcctcttcttctttgcttttttctgaacattgtttttaagggaatgctgtatttcttcagctttattgattataattataagaattctgttaaaatttctttctgtttctttcagaaattttaagggattagttcagatttctatgggattagttctatttgtaggatattgtcacattattggcttccgtagttttttaatagttacatttgaaggattcaattgagaagctttggtagttggagggctgtttcataaatgcaaagaggaattcctattctttcagcaatgatttgtggctgtgtcccaggaaggatgaccaaggtggtggtgtggtagagagtggaggggcatgtgtacttcacccctacactgtgagcctctggggcagaagcctttttccttcattaatatgtttatctttggcttctggaatagcactagctcaatatttaattcaaatgcttctatacaggttaagcaaagacctttgttaaactgttaaacattcattattttgtcctaacagttgtaaattcaatataacagaataatgaaattagaggcactgatctataattaaatcctggagagtaagcaagctttaatttattctctgctttaatgcctattctcacgttggcattttgcatcaatcactgtttgtccaaagatttggagagggatgaagaagagttactggaatgaacattcgtgacatgtttttaagatagtgaatatagaactgtgattggagtgtagggttcacataaggaaagagccggagataaagttgtagccaagctgtgaagatgtttatatttatgtcttaggagtttggaccctgtcagtaatgaagtattgatgggttttgtgcaagaaaacattgtgaggaaagtgtctgtatttgacagtggtgtcatgagaagtataaaggaaaaggattaagagattgttcagtaatctaggatgagagggtgagggcctgagatagtgtgaaggaagttggaatggaaagaaagtgacatttagaagaatctgaacataataactttacgatccggtgatttcttggatgagagagagagaaaatatgaatacttaacaagcataagggttttaagcctgggttactgaaaaagaagtgatagagttatagaactaaataaagggatcaaaaagaagtgcttgatactgattttctggtttagctgtcatttaaatacttagacacaatcatgttttatattttgaactcttttatgctttctgtgcactgacatcaagratatccattaattacataagggagcagaggtgcagaagacggtgtttgcgttatgtgctggtcagacttggggacaatctggctgcactatctgccatccatcttgtctccaaggctattaagtgcatctgcctcgctggactcactccagctcccaagaatggaactaattcagaagttgactcatgaatatacagttacctgtcagtctttcaggaaaagttttatgaagatttttactgttaaatgttgctttaaaggtatgcaaaaatcctcttttgaggcttcctagggtttttgcctctgttgccattgatagatgtgcattcaggaaattcactcttctcataatagcattgttttttctttgttaattcttttcattgtgccctgtcaaacgaatgagttgcattgacttggtatatatagggttgccataaggattaagtaggagaatataagtaatatgccatgaagaatgctttgctcagttagccctcaatagctgttaactgttttcaccatcaggattcacagtttcaaggacttctctacttgttactgatcgtgctgtgacatttaaggcaatgtacttcatactttaatatgcattaaaataatctttagggtttattaaaacacagattactggacctcactcccagagtttcttattcagttggtcttggttggggcttgagaatgtgtatctctaaacgttcccagtgacgttgatgctgctgtttgggatcaaacgttgagaaccagtggtttgggagggattggttgggggaaaatttttgtttataatggagtcaatcactttacagttaagaatcctcctcttctgtctgcacattctgaacctagtctgctgtgctctttgtttttggaagcagcagaaaccagtcagcaggtgacaaatttcattattctactttcttcgaatttttccagagagtcctaagtataccactgttagtgctggcacttttctgttattttaaggatttgttggtttttccaaggtggttttcccttgatgccagaagatgtgaataaaaacattatgatgatgttcgggtctatcttgctatttgatatatggtggaatttttcacttaatactaattttttaagccatacttttctttcttacttttttttcagttctcatttaattagagttacaaatggcatcgcttataaacatacttattgtaagcacagcaatgtggctttcagtatctttgtaatgaaagtttaaactacttggaactctagcttacattcctttaagtctttatgatctaaatattcttttccatgatgccaaaaaggttctgtgtgatcatctaaagtttgaaattctttttcaaatcaaaggcactgccaaactcagaagcaactgtgtgaagaaaatgtgtggaaacaccactcattacaggttggtttataaaaagagttgcagattgataggtctttgaaaaatgtttggtgacacaaaactctttcaatcagttccaaatctggcaactctcttgttgcattagattctttttccttcacttttcttctctttctaacagagacagacacatcccttttcctgtgtcccattttagatgactgatggaaaagtaaacaccaaatatgagcatgtggggatggtttatttctttttacattgactagaaggcagtgttgaaagggagacactgctgtcatttcacaatgtaggaaatttagaaaaggtgttagagctgttttaaataatttctatttttggattatgccattcatgagggtatgtagtctttcctttatagaagaaatttgtttaaagtatatctgagatctcttggtgacaaataaacagtgtgttcaaaagaaaccctgtaattttttcattagatgattcatgcttaaaaatgtcaaatgatcagaaatgaaagacccaatgatcaggtcattagaaacatatggttctgggaattattatgcatgccaactctaaatatggaatctcagtccattcttttgtccttacaaagatagcagaggcttttatgcctagtttttttctttttacattttaaactcagtgcccttgcatttcctttacctatgaggtagtacagcctagtggatagatataagtacaacaggatgagtttgcctgagttcaaattctgactctacttatgcatggagtgatgttgagaaagcagcttagcctttctgtgccttcatttcctaatttgtaaaatgaagataataagtatacttaccttgaaagactacagtgaagattgaatgaaatcatacctgcaatgcccttagaacaattcttggtacataatagatgctcaatcagtgttggcttttattatttactttgactagactacttagtttgacttattgttccccctagagaggaaagattacaacaacctccatgtagattgatgtttaggatgccctttgggaatagatctgacttaaaatgccttaaatattatacctttagacagtcatctttatgaacattgaatatgtgatattttggtcataggtttaaagagatacacttctactattagaaatcattctttattatagtaatttctccacacattaagaatggaaaattctgttttagaccagtagatttagggagaaagactctatgatcttcgtttctgtcttattttctcagcagcaatggaaaggttgtaccaaaaaggataatttgttaatgatatcgaaactcttaagaatgacccaagtaaaatataattttatgaaaatcttttcttctgaactgtatatttggatttgatgtggatatttcaagatatacattttagaaatactaaaataatgtgtctagattcctggtaatgccaagttcctacttgttccttgattcccccaactcgttaaatcaatagcattcattgcttcttgcacaggatcgacccagatgacaataaacaatagagtcatcatttggctttgatctttcaaacatgtgtagcaagatggcagtcttcaagcaagcaccttttgtttgcaaaagccatgcttttttgaggtagaaaaaaggaggagatgtatattatggtattcttacaaattagaactcgatatggggatcttatagcagaacaaaacagagaggaacaatggacagaacacatgggaaattcccacaacataggaaggagcaaatctaccctgtactggggaagatcactgaaggggaagaagatcaagaaatttggcagaacagtgttacttctccatcctgtcacccttaggtgagatcttgaaactgggagtggacaagtaaaagtttaattgattcttccaaattccagaacctgggggaggttgtagaccctctttatagtgaaatgtccaatatgacattggggtggctaatgggagaggctaaggttaccttgaaggagtcttgcacactgcagagtcaacagtggagagcttcctctccacctcctctccagtgttcacattctgtgaggaccagtgcaccaaggagctgagtagtggaggatgcagaatgcagagaactcaccaacaggtgcagtggcaattccgtggtcatcaggtgtgggtaccgttaataaaccagggcagacaaatcactgttaccaggagaggattgctagcagactgcgcagatcgcaggacatttcagcaaaagccctgagaacccagaggagagaggaactagatgttccttttcattcaggaacaccctcttgggaagaaggaggagtatgaagaaaatgttccttttaattgtaaagttaaaggatttttttttccatgtataagaagacctgtatggaaaaccatatcaatgataaaaagtaaagttattaggttggtgcaaaaggaattatggtttttgccattgaaagtaatgataaaaaccgcaattactatgcaccaacctaataaatgaattgtagaaaataaactttacacccaccagctaagctattcattctatgttcaaaggtacaaggaaagttgacttttctgagggccagaaatgtggcagtataaacatagcttatttagcccagtgtggaccataagccctagagtgtcagtacctgaagattttttacctaattgctcacctctttccaatttttttgcctttaaattctatcctgcattttgctgctcatgtagtcatctgcctgcagtctgcctttctgtgtcacgcaattccctaactcaagtacctcagtaatgcatttctttataccaggaagaactgtaattcactcctaagatttgttccttgttttattactattttttgttccttttgaacaattctaattataacttatagcaagttgagtgtagtttgttctataatttttagcgacagaaaatgactgtttagaatcattttttccatgccttcactgttattctaaacataatatatagtttagactatgacaatataatagttttaataaaaattcaaactgaccaacagcaggaagtgtataaaagccttcaaatactactgctaaccaattgagttcagtgaccacactgaaacttgagaagagcatgcttacaatttagctttgtggtatattggagtcttgtgtgtcagtatgcatgtttcatgggatttgtaagctgaaagaccttgatgctaacttaatacaaacaagataaaatattcttagcagagtgtgctgaccatatgtgagattcatttgatgatgtttttcattttctttataaaacacatctcaggaccactagcagttattgttctgaaacttaaatgacacaaatgaagtcacatcattgtgatcagtgaatccatctctaatggtttaaattttagattcagctaatctaaactaaatcccttctatatcacagacaactaagcccaatgctttgtgtataacatgcattcatttaaacattggtttttttgttttttcgatcatgggttaggcgtgtgctaagtgcacgtgagacggaagagatagaaggcatagtttagggtctcaaagaacacacagcatggtcaaggagttggaataataaacaagtaaatataagggtaaaatttgtataagtttatcttggagcctagcgaatgggctgatcttctcatatggtcatggaagatttccttaagtctcaatgaattagtccctattacccaagtaaatagaggaagaatgcatcggaagccaaggggatgaatgaagctgacacctttcgagaacctttaggagtttgatttgaacagaacataagatgcacatggagaaagtgcctagatataaaggctgaaaagtaggatttaggggagatcatgcactatctaaacctcagaagagctctgtaaagtaactagtgttatgcttattttacccatgaggaaacagccttggggcactgaaacaactggctcacagccacacagtaaatggcagggtgggtcttctgaccccaaattctgggctcctctcattatcacagaggagttattggattttttttttgtctcttcatggtcctttttatttctatctatagtatcagtcattaatggcaataaaattttgagttggaattgcctaatagtagagaacaatgctactccaaaatttattagtaataataaatcatagctcttactcttaagattataagaagcaagaagttcctatctatcttcacagccatgtgtttaaagttgtattgagtatgagacaaatatattttaaaatatgtatatatatttttttatttttttattttttgaaatgggattctcgctctgtcacccaggctggagtgcagtggcacgatctcggctcactgtaagctccgcttcccgggttcccgccattcttctggctcagcctcccgagtagcggggactacaggcgcccgccactacgcccggctaattttttatatttttagtagagatggggtttcacctgtgttagccaggatgatctcgatctcctgacctcatgatccgcctgcctcggcctcccaaagtgctgggattacaggcgtgagccaccgcgcccggccatatatatttttattcattcaaaaaatatgtttctgccacatgtataggcaagcctttcattttgtccttctgggtaaccatttgttcagaagcctgggaagtaagggaactagcctaaggggtgaggccaactgcaaggttggtctcatacagatgttcatctggggttggttaaaattgttttgaaatttcttcttcagaaataaggatccaatgctcatgaatgatttgatgtcttagagtgactcaaagtatcagaaacattttaagtatttagtttggaaccattaaaatgaaacaaatgaaaatttagccatgccttatactccttgagtgaccatcaggaagaaaatagtcattcttttaagtgaaaatttattaatgtggggttaattcccctaaggagaggcctaatgataagcattagataggtatctgtgtgtgtataatttttctggaatggagagaatctgtaggattcttaagacccagtaaattctgaaggattaagaatcacttcaagtctgacaccctgaactgagcaagtatgtctgtgtgtgtgtgtgtgkgtgtgtgtgtgtgtgtgtgtgtgtgtatttgctgtgtttgtggatcgccttggattacttttaatctgtagtgtgaggttctctagagttgattctaggtaagcaagcaaaaatttttagacattttaggttaacattaggcaaagaaggtttttcgtttgttttgttttttaatattaagaggggatgttcataaagtaacatactgattccattatgtcatccaaacaatagtatcaacactatgttccacaacagtaaagctttaggacctgtaaattaatgtttcgtatgtgaattatgaatacaatattttaattatgttgaaattaaaccaataccacatcatcagtctctcagctcacatgagtaaatagaaatgtgatctttaatttttattgagttgcttaacagtttctgctttgtaaaatctgtgataggctactaaatccctytataaacccttccttttacccccaaaatattttcagatggtgcagaatataacaagttgctatagtaactgtgcaagctaaagtaatatgccctgtaatagccatgaaatacaagtagcattattttgaattttgtgttaaaaacagaaatgtataaaggtgatacaataataaataaaatttaattatgtgttgaccaatgaaacaaaaatctgtgagtcacattttcctcacctataaaatttttgcacattctcaattgtttcatatgtgtctattttgttaaagggtagttctaaactttcttttactttgcttaaattattgctctcaaaatataaacaagcttagtaatagtgtatctaatcaatctaattgatattttagaatatcaattaagtgttaatatttatattttactataattatgcagaaatatataaatccaaaatcttgttttatgtttttacagttttgtagactttttttgcatttggagaatatttttgacatattttccacaattgcaaagaaattttgaaatttagccacttctaaagaactacttctaattttgaaggcaaagaaattatctttaagtctacatttaacctatttaagagaattcttataacttagcatataaccaaaatttaggcaaaacataaattctgatctgaaaaatagtattacctacttgattttccatcacttatatgttctattaaataacaactttctaaaacatctagtgttttaataacttttgtgaacatttcagtcacacctaataatgcatcataatataaatacagcatgttttaaaaagttactcagcttcttttacattattactccctattggttaaaatattgcaaaatggacagtctttttacagatgtacacaaataacttacaggtttgggaacagtttgcaattctttaattgccattttctctgaaaactatcactgctacatccaaaagacatatgtgacattcgaaagtatatacttaaattttgtagctaagtgtttgtgtgtgttaatggcataagcttaggattggcataaatttttaggaaaataactttaaattggtaccatttaaaaaaatccccaatacctatttgtgatgatcttactatgttctcttaagactaatgaaactagagaaactctctttgagatggtttttgtctattgcctgtaacttaccacagattctgtttttgtggtgtgctattagttgtcacttccaatataatttaataattctaaggacattgatcttattgatagtgttcagtaagaatttgcttttcattatgccaatgatttcatattgaattaggacatatttgtaagaatcaaataattagttcttaatttctttttttttttgagacggagtctcactctgtcgcctaggctttagtgcagtggcacgatcttggctcaccgcaacctccacctcccaggttcaagcgattctcttcctcagcctcacgagtagctgggactacaggcatgtgctgccatgcccagtagctgggtttacaggcatgtgccgccgtgcccagctgatttttgtatttttagtagagacggggtttcggcatgttggccagactggtcttgaactcctgaccttaggtgatccacccacctaggcctcccaaagtgctgagattacaggtgtgagccactgcgcccggcctaaaatttctttatctttcattctgatttccagtaatttccgaataacctttagttaaatttgaaaaattacttatgccattataatggtaaacatgctttcaagaaataaaatgttttcgactataagttttgcctactctatttgtcttaacatatgtttataacttattggtgacaggtgatcacaaagagattttccccaaaactgaaatgatttcaaatatatttatttataagattttttaatgtttttagtgtttggtgagtgactcttctctatagattacattttcatggcagaacaaatttgcattcaattaaatataatatcttcattatcatttatctaaatataaagatgcaataaaacatagtctatctcaaaatttttataatttggagataagtttgtatatataatatcacttatttttaattttttttcctccaacttttagattccatgggtacatgtgctggtttgttacccaggtgtattgtgtgatgctgaggtttgggttacaaatgattccatcagccgggtgctgagcatgatactcaatagttagttggtcaacccttgttccccttcctccctacccccggtagtccccagtttctattgctgctgtctttatgtccatgtatagacattgttacctcccacatataaagagaacatgcagtatttggttttctgttccttcattaattgacatagaatatgggaatgcaaattagttcagccactgtggaaaggagttgggagattcctgaaagaacacagaactgccattcagcccagcaatcctattagtgagtgtatatccaagaagacacatgcacttacatgttcattgcagggcttttcacaatagcaaagacactgaatcaacctacatgccaatcagggttggactaaaagtgtggtacatatatactatggaatactatgcagccataagaaagaatgaaatcatgttctttgaagcaacatggatacaacaggaggccatgtcctggtcaggctggcctcgaactcctgacctcaggtgatccacccgccttgacctcccaaagtgctgggattacagatatgagccactgcatctggccttttgactttttattaatagcagttgactagtgtgagatgttatctcattgtggttttgatttggcatttctctgatgattagtgatgtggagaatttttttcttatgtttgttggccgcttatatgtcttctttggggaagtgtctcttcataccttttgcccattttttgatgaggttatttgttttttgcttgttgagttattaaaatttcatatagattctggatattagacctttgtcgaatgcatggtttgcaaatattttcttccattgtgtaggttctgtttacactgatgttagttttagtttggtgtgcagaagctttttagtttaattagaccccacacatcaatttctggttttgttggaattgcttttgagagaggaagacatttcatttttctagagaaagaaggaagataacaaatggaataagatcttgaacttggtgtaaatgggaaggtatacattctgaatgtaagagagagggataccttatgctctgagacaggcagggagaagggggcagggattgctggtgtctgaaggtacggggacagaaaatagaatgagttcatgctttgtttattttgtcaattaagtaggaggcaagatcatttgtgaattgtaagaaaagatggcaaggtaatttgccctaaggggtttgagaatggaaagttttggaatggctgtttacaattggatgtgagatagccacatagggccaggcaagtagttagctgtgtggcgttgagtcccaataatttaacaagcatttcctgaattcttgctacatgtcaagtacttggctaggctctggaaatacagagatgaaagatctggtcctggtccttgggagtttacagacatatcaatcactagttaccctgtgagtgctgctatggcagctgagaaggggaaagtctttctcagcttgggtaggagacagaaatggatacattttccctgaaggagagcttcttaagctctcgtatgtgctacagaatcatcttgttttcaggcaagttaacagyggaatattcttaaggtctaagttatgcactgaatggcatctaacagtacagtaggaaattaaacaacaaaatctaaaaataatgaacaccgaaatattaggcagagtgtttcagttgttagtgacaaagatccaaagtaaattaaagagggaaaaaataattgaaattgttgattcacaccattgcaacaatctggaaatcgcttttggtttcagaaatggctatatttaggggtttaaataatatcaacatgtctcaatctttctgtgactttgagaaaggagcatcctctgtactccagcagtttcatattgtacacctgtaagcctgtgcattcccctttgagaagtaaaacttgctcttttgctatagctgcgtggcagaactgtgagttccaggttcaggaaagctgtgttccctgtcccatctgcccaccgaatctgatgagaacattttgccttaccattatagttttaaaaaatgctattttttatatatttaaaaattttagggtaaaattatcaaatctacaattgaagcttcatctttattaacaaaatagccactaattacttgaacataattctgaatacataccatgctcaattctagtgttgatagttaataatttaaacaaaagaataaaaaaatgtacattagaatcttaaatgcagatgtaggcaaagtcacatgtgcttgtttgagaaaatttttgtgttgtataacttggaatagataaagcattataaaaccttcagtgcagggtcctccttaacattcaaatgtactggactgttaacagagatcgtaaagatttttaatgaaatgtaatccaaataactattaaacacttttcctagttttgtttaatactttcaggaaactatctgatcatgaaaatgtaatgttcctgaagcgatttttttaagaagtccaaacatggtcacatgaggctaatcttagacgatttaactacattatgagcaagagaattgatgtttcaggaagttgagaaaataatgtatatatgttttatataatcattgagaatcatttcagtgtaccctattgcatatatctgatttctgtgttcttttttttggttagaataatgaacacgatagctatgaaacattgtttcctttgcttagtttatttcgactctgttatatcctcatttgcattcatctgtaggtgagcaattaacattattatttgtgttgctcttaattcataaatattataccataaactgtgctttaggtagtccagttttattgctatgattaataactatgataattatttttatctttacatcatttaacattttgccataggaaatcatcactacagtaaaggtaatgaacatattcatcccctgagcattaataatgtttaatgcttggattttgaaactatgttagagagcagtttgaaggatgaagacatcaagattgtcactgaataggaaataaatgtcctggtatggaagaaatgaaataatatagaaagtttaaagtttctgcacaacccagggtaaaaaatgaaggcttatgactcagtctttgcagtaaaaatatctcctcccctccttcctaaaatggtctcaattagataaggttaccgttgtggtcaccacattttttgtaaaagcagggcattctgtcctctaagtttctggtcagaggttgaagcaatgtaaaacaaaataagcaccattgttacataagcactgcatgtagacaaggtatatttagctttgtaggtagttcagaataataaagattagaatatgaaggctgagcgtctggggaaatttttttaaagaaatgtttctgaacaaaaaccacagcacagattaaggattggtgcttacaatacaaagaatgataagcaacatgcattaaaattttactgaaggctgggcgcgggggctcacgcctgtaatcccagcactttgggaggccgaggcgggcggatcatgaggtcaggagattaagaccatcctggctaatacagtgaaaccccgtctctactaaaaatacaaaaaaaattagccgggcatggtggcaggtgcctgtagtctcagctacttgggaggctgaggcaggaggatggcgtgaacccgggaggcagagcttgcagtgagctgagatcgtgccactacattccagcctgggcgacagagcgagactccatctcaaaaaaaaaaaaaaaaaatttactgaagacattttcttagtagtgactgtacttggaagacccctgggctctttaaagtggtatgcagatgaagagagactgactaggatgccttggttgttcagggcagaaagaagacacagagacaaaagattgctgacctataaatggctctaaatggaagtccaaaacttacttttccctgactcgtcattgagattgtactttttattcatagtttaaccttctttactcaagatgataaaagagcaataggaaaatctggggaaaggaaaagatgggtaggaataaaaaaatgtatctatgaatgaggtgagaggacacagaattcatgctgtgtagtccagcacattcagaaatgacctcgaatttggttctgagatttctagcagcaagcaaaaagaaggcaaatcagttacaagtgtcacgcgtttcataagatcaaaaataaacagttgttctagagaagcaaaactcttcactggcactaaagggagacatttcttctctcagttgttttgtagttaaggagatggtggctcctcttctttggactccaatgttagggagaatcttctgattcctagaatattgaataaaaggtggaaatctcttaatgatattgtacaaagtaaaaaattttgccaacatcattttatccctagaaaaatgcgtttgacatttggaattatgttaagaatatgttattgtttccaatactaactaaataccagtagtaaccaaggtgctatcaaactatggatatcagtgatatttaacatgtttctgctattttccaggtcttgaagtgcattcacatttataatcacatcaaatttttatagtatatctggggagtagataacattatccctatatactggttttcctactggtttgaggtcaagagacttgcttgaactcacacagaaataagtggtatagttgggactaaaacatagaaccaaatgtttaaaatgtttttgtcactacagaaactacagttcaattttgcaaggaaaatcttccacttactcatttatcataagtataggcatgtcttttcaatacttattttatatattagcagcatccttttatttattgctgtaatcttgataatatggaatagggtggagaataatgggaataataaaataactatcatttaccaagtactttatcatttcatttatttattacaatagctctgtaaggtaaggaccattgtccacattttgcagatgagaaacaaaatagtaacagctggtatattgcagagccaaaattctaaacaggtctgcccaagtccaaaacccttatttctagttaccatgccatgtggctggacagcttttatgatacacatcaaggaagttgccatgatggtagagttaattaggtgtaagaccattgtcactctgtccttaccaggaaagttacagaaaatacagcttcctgcactggctgctaggtaaatgcctacttactctctggggtatattaatgttggcaaacagggcagttttcttacaccaggctgtatacctgtattgaaaagcagagctttggaagttgccaaggcagaactgccaggctgacttccatttggtccataaaagtgaataatgaagtgagtgtccctgcacatgggaccgaggagactgattgtgtatgtcgcagtagaactttagaattctgtgcattaacaccttcttccttccctcctttatggtatttgagatattaaatggatgctgctattttcagttcagctggccaagggaagtcatgggtttggcaagaagagagcagtaagagcaatatgtaactgttctcatccacttatacttccattccttccgttatttttgtgtttatgttttatttgttgtttcaggtgccatggtaggtgttacagtgagtgcaaaaatgaaggaaaaataccctataccttaaaggaattgataatttggcagtgggtgaagaggaaagataagcattttaatttaaaaatgccctccaggctctataagctaaatggccaagaaaaatagacccatgaagattaaatgcattagtaaggagagagatacaaatgaaagcaataataagatgtcactaaagtgacaataaataaagtggcaagagttagaaaaccagagagagccaagtaatggcagaaatgtagagatgtgggggccaacatggactgctgttgatattgcataatggcgcagacattctagagaacggtttgtcattacttaggcaataagattacctattcctgtgaccctgcaattcttctctttgacatatagattaagaaaatcctcaaacaggtctatattggtcagatatgaacatattcatttctggtgagcagtagttgattgtcaaaagtgtgggcagtaagcattatgcaataattagaaattcctgtggaaacttggaaggattgtaaaaaccagcatggtgcaatcaagaaaggagcaagagctctatcacagaatccagtaatataaatgagaatgaatgtataatacagtacatatttttcaaaagttacatgaaatatattagagtagtttcctgtgggaagaagagtctagagattggattgggattacaaaggaatgtaaatataacagagggactattcatgaaccaataattataatgttccattaaataaggagtatgctaaattcacacctgtaaactagaaaaaacaaaatcctggagattcagagaagtcacaacttgaagagtttaggatatatttcatggagcgggtggcatttgaggtgtatcttgaagaatgggtaaaattttaaacagatactggggaggacagggagctgtcacaggtaggagatagtggaatatatgaagaaagccttccaccagggaggagggtcaggaccagcaagtgcttggcaatacagtggcaaggggcaaggatcatttaaaagagaggagttcactttggttggagcagagggtatgtgtgaagcaaagtaaagataatgaacagttatttagcactatgtgtcaggcattggcctgaatactttatgcatagtatctaattcatcctcacaaaggccatatgacatagacaatgtaatcataaccatcgtcatcatcatcatcatcatcatccacctcacagatgagtaaaccatgtctcaaagaggtaaataacttttcagccacaggtcctgcaaatcctagagtcatgaggaacagccgggtatagctctactccctttctccagggatacctcacacttttgaaaaacagggctgttctctgtatccctgtcaatgtagatgcagagggtcttggygatgatgtggttaaagtagtgaaaactcagccttacactaggtatggatttaattatcccatagtactgattagtttgatagcaaaaaaggatatttgagaaggaagctgcccatattataaaggcctgcctatataataaaggcctttttgctcatgtgtgtctcattgaaatgatggagtggctgtgccaacatcaagctaaataaggagaaaacatttataagcacccttttaactctgttagagctatgtattctgaaatcccttcaagtaacaaatgggtaagaacaaaaggggcagaatgggcctttcgactgcaaagactgaggctcaagctttagggaaccctgtttatgacactgattcgatatagttaaactccgagcttctatgtagttaaacatgggggaaatggccatatctataaggtaggattatgagtctcaagcattctgaaaaggaatgtcagacatgtctttctggtcaatgtaggaatagaatttgcttcatcggctaggtgaacatttaggccaattgctatggctgtgtcttagaaagtgacatttgtgacacgagaaatagctaagtatagaagcccaccagtgaacaacaaaagccaaaatgtccatgtgaactaatgtttcaatacgtctgtttttaatttatgccttcctttttctggcatctctacccatttctcaaattcctcccttgctatttacacttcaaaacatctgggattgggcttccagcacctgctgtaggaagcagagatcatcctgctgaaaatatgattttacatgttaacatttaaattaatattctttatttagttcaaaaacagtatgttttaaaatctagttctctaaaatatatgcagctcaaaaaatgataacaagtacaaaattttcacaaatgaaatgtgcaaacctgaagatcttgataaaataatttaaaaaatgaaggctgcaacacacagactgaaaacaggctcttcatagtttaggattggaagactctgccgtacatctgtttaacatcttgcagtttgaagaaccctgccttgcaaaaccttctgtaccaatgacacacaggataaaaggttatattatgactttcagatggaaacctgcaaaagtttatctggtggactggaccattaactcatgctacttttgattctaactgttaaaaggatttttcatgtgcaaattataatgaacttttaggtttatgtcagaaaacaccagaaagaattcttacttggagagagtgaacatgctgtggaatgaatagaatgttttakttgtgatgttcaaatggaactaaaattcccccagtagggagtttgtagagtgtgttttaataataagtatatgtgcctatatatttagttgggaacaaaagcaccacatttgaaatatgaaagtattccaaacttccatcactgccaacatttattgagagtttagctgagaaaacagaagcctgttttcaggtatggcttcacaaaaatgcccatatattgatgtgacaaaaatcatacttggtaaggaggcactctagtttggagtaatgtaatattaaaaattagagatcccttttgagatcagttgactaccagaattgtgttgtctttgcttacaacttacttggcttgggtgaaggtgggaggttttttttttttttttagggcagtttctgtacacacccggtgtcctgtgttaagctgtcatgtggatgtgcattttcttaatttgtagaaaggagatacttcctttttcctccataacccaggagtcttcactgccaggctctggcccctgtgtctccagcattcagcccacagatcccatatatgctgtggaaagctcactgtgccgcaagtgggtgtgtgagcaaaggagaggtagcattttctttagagacatccacaccctctgacccagacgaaggaagaatcttctttgcagcgggcttgctgcaagggactttccatgtgcattttatcatgccgaagctgacggtggtgacaagttccacattaaatctgtcttttctgaaatttcacattctcttctttttgtagggaaagtgttgtaatactctatcgcttgtgtaaacagtctcatttaattagaggctgtcaattttcccttgtgtaccatgaaagctgccttgcccccactctggggctgttgtagactttggttatgcagtgattacctaagctttggggagcagtggggtgtacatactgacattggtagtagccagcagttttcactagggaaatcagtttagtatactgttattaatttggtttagaaaatagctgcagagtgctcagacaaataagacatagcagaacacatggtgttcgttattcaataactatccttctggaaaggaagcatggtctatttcccatttgagaaggagcttacaaaaactagtaaatatggaaagagggcatgtactataattttatagaatagctctcctcatgcacttatacagccctctcctctcccccacacactccaatcacattcccacaacatgtccacatagaatgtattcccaactggtattagcataatcattaccacattataaacaagctggtggaaaaatagcctgaaagacttagatggtttgttttataaatgaaggtgggggtggaaagccagatatttttggaacaaattcctctgtctttagaaatgatagctcagctctcataaacctcaactgatagcatggactgaagaggtggagttgaagaaagtcatgacatattcggtatttctcagtgaaggtcaatgaaaggtctcctgtggagcctctctgctggaagaagtcctcatgatagaaatgttgagccttcctttcttctttcttactggagcacacatggaatactttttgttttactggtttaatatagttctgttggtcaaggtctctggctgtttctcctttgtctattgcatttttcctggagttgacgagatgagaaatcctgacttaatggctaattccaagtttactgccaagaccaataaaatatgatgtaaaatatggccttacctgaaagcttccggacattaacgctgttagatccagttttcattgtaaaaagaaaccaagacaaaggaaggagaataattttatgaaagtaagagttggtttgtgtgtccaggttctaagagatcagataacaggctgaaaagagatttggtgtaccatccttttttcttcctttctttttctgtttgatttttacagttatatagagaataacaaagtatgcttgccacagaagaatcatgggtgtgttcttttaaacatttgactttggaaatacccagagaactgtgtgatggggatgaagatggcattaatgaatgtgattcaaacaatgcactctctgtgggcttattgcatctgtggcctactgatttgtttgtaagattgccttaatttgatcagataggctcagtcatgtgtatctataaaatcagaatcatacatcatatggatcacatgaagttcaacatccaggaagttaatcttcaagcccagcactcaaatgtctttcacctttgacatgggatttctatttggaataaatttaacaacactctttcctcctgccctagctcagacttagacacaggacatcattacatgtagcagaccaatgggaaaagaattcacacgtatcacactggcatggctctttggaatactggaacctcactttaactcctgtgcgctgtcctcaaattacatcaagtgctgtggttatttaatgtttcattatcaataaattatttgatatgaaataattatactcataaattggcttttttccttaagaaaggtaattagattaagacaggcctatttcaaagtaatgtgcccattttttcattatatgtttgcaaagttaataaagtaattgatattgtaaagagtttgccaaaagtcagggcattaaaattaaagcctgaagtccaaaagagctggcttaatgtattatttattgagcactgatggaatattcagtgtaagacaacaaaattaagccaatgtattcacagtttgaataaaagcctctaaatattttttcctattgacaacagactcttagactcatagaatagaaaaggaccctggaagatttatgatctatcaaattcacattatagatgaagaatcagaggcttaggcgagggcagtgacttaccccagggcatagtagcccagctgaagttagaactcagtcctgttgatttcctgagactgacaatctgccctttttcacggattccaccccaggccatccactcatcctttttgctcactttctgcagtatctttctggctccatatttagcctctggccttgcccagctccgctctgcatgccattataagattaaccttcttcaagcataattctaatcataatcttttatgtattagagttctccagagaaacagaagcaataggagacttaatgtaataagagatatatctcctattgcttctgtttctgtttctctggagaaccctgacaactacagaagagactagtcatatgyatrtgacttatgagtaattgaatcatgtgatcagtcccaagatctgcagttgacaagcaggaaagccaggaaagctggtgatgtggttccactttgaggatcagagaagaccaatgtcccaactcaaacagcgaggcaagcaaagttccctcgtagcctttttgtccccattcatgtcttcggttgattggttgagagctactgtacttagtttgctgattcacaagttaatctcttccaacaacaaactcacaggcacacttggaataatggttgaccaaatgtctgggcaccctgtggccctgtcaagtttatgcataaaataaccatcataccttccttaaaaacttataatggctatgtcttttttattattattactttaagtagagtgttttatttatttcaaaacttttttatggacttaatcttattatatctaattttggattcagagagaaaaggagggaatgccaacattgagttccagattgttctgagatactaagattatctttcagctcttatttgaattacaaaaagtaaatgcatactataaaaatgcagataatagagataaacaaaagaaggaaataaatgttttccttaattcaaggatcagaggttacttctctttatagctttttaaaattttgtgtatgtgtagttttataaaatattagaaataatactctgatatattatcatttttcattcacatacatatacctatgaaaggattatttttaatcattttggtgtatttgctttatggatattttataatttatttaactaatccagtgttgaatatcaagattgtttgtaatttatgctgagatacagcttcatacatagagctttgcacatgtctgtttactcttttaaaacaaattcttacaagtgggatttttattttccttatcatgtcaactcttaactattttgtctccttttagccttataatcttagatatattttctacaactttttaacacaagtatttcatttagtgacctcagttttatactgtttcgcattctttactttttgtgtgttttaattttaatcctccaaataagctataaacttctttcttcttttctttctttcttttttttttttttttttttgtgattaggtctcattttattgtccaggctggagtgtagtggtacaatcatagctcactgcagcttcgaactcatgggctcaaatgctcctccccgctaaactgtctgaatagctggaactacaggcacaccccatggcacactgctaattttttaaaatttttaacggtttttgtaagacaggtcttgctttgttgcttaagtgcatcttgacctcctgtcttcaagcaaccctcctgcctcagcctttttaattgctgggatttcatgcatgaactatggcacccaactttttctttttttagtagactattttttagaaaagttttaggttcacagaaaaattgagcagcagatacagaatttctcatatataccacgtgcccacatatccatagtgtcccgtcatcagcattcccccacccccagagttgtacatttgcaataatcagtgaacctacattgacccatccttatcatcccaaactccattgtttacattagaactcactctttgtgttgtacatgctatggatttaaaacagtgtataatgacatgtatcatatccatcagtgtattatcatacaaaatagtttcattcccctaaaaacccgctggctcttcctattcatcctttcctatcttcggacacccaatccatgtcttcttatctatttattgaagggaagtatcatattttatatttttgtattgagtttttaagtaaacatgcaataattgacttgagtgtattgcctaataaccaccttgttacccggaggccctcactgagctctttccttggggcctctatattcaagtgggcatactctttgcccaacagtttctccttggatctccttctgatggccctcttggaacacttgtgaatgtatggattacaaccttcttgttctcctatttcccaccctattctttggttaaattcttagtgagggttttggcctttgcattgaaaagctgatttctggtataagaggcttcattatgtttctgctcaatataaaattctgtctctttcaagggagacttttatgtgttattaggtctgataatacactttctgtagacttagctaatgaattatgaatagaaaatattaaaaataaaactcttttgtaatgactaggaataaacaataaatcctggaataatgactgaatttagttgaatgtcaaattagaggtagccttaaagaaatgcaagcatttggctgaaattgtctaggaggaaaccaaagatggaaaagacagtgtacctctgccttaggaatttattatctagtgtgaacattggacacacacaactctctagtatgtcagttttcagtggtgatgcagtcagacattagcataatgtggtcggaacataagggcaagaacagttattatgattgattggcccaaggaaagattcattgagaaaaagacatttgaggagggccttgaatgataaatatgatttaggtgtgtgagttgtggaaagcaggttataagtgtggaaatagcatgaggaggcagtatagacatttgaatatacataaatgtttctgagttgttgaagagtcttgtgtagcagaagaaaaagatgaggggagtggacagtggaagataaaactggcagggtagctcggggtcagattctgaggaatatacagtgctgtcctagaacaattgagaattcatttcataggcagtggaatgcaactaggagaggattgtaaggaggagatagcatgtttgggtttatttcaggatgattactttgatcttgtcacaaaagatagattgcaagggctagacactggaagctgagagaagggttgggagactttacaatcagtggtttaggatatcaacaatcatcagttgctgtctatgctggtggctctaccacctgatgaagagactctaaacagtcataaattgttatctatgctggtggctctactacccgattaagaaatttaatcaaatttaaatcctctttggtcttgtctgtgactctggtcctcttccttttatgggatatgaatgccttctcctctgctattggttgtatctcttcgtatagggaaggactatttgtattgtgttcagtgttgctagtgttactaagtattcctgctagctaacaatccagaattgttcttccctggaatacctagtctttcatgaagttgcgtttgctttctgacaccaattctgctctattgtaccttttctcttcttgtatgagaaagcaggagtagaggcagattccatcaagaactgtttatgcctgcttgggtagaggagagcaaccacacattgaagcatttgttatacatacaatatcctttcagggctcttattctgagacttataaccaaaagcatttatttcagaaccatgtaatcatatgctatggcaaaagcattaactaaaggtactaaataattatttgaacagttaaatcaaatatgaatatacttccctttgtccaccagtttcaattcacttagcaggttcttcctagccagaatagccattgttctgttctttttccattttactctcattgtgtcttttgaggtgtcgcaaggggctctagatgtttttcagagttcacatacatttcatctttgttcttcaggatccatttactatagtactacagctctcctcttctggctacaaaatcttactgcagcactttcccttattcttgccttctgttttacccattttacctgttttcttytcttttctcttgtcttgtcaggtgcctgtggcagccttctccctgccttccctcaggcagcagtgtgccatgtctctgcaatgccttgttgctcggaggccctcactgagctcttttctcaggccctctgtattcaagtgggcatgctctttgcccagcaggttctcctaggacatcctcctcttggaacacttgtgattttatggattacaaacttcttgttctcttagttcccactccaccctttggtgatccttagtgacggttttggcctttgcattgaaaagttgatttctggaataagaggtttaagtacgtttctgctgaatataacgttctatttattttccttagggatattatgtgtcttttgagggagagaattgacttccaggctgaatgctaccaggaatactatcctctgtaaacatactcaacctatactcacatataactttaaaacatctttaagctgtctttcaaagtttgtaaacagagaaatggcttagttaaatcacagggaagtatacaatctaaaacagacagaaagagaaataaatatatatgttgtgctcggtcataataaacattgacagttcaggctgaagtgtatccatcattcactccacatacacccatgggcaccataagtgatcactcctatggatggaaggcagtagaaggcatacatcctgtccacaagaagagaccgttcagttggagagacaaacataaacatgatgactgattacaatgtggtaggataagtgtcacaatacagccatgtaaaaataatcttgaagacacagataagagggtgaattattctgaccagtacaggaagctggtctgaggcaagggtgctgagtcagccagcctgaggaagacagtcagagtgaaatcaaggagctttcacaggtcagcattgtacttgacttgcaagctgtgagaggctcccttcagctcaataacagagcctatcagactcatcaaacttgagctacaccatcttggaatgctttatcaaactttaaggatcccgattttctagaaaacaaaagcatctatgaggtgctagagaattgtcttgagagttcataggtcaccattccccacgtcacagcacactttcccttaacagtgtgacaggaaggcggcaacatctgtttccatgtgagtacactgtgatacattgaaagggacaggcggtggtttagtgcagcctgcgacttgtgaggaatttcatatggagagaattctactctgtggttctgaaattaggaaaaagaggaagttgcttttattactgtggcatgagaggcccctctgccctccatacctctgtttctaatttgtaaccatttcctgactgctgttcctgttgcatgcttttttcataagttactccatggcttacatcagttaatggctggggctgcactctctgagcctggagcggagtccctgcacctgggctcaccctrctaatagatcacccagggcctggtgatggcctgcgaggacagctggaatggctcaactcccccactcatctgtcatgattaccatgcgttgggggtttgcctggcttgttccactcatttcctttgtcagcatgacaaagatcaaagtgcaagtaggatacataaatgataacctagaactttgcccaaacacataggctgcaatctgggtgacatcttccatcacactttccccataggcatggaaggaaaagggcaaattatgttttaagtgtagcctttcttgcccagccccttccagccccccatccccacccccaccacccagctttgtttcctgaacccatcatcgttgtattaatcaattggttcagggatttgagatttcctgacataatcacaggattggagaaatcctgatttctgtttatatgaagctgtggctgtgattgcagaccttgtacctggctgagcttgcatctttcgttccctattcagagtttgagatgcttctggccattctcctaaagaatgggagtgaatgatctttgcatgtctgttgagcagaagatatttacttgcagaattaaaataatactgataaaaagtgttcaaaatggtaacaatagtttgtggaaatatttgggcaggtaataattacttttggacttgtgttccccattcaaaaacaaaataccttgcagtgtttctgagtttacttttgtcatgctgtatacgttctctcttcaaaatgaaaactgatgcattaaagaaagaatgagttgaatttgaggtatgggtgcaaattagggaactcctaggaattaactaagggttattctttcagaaaataacattcagatagtgcaaagggtctttagttaggaaaatgtatatgatctctggattgatgttgtctttaagagttgtatcatacagaatagacatggaaaattgaccgcgaatgatgtaacccttgatcaatgccattgcacttgcatgttttctctatcgagataatttttttattttttataataatatatgagaatttctccatggatttacagaaatcacagctaatccatgtgatttctttctaaatatagatatttatgtatttatctatatcgatatatgtccaccctctacacgtagactgataatcattaactgatagtaaaaagctaaaaatgtagacactttccacaccatctacctcgtttactaagctgccacattatgtgtgtgtgtgtgtgagtgtgtgtgtgcatgtgcacaagctgggctatgtttcaaatgttctgttttctttctcagaaactattgatgtgttttggaaatattgaggatgcctccaatgcgagtatcccctatatcagatagtggggcagccctgccctgggaacttagacaactcagatcagatcttcccagtgggctaacctggcacctaacttcttcgtgtttcatgttcctcacctgtaaaatggtgataacaatgactatctcaaacaaggactgttaggaggattaaattaaaaaggctaatgtgtgaagaaaagttgcttagtgcattgaactctgactctggggtctgcagatctggatttgaatcctggcttttctacttaaaagctgtgtaacttaggcaatgcatttaattctttgtgctcagcaataaatgttgtaaggcatgtaagtggcatagtgcccgacacattatgagcactcaataaatacttgatattaatgttaaattgtaaatctgcgcagatgataactttttttgatgagctgataataagataatgcctaactctgatggtggatggtttccctaaatgtaacaacagatctggagagtttagtggcatgtagattgtcattttgttcattcataacctgccaacttgttakggaatgaatctttttgtaggtttaagctaaaagtgtgattgcatgcatttgtcttaaagacaactggaatcatttagcttgttcatgttttagaacacttccatggtaaatgtgagagttaaacagcatagtgtagttgtagcttctctgtactatgttttattgtgtgggtaattttaatgaccaatgtcttgagggtaagaatgactttggtgtttcagctaaaaagctgacttttacagaagaggtgtgttgtatttattgatatctacagtctgcataaaaatgttcccttgacttcccttagacttgtgtttgtcatattcttaatttatgtcatatatgtcagtttctcatatattttcctcctatcaacagttgtacttttgagcctaacagatttttcctcttccagcatctctcctttctaatccattttgcaaaacttgacaatcatttacctaaagcatgacttctgtttatttcactcctctgcctaatggttcctcatcctgaccttaatgcctgtccccatcatcatacattcatgtcaccattctgcatatcctggcccatgaaactgctattccttctgcatatcctggcccatgaaactgctattccttcataaactatactttaatatattaatggtcactgctcaacagttttttctgtagtaaatatctggtgttctatatagtatttgacatatgatctcaaagtagtacggcctgccctcatcctcttttgaccagtcattttatgaggcagtgtgggtatttatgagcccccagagctggaccagttcccaaaggaaatggaagatcaagaactctgagaacttccaggaaatggatgggaggatggtcagctctcgatggtccaggatgcactctctgatcaatgaaacccttcctctttgtctttttttttttttctcactgattaggcctcatggaattctgagcctcaagcttgttcttcacaaaaggctgctctttggatgactgtcccttcatctagtctaaactcccttttcagtcctgggtgttattcattccagaccaggagtgtgtatgagtgtgatgctgggctggtgggtcccaggtggcctgatgtctagcgcttggttgagctttcacaggcccatgatcctgggtgtgatagaacagtatctctccaacttaagcaggcatcacagtctcctgcggagctggtttacacgtagcctgctggaccccacttctgagtgtctgattcagtaggtcttgtgtggagcctgacagtgtgtatttctaatactttttggggaactcatgacaaattccaatattccagtattctaacaatattgtaaggaagtacaatattgctgagtggtatgattatgaaagtgctcaataccttcatatctcggtgtggctgctcatgtttgaatggtcttgtaggctttccccaagtctttccatttacaacacctagatcaaatgctacatctttaatgatgtttttgtgactcctttaaccaggggataaaacatttgctgttactcttctctctaacttcttagcaatgtgtttgcccctcttataatatttatcaccatgtaccctacataaagtatgcctgtctttctgccaacacataatctctttgaaggggagtgtattggtctcattcatcttgcttcttctaatgcttggtacagtgccttagatgcaatacatattgtttgccctgtgcccagatcccttgagtccactttttgacctctgttaagtctatcctccaccttcagcacgctttgttcctaacaacttgaacttgtaactttctccagaggactgaacttgaattactggaggcacttcactcagacatatggaaagctgggattgtctagaagtttatctccacagcagtgttatgctgcagagtggtgcagcagtatgaaggccctgcttcttgccttgaggtggacacactacagctccgcaggattaggctgaggcaggcccttcaaacccttgtttggattcttccccttctcagtcctgctttccttattcctttgactgatttctcctgggagcacttcactaatgaatcacctgcacacaaactcttgtctcatggcttgcttcaggagaactagcaggtgttgtgtgaatatttgtagaatgaatgaatgcttgaaaaggagtgtagcataataggagcgtggactctgtagccagactgcctgggtttaaatcccagttctaccacttagtggccatgtgactttgaacaaattatctaacctttttgtgcttcagcttttttattcatatactgaagctaaaatagtactttatatggggttatgaggattaaataaattaataattttaaagcacgtggaacagtttctggcacataataagtggtgattaagtgtttgtaagaataagctttaaaaattgcgttgaatgacattaaaatacacataagtaaatggaaagacatcttgtgattatggattggaaggctgtattagtcagatgattctactactcaaggcgatctccagatttaatgcaacctctatcaaaatcccactagtgttttttacagaaataaaaaacccatcttgaagtgacctcaaataaccaaaacaatcttgtaaaagaacaaaggtggaagactcacacttccaaattgcaaaatttacttcaaagctataggaatcagaacagtatgatctgacagacggacaagcatatatagactaatgtaatagaattgagagcctggaaataaacccaccacacatgtggggtaagctgaattttaagctaggtgccaagactattcaatgaggaaaggaaactctttttcccaaaagtgccaagaaaactggatctccacatgcaaaagcatgaaattgtatcctatcttgagataaaggtataaaagtctcagaagaaaatacagggggaaatcttcacgacagtggatttggcaatgatttcttggatatgaccccaaaagcacaggcaacaaaataaaaaatagacaaaatgggcttcatcaaaattaaaaacttttgtacatcacaagacactatcgaggccaggcgtggtggctcatgcctgtaatcccagcactttggtatgccgaggtgggcggatcacctgaagtcaggagttcgagaccaccctggccaacgtagtgaaaccccatttctactaaaaatacaaaaattagctgggcatggtggcatgtgcctgtagtcccagctactcaggagtctgaggcaaaagaatcacttgcacccaggaggcggaggttgcagtgagctgagattgtgccactgcactctagtctaggtgacagagtgagactctgtctaaaaaaaaaaaaaaagaaaaaagaaaaaagacactatcttgcaaaaggacaacccacagaatgggagaaaatatttgtaaattacacatctgataagggattaagaatcagaatatttaaagaacctttattggtcaacaacaaacaaataacccagttaaaaaatggtgaaaggtcctggatagacatttttccaaagaagataaacagatgaaaacagatcaataagcagatgaaaagatgctccacattattagtcattaaggaaatgcaagttaaagcacaatgaaatactacttcacactcattgggatggctattccatacaaaaaaaaaaaaaccagaaaataaaaagttttgatgtgggtatggagaaattggaactcttgtgcagtgtaggaatgtaaaatggtgcagcctctgtgaaaaacagcttagtagtttctccagaagttaaacataaaattattgtaagatctattaattccactcctgggaattactcccagaagaattgacagcagggactcagatacttgtataccagtgatcatagcaacgttagtcacaatagccaaaaggtgaaaacaactgaagtgtctgtcaatggatgattggataaacaaaacatagtatacaatggaatattagttataaaaaaggaatggaattctgatatattttgcagtgtatggatgaactttgaaacattatgctaagtaaaataagtagggacaaaggacagatatcattaggattccacatacgtgaggttcatagaatgggcaaattcatggagattagaaataaactagatgttaccaggcttcggttggtggggtggggagcagagtgaggagttattgtttcatgagtaaagagtttctgttagggatgagtagaagttcaggacgtagtggtgataactgcacaacattgagaatgtacttagtgcaattgaattgtatactttaacatgttaaaagtggcagattttatgttatgtatactttaccacagttttaaaaaacattaattctagtcttgcattttgttattcttgctctgcctctgggacctggatatatgcatcactaatgctgcttttctctctcatgagggaaattcctgtgaattgtctataagcatttaaacaatatgcttggatagctgtgaattttttaaacatccagttaagaacagagaaaaaaaatgctgtatgtaaatatgaataaacaaaggcataattagattatttcaaaattctttaggtttactcagaatttgcaataatcctgtgagtgcagtgagtccagtttaattattgataccataaagcagtctgaacctagagttttcttcagctttactgcttatgattttataaaagctctccacatgggtccacttggtttgggcttataggcaaattggtctccagccagatgctccatctccttacatgtcacacctctccacagggctgaaatgttcccctgaagagaaactttttaaaagcccacaaactccaatttagctttggcaatcactgcgctgtggtgtttgagtgttttagacttagcaataaataatgttttaaaacttccaatgttgtatgtcttatttgtcgtgctgtttgtatctataggcgacagccctggatatcacagtatatgaaatgtgataaagtcacccagtggttacaattgtcctacctgtcccatagcctcacatttccctcatttttatcataaatggtgaaatgaaatgaagaagaaagggggtgagaatgtgtatttgtttatgagatagtgtccctcaaggaatcagttgataagtttgactaatctctgtaacatttactctgacacactttttcatctttgtttgctatacttatacattactatcttaaaaactttttggttttcatctgggaagcccagtactgtggatgtgtgggatggagaactgacctatttaagtatatgtcatttatatgaaatttcatcaaagaaaatgcaatagcaacaaaaggccaaattccatttaacaagaacttttgaaactttcaccactgtcacagttatttcaaacaaaaccactttaagtctgttctggaataagacagtgcgtaaagaggtaatgcaatatgttaaactaatgcaaaagttttggtatctggataggcaatgatatattttaaccttttctattttggattcggatcaggtcttctgttgtggatcaatggttcttaggcaaaagggtagtttgctatgaattatcctatttaaaatatcttgttactagtggttctgttcttgaagagtgtaaatataacacatctccccacttcctatgcgtggagttaactatgacaagaaatgagtggccctaagcatacagctaggtttatcacatgagtgtttagttagtgcccactggttgaaaatctgagcatttggaaagtgatacacacacatgtgcatgcatgcatgcacatatatatatacatgtgcacatcatgtacacatgcatacatgttttccctctactttttgggtggagggccttgtagaaaataaaatgtccaatgggcagagagacagaggaaagaatgcccatgggacaaaaggcagcacagagatgtaaaactagtttctcattgttacttgctttttccacacaagacagaatcattcttgcctagggttaacactgtcagagcatactcccttatggaaaacacagaacttctggaacatcttttaggaatgatgtaccttaaggtgaaatccaatactccaaggatcttagagtcctgagtagagattatactgatagagacaaattggttatttccacccaaccctccaaatttcactgtttggctttgtattgaaaattgaaagtatgtctttatttatttacttccagtgtaaaacttgcatggtaaaagtttgttgatgtgcagtgtatccccagtgggaaattactagaactaagaagactaggaatatttgttttcaaatagatttttaaattgaccttgatagttttcaatgtttcttaattagtgtttgcaaatctgctgattttacgaaaaatctgtttcttgctgtattagagtatagcatcacaacaaaattagcattccatatgttgttttgttaaacatccttggtgactttccttaaaatcctttgggaaatgttttgaaatttgttgaaacaaatatgcaacacttgaaattaaatggtgattatcaccacattgttccttcttaaaagcattgcctgtgtttggacttagtagaaatgctatcactgaacacatatctttcagaaattccttacgagtgggtaaggcctaatacaagcctttttacacagactaggaaaagcaacttgctacagaattctagcaatgccatgacgctatgtgtagtagatagactttaccaaaagctggagtggcaagacccatgtataacagcctttattggatttcttccttctctaattggaatgagcaaattcagcttccttttcctaaaatctccttcagttctcataagtagaaacagaagaatgtatttcatctgaaattggagaactgggttgcatctcatggtagtaccactcatttttaaccacttattgaaactgagagtcctatctgtgtcttcattttagatttaagatttagtcaacagatatattgaacatctattatgtgccaggcattgtgcttggggctaaagttaccaacaggaataagacaaacacagtggattcaataaccctactttgaggacatcataacttgacaggggagataacttgaagcacaacagacctgtggggaggggttcacggatgattcgccagaggtggagatgcttaagccgagtctttttttttttttttttttttgagatggagtctcgttctgttgcccagggtggagtgcagtggtatgatcccagctcactgcaacctctgcttcccaggttcaagcgattctcctgcctcagcttcccaagtagctgggattacaggtgcacaccaccatgcctggttaatttttgtatttttagaagagacggggtttcaccatgttggtcaggctggtcttgaactcctgacctcctgatccactggcctcagcctcccaaagtgctggaattacaggcatgagccactgcgtccagcctaagctgagtctaaaaaggtgaatgccaggccaggcgcagtggctcatgcctgtaatcccagcactttgggaggctgaagccgctggatcacaaggtcaggagatcgagaccatcctgtctaacatggtgaaaccccgtctctactaaaaatacaaaaaattagccgggtgtggtggtgggtgcctgtagtcccagctacttgggaggctgaggcaggagaatggcgtgagcctgggaggcggagcttgcagtgagtcgagatcgcgtgactgcactccagcctgggcgacagagcgagattccgtctcaaaaaaaaaaaaaaaaggtgaatgccactttatctggtagaaaatgcaggatgggtcattccatgctgagtgactgacgtgtaaagactgaggcaatgaggtgtaaaatggtgtaggatgctggtgtgatggcagtttcttcagtggggttcgagacaggccataaggtgtagatctaatgtatttgtaaaggtatacaagatgttttctgctgcgtgaggagattgaacttcaatttgtaggactgagagactgaagaattttgatgagggacagaaattgatcagtgtgggaaaggtggagagactgaagacaaaggtattaattataatggaagctgttataatagcctgggagatgatggtaagggcctgacctaaatcgttacagtgggatttagaaggttctcctgtttaggtctgagagataggaagaaggaccaatttcacgctaaggaaagaagggtcagacagaaggaatgatgatgaactccaaggtttgtgctatgcaaactgggggcacggccacaccatccattgttaagagaaacagtagagattttaagaggaagaaaatgagttcgttttggacatgtttaatttgaggttacagtgaaacagatcggaagtatggatcttggacttggctctgatagttgaaacattttatttctctctctcagtggcttaagacttctactttctgtgagggaggggtccaaggaagggagcggggttgaactccttcccctcttcctccgcccaagtaacggtggatcatcacgcacatgcacatgcacctgaagcgctctatgtcccgtcctcctcccatgctttcttagcagcagggagtggttgcccaaagacaggagcttgttggagactccccttttatctgcgacttccagttattctgtcatgtcgttccatcctcggacttgaaaatttgtaaaaattttagctattttcatcttgcctgcttttatggtagctgcttcttcctcccatgttctaccaaaggtgaaatagttcagatactgtctgttcttagaagggtttgacagttcttcggtatttggtttacgtggttgccttctaggaaatgctaaagaaaagtcattatttgggctgtgtgtggtggtttatgcctgtaatcccagcactttgggaggccaaggcaggaggattgcttgagcccaggagtttgagaccagcctggacaacatagtgagaccttgtctttacaaaaaaaaaaaagagagagaaaataaccaggcacagtggtgtgcccctatattcccaattacttggaaggccgaggtgggaggatcacttgagcctgggagatcaaggctgcaatgagccgtgattgcaccactgcactccagtctgggcaacagagcaatactgtctctaatgataataataataataataatagtattaataataataaaagggggggaaagcctcttatggctttctgcaatctaagtgaaagcaatactccttctgtgaatgaatwtttataattaagcactagcaattattttagaatatgatctgaaaggcctacttgtgtatagctgctggcaagtagagtatataaaaagtagtcccccagagatgtcgaggagacaaatacagatatcagtccttaaaagtccacagcacaatgagtgggatatgtatatacagagaaaaaaatatctagaagtaaacataccaaaacgtttcttatctttgggttgttgagttgtaggtgatttatttgttaaaaatatgcaacgtcttggccgggcgccatggctcacgcctgtaatcccagcactttgggaggccgaggcaggcggatcacgaggtcaggagatcgagaccatcttggctaacacggtgaaaccccatctctactaaaaaaatacaaaaaaattagccgggtgtggtagcaggcgcctgtagtcccagttactcgggaggctgaggcaggagaatggcgtgaatccgggaagcggagtttgcagtgagccgagatcgcgccactgcactccagcctgggcgacctgggcgacagagygagactccgtctcaaaaaaataaataaataaaataaaataaatgcaacatctcaaacgataagcctatgtaacttttataattcaaccaccgtcatgtcataataagggaataattatatctgtagggtagaggaaaggaatgtacttgaaatttctctttataagagttaatttcaacttattctgttaacctgtcatgaaacagaatctcaatttcttttcctactggagatatgtctgtcctttacatcaccatttaatatcttgacaatgaagaaaattgtataacctagaaagggctgaatattactgagccctgggacctgggtcaatgatacttgtaatgtgactgtcttctaggaggggcttggcctaacttcttgtgcccactgatagaaggaatcagatctccctaatggcaactttccctttctgttagtgaactgggcactctaagagacgtatttattacttcagagcaggcttttgtatactgagaatgaagacaatttttctgtctccaaaatgcccaatatgatcctggtctaggtaaaaatcacttgctaactatgttctcatgtaagtagctcaagatccaatttcctgtaccccaggaagaatggtaatccaggactgataaccacatccttcaactagagaaactggattctgaagaagtactgtagatwctaaaaatatgttgtggatgtgggcagttgttattaccagaattggctttaaggaacgttgaaaaataggcagaattcagcattattttattctccttttagtagcgttctctcaattttttaccattactcatgccttcttgagaatcaaatggaaaacttaccccctaggtctctttttgtccagacacttaggaaacctcctttctgttgatagttatattggccagatttgttagtcaactaatttgtggaatacactgatgacttgaagtggctaaattattatactgctcaggtatgttctgcaaagtaaagggaatatggctttgattaatggaataaaggtctaatggtagataagtttctgctggggcataggctatccccattatttcttatattaattcatcttttctttgattcaacaaatctttattgcacatcgtttatatactaggtattgttttcagcattgtgctttactttagatggaaaccctattcattggaccaccctagtcattgaacacgatgatcatcgtgaccctgttctgctcaaatcctccgatgtctttccatcatgatgagcgtgaattccagaggtggaatgatccggtcccatttacctctattatcttattttctatctctatccaaccttctccttctacttcagcctcactgacccctttgatgttctctagcacactaagcaagctcacactttggcattctaatatttcctgttatatctatatggaatattctttttacagacatccttggggcttactgcctaattttatgtaggactctgctcaaatgtcacctcaacagagaggtttctcttgatcactctctttccttgcttaattttcttcgtagtgatcaacacctggcatatcacacacacacacacacacacacacgcacacacacacacacacacacacacacgaatataagcttcataaactcaggtgttcctggccataatatacactcagtgaatatgtgtgtttgttgaatgactctgcttcccatggagcgtctacagtgtagtcttcttaatcttgagttcttatcttctccccagcacatgaccaagtaaacagacagaatatcattaccacaccaaaaataataattaaggagattcaatcatatgttccaagtgcttaacacagatactattagtattagatctacacattcctttcccaggaagggccctgttttcaggacatttggccgtcgtgactctggtatggctctgctgttatttttacatggtgttaatgtgttcctgacatatttcagagaccaggcttgtcatttactttgaggggtcccatgaatttctctcttacacttttcaaatgaaatttcagaattgaatcaaatttattgtttcaatcaaaatggatttgaattacagatgtctgatcccttaaaaacagagctaaaaaaagaaagcttccatcaacttcagttcttctttgcttgtctgctacaaaccagaaccaaggactttctatgagaccttaaaaatctttattatgttaaaaaacatcatgcatattaagctaaatgcattctatttgcttatattttaaggtttgtttcatcgaggaagtggtataacccgtgagcaggttgtggatgctttctcaaaatgtgattattgctcataaaagctgttttaattgaaaattttatgccatggaaagcctatagcaatcttagatgcacatacctatatttatatctatagtttatttttaaagattccctatacaacactattttgaaattactaaagggattttccttcctttttgttattcatctgggtaacttaaaaaaatattgctgttatgttcaactgttggcactgttgcaggcaactaaaagcttaagaaaattattccctcgcctgtccccccaaaagccacatctaaaaaggtcacgaaaggaaacacacaattcaaataatctccttgctgtatctgagattaacttgaacgcagatgttttaacttacagtttgatctggcgtaatatatacatttaacaaaatcctgttttgtattgcttctataaacactgacgtttgataaaagtgtattgatttttctgctatttaagagcttttgaaccagtgcttaaagcaggttttcttcaaggcctaaattaactctttcagcctttgactatggtttacatgtagggagttgtgtgtgcattaaaagtatgtgtttgtttatgctggaaatgcattcgaatggcaaaccattttgtggtctgcaatattttactcagtagggataatcattagactttgttcttgatttttttcttaggagtttaaatgattcaacactattcattaccgctcattttggaaccatgctgtaatcatcataggcctagatattatctgaaaagttactgaataggggatttcttctagcactctgggcatttcaatgtggacctcatccttcctcctctctatcctctggtcttttctccagccttaatgtgagggctctcaagaaagtgggaacatccatccagtttaagtctgtcttgctttcaaagttgttctcacactctcttctttgttggccaacattctaacatgtcacaagtttcttttcttactttgtgtgggagcacagagccacacaattgcaagtaggcttctctaagtaaaccgtgtcttcagactaggtaactcctggggaaaaatgtccaaatttaaaatagcaaaagaaatttcaaattgagcaacaccacaacctttgaagctacagaaggttgctgttatgtggaatctcttatgatggcatacaaagaaagactgtaacttatgtaagacactagcttacatgagggcttattagactttgtcattttcaaaagtcttcaaatgaatgattccatttgagtctcaatataacttgggtattttattagatatttccattttgcaaatgatgacatcatatctgagaaaggataagtggtagaggcaagaacctaagttctgcatttcttttcttttaccagccagaaagatcatgtctctctggacataacggagaagcaaaaaatttgattcagtggaaagttagtcaaacggctattttgtgatgctgtaccacatttcttaatttttaaattcatcattcaggtacatagtaagcataacctataaccctgataagaatatttctttatcagtgatacacacacacacatgcacacacacacacacccctcaagaacagggtcaaaaacagatggaaaactccaaactagaaacctataaggttttgtacaaaggactgttaccctaagatctttctcaaacaaaacttatagaaaatgaaaactgtttgagtgattgctataaaaaacagctttcagaagaatgtgctcctcagctcccagagattgcctctttcctgggacagagcttccaaatataaatgggcaccatagtcgtcgttggtggtgacatggcctgtggggagcatggccatgaagcatggcttgtccagacatcttgctggaaaatgacattgtaatgatgctatggctcttgggaaacccaggacatagctcaggtgaagttaatatttattattagaaagatgatggagatgctttacatatttttgaagagattttatttaatttacattttataaaagaaaaatagcttcctttagccaaaagcagttaataagttccttcgtgagaattaggagcaacattgaagctaagagagcagcctccctctaaaggacttgggtttgaatcctggctctgctatttcctagctgtgtgaccttggggaagttcattgtcctttttgagctttggttttctcatctgcaaagcataaataataacacctacctttaaggattgtttcaaaggttgtagataatacatgcgttggcccaaggtaactttttaaaaatgaggtactcaattcatgtgaggaatgggactttggatcattaagagcctcattgcacatatatgctgccaaggacttgtaagtcaattgcttgaaatatgaattaagggggatgagatataggggtcagggattttagatcttaagaagatgaatctaaatgtaggacgtaggtgatcctagggaaacactcaagtctctcctttccatccagtggttaccgaacccttggccaaggcactgctcccctgatcagtaatgtgtgaaatgtcatcctttcgctcagtatctcttcccatgtgtctttgagttatatctacccattttacccaccaaacttacttttattatcttcatcttgatagagccagcacatctccgcaggaactagctgaatctgattctgcttctcacatccctgacaaaactgtcagcttcatttccatcacaaaatcttggtagctcttaagggtgtcagagctcgatgtttcccattccaggttgaattggcacagctggggcaaagaggcacttccttaagacttgtgaagtgagcaacttggactgacagatcattgagaaaatacaaatgtgggtttacatttctactgtaaaataggaattgtctcaatatggaaggattataaaaaaaaaactttgacttaactcattgatagttgagagttacaatataaaaagcaattagactgtcttttccctttgacctgtggtctattctgatgataatcattgcattaaaaaccttttaatcatgttaagccttcgattctgacctaaatgataaagttgatttttttaacttaactgattggaaaaattgttaggcaaaaatttatgcgattattctttcaccaatcatgaagtgtggtatccaaagttgatgatatgtagcttgctaccataaaaaggaaggctgcattagccacattgttataaaatcttgctttcaaagaaaagaaaatgagggtttcaagagaaattactatgttagggaagtagctcagtggtgattgcattatattttcaaaataagaacttttttagttacctgaagttgctactccgttttaagacagacttattttaaacatttttggtggacatattataagcatttttctctttgcttgttagtgagaacatactaaagattaattttcctggaggacacagggttaacatattttttcatttatttattgaactaatatttgctgagtgcccatgcactatcagttactgtataaagggagtcttaaagagagaaggcccagccatgttgagaatggggagaatggagttcccagcagggagaacagcatgagctgtccctgaggtgggaaagcacttggcaagttttgcagaactgaagaacagcgtggttagagcttaatgtgagacaaggagaatggaacaagaagagactggaatgcagttaaatgtggagggactgttaatgtgcatggagcaattgcccttaagttaaacatcaccaggctgctgcacattttctgatatttgatgtatttattttgtgatgtttctgatgtcttttccccagctgcttccttcattgttgttaattctttgactttgcagcaattgtaaaatctaagtctagtggtgtttcctttatttctttctaaaagtcttctgttgggctggagaatcagataaccagcctaattaggattatgtctaaactaagagtaaaacagcgatgagtttgcaacaggtacactcccctctgggcaaaagctttaggctctttttttttttttttttttttttttttcagttggagctttgctctgttgcccaggctggagtggagtggcatgatgttggcttactgcaacctccgcctcctggattcaagcgattctcctgcctcagcctcccgagtagctgagattacaggcacctgccacagtgctataaaagctgtaggcttttataaatgtaccactttctttctgggcctcagtttccttatctgtaaaagcaggttactgatcaaaataccacataaaggccgtttcagtttgtaatttgacttacaataaaagatctttaaaacatattgcattgtattatgctttgcatagctaagcttgcccttgccacattttaattatctgcaagcattaactgctttttaaaataacagcatccccaaagcattaatattgatgaaaataaagtaaaaaattaaagttttgagaattactgtataaatgaaattaatatttgattatagatcacttattctgttacttttttctttgactatgaaatttattgtgagaaagtgtgaactcaagtgcaaattaattttgagttccatgtctaatcatttctaaatttggtaaatgcatgtcattattttcctatttcaaaattttaaattctatactttctgtatacaggagggttacaattgttcatgcacacacaaatatctcttaagggagaagctgttgcttctgttttcatgtcagctacagcatttgacatagtattttgaacaaaataaatgctcaagaaaatgttttttgcatgaacacatcaatgaaaaaaaattcattggcttgaatctgacttaaatatttgctaaatggatcaagcaccaccaccaagctacttttctgtcttcagaaaagcttttatcaggcaccagttgcttaaaactaaagtgtgaatctgtggtattcttaaattctttgggattatgtaggaatgtgtaaaatgatgttcaagtgtctcaggagaaaagggttagtaagcaacacttacatagaaatgaaattgtttcagacagtggtcaacctcagcaaagtatttgcaaaatagcaatcaagtgactgctctcatttgctttgggggtcagaagctgtccacttacctccaaacctcactcctcactaattgcagggatggacgagtggaaggcagggtgttggatgagtgctgacagctgtcccgaatgtggcatcttgtttcctacgggcccaggtctgcttagcattacacagtgcttagcttcgttcaggatgtggtcagtgtttgctgggaggcgtatgagacactggctttccaggaggaaagctcctggaaatttacaccaggcatgcaaatttgagtgtagaaaattgactgtaaaaattcaggggggaaaaagaaaatttgttggtgtggcagcaaggaaaatatttcttttgcctccccaaagaaaaagaaattccgcagggcttagagtttgtatttgaaaagagataaattcattcctagaaatattttggtatcactggctctcaggtggctcgtgttccattcattggyggtcagagctttctgggatctaaggaaggagaggtgaggagttggaggggaggatcttacatgtaaggggagcacgtgcggtgtgatataacaatccctgagccccccagcaagtagtgaaaattatgtattagattaatctgtgtctaactttaatggggattatcttcagtttaaaaagcaaaggtagaaagaagcgtttggggtaaatccttcacgcctctggaataaatttatgattttaatctcatattatcctaatgtttaaagtattaactttttcttaggaataagcagctaaattgatggtacctcgggtcgctgctggctttcaatttcagggatgctgtgatgaacgaagaatgaggggtgtgtccgataaaaacttgggcctatctccttatttccaaatcaaatggtgtcattggtagcatccattgtggcatcaaacttctgtgaaagaagagaagacaggatatacacgcggaggcatgtgattcatcttgacgtcatctgtcctctgcgttatttggagagtgggctgagaaaccccgggactgaagacatagggtagagtaacaaaaatgcaccccccacaatgtctaaacacaaatgttcactttttgtttaagtgaacttgagctgtgacctctcaaaactgcttactcagcctttcttaataccagagcaacttaaaaacgaatcccatcttctaccaaaactgctttaggaagcagctcctctgggcccctggctttgacaggattcattctgaaatggtcctgtatcatccaaccaatacagcaaatctgttacttttagaacagaagaatccgacaggattttccagaggccagctgtggatctttagattgtcgtcatgttactcagaacagaacaactgtttgaatcaaagccaaagatgtccttgaatcatttagtatcagggcactaatgagctctgcagacatttcaaattccttttccttcccatccctccctccccatccaccttacccaggtgtgacttaatccagtctatttttcccctaagtaataagctgtaacacacatacgctcatgcacatacacacatccatacatacatatagacataagatttataggtgtataatctgttttgtatggtgaagtgaggtttcaaaacagtgatttttcaaaagcagcagcagattcttcactggtctcttttaattaatagatatgtagaagtagagctttgattttcattgtgtcctacggttttgagaaatggcagatgccttaatgatctgctaagccaactctgagtttttggagatgagaaaactgaggctcagagtttgaggagatttgtccaagatcccccaggtagcatctggtagagctggacttgagcaggttgttgacttcctggctctctttcctctatagcacacaatttgagagccttattcatgtttcttactttctccattttcttctgcttaaaactgcctgttttaaatgggcaagttttattcacctatgatgtttctttttcttgtttttcatggcaaattgatgaaactgtgttattctgaagtcatatgttatatgagcacacataatgtcagtctggtatgctcactgttccctgccccctaccccactacatctgtgtgacgaattccgcttataaccagggctcaagtcctctgtgagtctctgtgcaaagcaaaactttccctggatactcacctcccctcactcttggcagctgctcctctctctactccagcaagcctttgtatatggaagcatgagcattcctacattctattgtatttatttattcattcacttatctcttttttatccccagttctccaatatagcaaatgaaactccttataaaacaaacccctacataacttaagactgttttaacctttatttccaatttcatttctgaagatatattatgtcatcctgaaggtgggcctgttagttttgttgttgtttgttttgttgttgttgttgtttgagccagggtcttgctctgttgcccaggctggagtgcagtggtgtgatcttggctcactgcaaactgtgcctccccagttcaagagattctcttgcctcagcctctcgagtagctgggattgcaagcacacgccaccacacgctgctaatttctgtatttttagtagagacagggtttcaccatgttagccaggctggtctcgamctcgtgacctcaggcgatccgcctgccttgacctcccaaagtattgggattacaggcgtgagccaccgtgcccggctgggcctgttagtttaatcttccaaaagattatgaatcagcttcctactttttaaccgatatttattgagcatcaagtactatgttacaaataaccgtaggacttgcttctgtggacatcatgccacgaaatcttcacaacaatcctggagagttaggttggcctaactgatgtatagatacagaaacagcagaaagagggcacatcttttctaaagtctgctgagtggctaaatctgagattcaaactcaaccatttgaaccagtgtttaagatctccacccctccatcgcactgcctctgcatccctccttaactcattaagcagatttttttcagtatgcctatacttcaacaagatagaagcaggatggtgggcaggagggtggcgggggtgggggtggagatgggtgaagttttggagtaaattcttcggatcgtctgcctcaaacatacccctccaaaagtcatcactaccaatatgaaagtttaaagtgttatactttttaaagaagaggacttaggccccttcagctctctgttattgttgccttatcttctgtttatcacttctctgatttaatttcttaccaacgttatttaaaaaacaacaacaacaacaacaaaaaactaaccaccgaaagatagttcctaattatcccaggatagtgacgtagggatggcatattcaaattactacttgattcaaaatatggaagaagttgatgcctagtagcttcctcccaccaaatttttgtcagaacttctatttaacagcaaacatatgttgcatctacttccccccaccccacatcttttaatctcagaagtcctattggttcattaagtggcagtatttaaatgggaaaaaaaaaaaagctaaaaatgtcttaggtttccatcacttgtacctgaagagttaagagttatctgaggctgggtgtggtggctcatgcctgtaatcccagcactttgggaggctgaggcgggtgaatcacctgaggtcaggagttcgagaccagcctggccaacatagtgaaaccctgtctctactcaaaatacagaattagccgggtgtggtggcacatgcctgtaatcccagctactcaacaggctgaggcaggagaattgcttgaaccaggagggggaggttgcagtgagccgagattgtgccactgcactccagcctgagtgacagagtgagacactgtctcaaaaaaaaaaaaaaaaaagaaaaagaaagagttgtatgtaactgtgtaatgtttctcccatgttgtaaaaactagacagtatcactgagttgcgactgtcagtcctttataattcaccgttgctcatgtttgcatctatcagttagtactgaaaagtaaaaggcaggccctttcatttacataaaataaaaaataagacgcatgaaactttttagctttttgaataacttagctctagtggcagagcaggaatgtgtttaaaagaattaaaagtgatgagaagtgtttatctgttgatagaacagcagcagcctgaagattgaccctgcctgcagctttgaactgtttgattactatttgtcttctcccctgcagctatcaaacaagggaagcaggttttgaaggggcaacagtgaaagaagaaagggaaaaaggtctgccctcaccagaggaaaatgtttcttccatatggtttgcttagaagctattttgtctcaccaaaaggataaaaagtctctcccatgcgttgagagcagggaacatgtgagtcagggaaatcgagggctcttggagacctaagtgttactgcagacttacgcatgtgaaagttagtacaagggcatagggcatggctgttcacaatttagctactggtcagtgttgtccatctggtaaacccgaccagaggcaagagttgccgggattgtctttgatttgtataggcaacagcttggctgagttttattagagccattgttttcaaatatttttcttatcatctgaactctttcatcaaataaaatatcaatatatgaaacagagagtagcagagttgctctggttgtagtaggggagaaggcctggtccctgcctcctatgctttcaccttccctctaatagcagatgctcaagcatcagatttcccccaggaaataactcagaaaccaaacaaggaaaggtgattggtgagatcccttatcatcctattgtcctggggccaaggagagtgatgcttacaccagtggttcttaaagtgtagcccagactggaagcatcaggattacctggaaacttgttagacatacaaattcagaatccagatctcttaggtggagcccagcaactgtgttttaataagacctgtatgtcaagaccaccagggtttgagaaccattactagagcagcatttccgattttaagctttctcagattcattgcgtagctggatcctcagagaggcaggtaccacttgcaaggatgttaatacaggaagcacctgtaagagaaaatgagacaggagctggaaaagactgagagctgctaaaactcatgcatgtctactctgagtggaggagagagggaaggaagattgggtggaagcatcccaagacattagttctaatatctgggtatcttgtaattggtctccattatttgtcatttctcttgcaaatctcgtattttcctggattttttttttttatggcatgttgggggcagttgagtaaattcagtaaatgttttctagtcatgaatgatctcttgtagagactctgtattttgatatactcccctgaatagtgctgtttttaaaaaatagtcacttaattttgctgaactcaaactgtaaactctctatctcacacctcaaatcttgggttagttctcattagctttagctgtcagtgctatatgcacatcacaggggtcagccacagttggaacaaagtttatagactctgcattttgggctccctcctttctggaatttccccttcgctttccagtatactttttttttaaactgtaagtggttttcttttggcatcatattatcaaggtactctattctaaggagtttcacagcagtttgagccttaagctgatttcttttgcttttgattgtttaaaaactataaacatttgttttattgcttgagcaaaatatgcctttctactggcttatacattcataaaatcaagactttaatattcatcctgtttagacattatcaacatatatttcctgatgagtcaattgatttattcattaattcttcaaaccattgcccccttctctgtctacactgtagacatagatttctccattactctaacacattggttctcaaaccttagtttacatcaaaatcatgtagaggggctgtaataacacagattgcggggcctcaccccagcgtttctgatgccgtaggaccattctttgagaatgacttgtctaaccctggtgacaaattatcatttgccagagacagccccagtttttgcactgaaatttccatgtccctgaaaatcccttagtcctgggaaaaccaggaagactggtcactttgtctaacacacttggcagtacattgaaaactcctgagtacttttcgaaaatactgttgcttcccactcctcactcttcttggccccacctccaccccttgccttctatttaatgggtttggggtgtggtatgggtatctggatgtttaaaagctgtctaggtgattacaattagaggtttgtcaaccactgctctaatcacaagcctcacccctcattggaagagtttggtactagctattccttcacctggaacatttttcctcttcagtggttctgtcctgattattagcatcagctggggaacatttagaaaataccaatgctcaggccccacctcccaaacccagcaaaatgagtctctgagaatatagccaaggcattggtagtcttcaactcaggcgattctcttaggcactcaagaatgggaagtcttgtgatcttctcatagctagctccagtcatgcaataaaaaagacctatcattcctatccatgccatttaaattcacccccacctgctttccctgatacttgtcagtttctgatattttctttttcatttaattctgtttattttttcctttcccaaatagaatgtgaactccatgaaagcaagagctttgtcttatttatcacagtattaccagttctcagaagtgtctagaacatgtaagcacccaataaatgttaattcatgcctgcaatgtattgagtaccgtgcttggctccagggacagtacaataatgaacaacaacaataatgacaacaacagacaaaatagtaatcctttctgacctcatagagcttgctgtctagtggactacttctttttttttttaaataactttttgtgatctgccattagaacctcagaaaagtaaatggtgaaatcaatcgaggggacacatttcaccacttgaagaccgccactgacacctcaccttttcatgcagttaccagcatcatgtttccatggttaaatgaacttagtgatctatagaaactgaagtaacatttcaaccctgccttatgacaacctgagccatggtttctgggctttgtgaatttcttctgttttcactggcaacttggggccattgaaaagctgggagacaatgcagctttcacccccacacgtcaggcccacgatggaatccccctggtggtccaaggacagagctgagtcttcctgctgtggttgggttgcaggaaatactctgcagtctttcatttcagccagacagacacatgaaaggacccaggaacacagagaaaacatgtaaacaagtcacatctatttttatggaaacagacataaatggtgtgggggtgtcgtagcacgtgggtgtctagattccagagggctttagtcaggagacagtgtaatgctcaaagcagaaatttaaatgaaggaggaactttgttggacaggtcaggactggagcatttcaggccacgtgaatgacattgcagagtcttgaggaccttagctgacatacccaatgtgaggccaaagcacataatccctgtactgttcttaaggagtcccacctggagcagagtaggatggtttagggattaggtagagtcagcatttcttcctcttgcctttcctcctgaaataattcacctatcaggtcaggtttattctaagattaaagagataactgtaaagtaacttatccagtgatatgaaacaatctgcattgccaaatagacactgtgaggaaagaaaccttaacttttgcctagatatctagttttattatgtctctaatgattaagtcactggaaatgtttcatctagagctttgtttttgcaatgcaaaattataaagagaaatccattacgtgagtgaaacatgagcgtgaacaaggtatatttttcaacatacaatacacagaatatgcacatagtatataatactgtgtgtatatagtacatatatatcatacatacatttatctatctcttgatcaattagtctatctctttcatatgaaatgatagtttgctgaaaggtagagwccattctataatacttagaaaatatatttaaaatatgtcctattagcatttaaactatttgtgttattcgtgaaggaggtttaagaacagtgctagaagacttgtagcttgcttaggtataacatctacctagctgtattgtcttttgaattgctttcattttatcacacatatttaacattgcatctcccaaaacccaggccatcctgtgaaaagtcaaaccataacttcagaatatcccaggtggtgtatttggccttgcctcagtaagaaattagaccatcatgacttcacaaagcagaggcattgtggtgggtaaaaagaaaggcacaggacatttcttgattaatatgtgcagtcatgtgccatgtatgatgttttggtcaatgacagaccacatggacggtggttctatgagattacaactaagtttttactgtacttttttatgtttagatacacaaataccattttgttacaattgcctaccgtattcagtacagtgacatgtataggtttgtagcctaagaacaggctataccatatagcctaggtgtatagtaggctatgtcatctattaatagatttgtgtaagtgcagtctatgatgtttgcaaaatgatgaaatgcctaacaacgcatttttcagaaagaattcctgttgttaagcaacacatgactgtaattgtagattagtgtgaagatgcactagcaagacattatgacactgtattttacttcattaagcagtaaaaatccctgttgtgtgcttcgctgtttatttaatcattaattcgatacatatttattgagtgtgtattatgtaccaggtactgtgataggcactgggtataatggttaaaataaaatttaagaaaaacagtttacaattaacttgtggaggtaggaaattaaaaactctataattgcaggtatggttatacaagaatgaaaatggtactatgagacactgatgtgaggaacataatttagatgaggaaatatgacacctaagtgacatgtaagccaggaggtagttagccagctaaggagtactttccatttcagggtttccagaaaatctgcaaacttgacataccttgatttactttcaaaactaaaggcagaagaggtacagtaacttgttgttctagtttttattgttttcttggggaaagatgtggaaattaatttttccctaaaatacattaatcatgaaggaagccacatggcgtaattgtggagggttactttatttttctttcaagattgtgattttgtcatgcatatttaacaccttatcttccaaatgatgtgtgtatatttttcccctgatatctatcaaagaccatttgcagaggaaataaaaaataggaacacccataggctagaatatttaaataatttctgcaagatgtagtacaaatagtgcctaatttatggaggctctgctcattttgccatttacagccgggaaagaaaagtccacctggaaagtgaccagagagaatctcgaggagtccaagtcacttctttatttgtaaaaactggcctaagaaattaaatagaagagactattgggcacagaaataaatgtccctgctcctgcatgactaatctgaggaaataaaacagagaaaggaaacataaaataaaacaaggaaggaaatatataatctttcttctttccactttggtactgaaagtattgaacagggacatgcacaatctcacccagaacttactgtaaattacagttctggacaaacagacatcgctctctataacaataataaggaaaagtcaccgagagagattactttcagaaacaataaagaaatacaaaaccattccattttctataaggtcatcacagattacaagctaaaatagagtctgaatgtggagtccatccccttcaaaatggtgttacttgcagtacggtgaagtgcatattttgttggtataatctgtacgtgatttcctaactgagggcatattaacaaattgtgtactggttttagtgtctctcaacaatgagatatttgaattccattattatttcacaggcagaactgaaatgagtcaatattttgccactacactattataattgaggcacagggtcttgagttgaatatttttcattaataaaagtcccataaacataattcataatttgggtatttgataatcttctatttgtagacactatttttacctgtactgaaggtaagcttgtggcccaaacttggaaatggagttcctttcttcgtatgctggagcagaagtcctcctcatcctctgttaattgcagcttcaaacatcctcatcattaggttgctggtgcagagcaagtgctctggcgtcgataacttcagctttctctaatgactttgcttcaacttcctcatctatacattaaggaaactcttcgtagcttcctcattgggtgggcccttaactccatggccgtcacagagcacatagtcagtatatattagctctgtatccaaaaagtttagaaaagtggtttaataatgtcaatacagggcattttctataatagtaatgctggtattattagtatatcctaaatattgtcatttattttcataagcaattttggatcagttgtgttttatgtataagtaaacatttcttaaaaattaaatcagcgtaatagcaaaaactgactgtgaaaatacagaacacaaaaactagcagctcaataatttgccttgcaacacagtacccttaaataacaactagctggtattggaagctagttgatttcattttgaaatcaacaaatgaattgaatggggtggtacatccgtaaaggaaaatatactttaaagtatttaaactcaagtaaagagcaaaggtgagaaaacagcctttgaaatcctgtcataaggcaatataaaagtcagaatcttcattgttaatttcaagtgattgaagttttttcttgagtatagagggagatagatttttcaattttttttttcaattttagaaactcttctttcctgtatggattgatctttccttggcttttctaatgaatacttttagtgttatacctttatcctaaagtgatcattgaaaatcacatatcctttccgttggtagtttaaatatgtcttccctggaattgtatgatgatatttagtgtcattgagtcaattattttaccttcacatccagacaattacatttaaaatgaattcttaaacattcagaattgaaaagaaggtttccacattaaaccaatggctcttttggcatctactacatgccttaatttttaccacatatgcataaattggcaaagtatcttatgggttataataatcctgatggcttggaattaatatattgccatcatakagcaagtcctgagcccatctactctgaatstttggataaagacaaaactccatcctgccatgcacctggtcagttgtgcaatgctgaccaatacacagctgctaacaataagggtattgtgcttatgtaacccagttcaggatctgatggttagtctctcgatacatgctgaaacacgagggaatttttacttgccaggatgcctgcttcatggaaaatattgtgtytatgttgaagcatacacttacatctctctatataagttggtggagttgaattctaccagattaccttagctttccaagtcagttcagggttaaggctctctcagtcaagaaaaggtcatacagtgtggcgtcgaatgtaattttaggaattgttttttgagcacttgttttatcaagttaacaaaagtctgtattatgtttcttctcattgatgtgggtgtgtccttgtgtgtgtattattcgagagaggcttccatttgttgagtgatcttcatgcaaacatcttggagtgctttacaaaagaattttaaaaatcaaaccaaacaggatatgaaactgtgctgccaaacaagtaagtctttaggcatgatttaaatttagttaatgacataaagagctaaatctgtgaaaggaagaaagttccttggatcagaaaaaaagcagaaaacagatactcatattttgtctaagtcttcatttgagtagctccaaaaatgttcttttagaagtgaagttggaaaatcccaggctaagtgaactccaaggagcagtgttttaggggaaaagaccagataatagttcccatgtgcatagtgatctacagattgcaaagtgttttcccagccattatctcatttgaccatcacaacactccatcaaagtaattaaggacagtgttaccccagtttacagatgaataaactgatgacaggagaaactaaggaattaaatgaggtgatagagctagatggtgatagagctgggattggcatatggatattgttccaaatcccatgttgtatatacagtaacataaggctccactgtggcgaactatttacactggatacttttctcctgccattatagctgccttgggagtgatagtaatgactctgacttcccagggtatcttaacattctgcttcctctcaggaggatctcctgacattcttgtgtaaatggaaaagtagaaaaccaggatcttctaaggcaagtgcattgtaaatgataatttcatgccttaatcttttcaaaacatttaaactggctttgatgattcacctttaaactcacccttcaatagttctcagaatcctccttgagaagatgaaattggaatgatcccatcagctctggcagttgtaggtggattctaatggtaagggactgtagtggggaaaatggsgaattcttaatgagctccctttctattgctgacttgaaccaaatgtagttatccttgaacgtttgaggattctataagcattgtggtttcagacagtgagtcataaccttgtgccagaggggtgggtgatatagtatctggattgattcatgagacatatagtggctttttaaggtatattctgaaatgagtcttccagcagtcaggtttcgttgttgtcgtctttgttttgccttcttctctgaaaacacaattattttctcattcaaggtttggactttaaaagcttactttttccttgagacacctttagcttgagacaaatctaggaagaacatygttttgtgattctgtagatcttttgacaaagtggatcctcctgcttcagcctccctgacaattactttattttttgtagaggcgagatcttgatatgtttccctggctggtgttgaactcttaggctcaacccatcttaccccacttggcctcctaaagtgttgggatttcaggcgtgagccaccacacatgcctctaaacttttttgttttgttttttgagacgggatctcactctggcaccccggctagagtgtattggtgtgattatatctcactgtggtcccgacctcccaggttctggtgattctcttacctcagcctctcaagtacctgggattacaggtgtgcaccaccacacctggctgatttttgtattttttgtagagatgagggttttgtcacgttgcccaggctggtcttgaactcctgggctcaagcaatccatctgtcttggcctccaatgtgctagggttacaggtgagagccactgtgcctggccaacttctaaatttcaatgacttattattttttttcttttacctgccagaccttggtaatcatttcttcttttaaatttttttaatataattgtccaggtggttcaagatcccctaaaagatgctgtatcattgcttaaggtagaatgtcttgcacagaataggagctcagtcgatgtctgctaattattagtttttcctgttctatatagaattatatagttttaagtgttaggcaatgtttttaacttagaacttaaaatggaaatcactatgatgattaaaatattctatatcctcattgcccaatatggcagccactagccgttttgcttgagcacttgaagtgtggcttctgtgactgaggaactggatttaaattttatttaactgtaattaatttaaatgtataaagccacatgtaagtagtggctgccagactggatgatgcatgctctaagaatgtgcagaatggcaatctaaatgtgaactgtgagttagagaagtcctcctggaggaagaggaacttgggtcttgcagaagggaagcagagagaaggggtgaggtgttttaagtaaggaatatagtaaaagctctgaggtgattgacagtgttaaatttgggattagtttcaagactggaagtagagcagagtttgagcactagggacagtagtaataataacagcagacacttaccaatttacaggccacatactagtttaatcttcacaacaatactctaactcgaagaatataagtaatttgctcaaaggtacaagttgatattggacctgagattggaactcatatctgtctagctcaaaaacctaagcttttaaccacaatactgtgctgccttatgatctgccatgtttagaaagacttacaagtaggaaatagcctaaatgtcttttaactggtaaatgagtaaacaaataatggaatacatccaatcaatggaataccacttacaaatttgaaaagtaacagaactacagatatatgtaacaacatggatgaatcacaaatgtattatgctaagtgaaagaagccagaggtgaagagctatatactgtatattccatttgtatgacgttctagaaatggcaaaattatagagacagaaaacaggctcaggagttgccaggagctggcagtgaaaggcagggattaactataaagagacacaacagattttttgggggacatgatgaaaatagtgtgtatcttgatggtagtagtggttacatgactatacatttgtcaaaactcagagaactgtgaacaaaaaggggtgaattttactgtatataaattgcacatcagtaaagttgaatgataaacaaagacagacttacaagtagatccaagtttattttctcaatatgttaagttattgtaaccaggctattttgaaaaataaataattctaaaattcttgtgtctaaacatgtcttcatatttatgatagatatataaatatatacaacacatataatagaaaaatgatgtagaaattaaaaattcataaaagtgatgtgtgtgtgtacctaaagcagttaaatttgcatttaacatgagttgacacattaaatgtttattcaatttagtgtttatttgtcattgccatggcaaagcagttggaggtgaaagaggaagtgatgttttaattaacatgattggtaagatgtcatatgacttatcccattttccttttattgtgtttaaatgaaaatagctaccatatgaaatcatcaatccttttaaagcttgctttaaaatttttcaatacataatggaattttcattttcactcatatttcacttmtataaatcacttgtatgagacaacagtaaaatggatatcttttaaacagatatatttatatcctccttttatatttctttttcttctttctttctgttttttttttttttttccagacagagtctcactctgccgcctaaactggagtgcagtggtgcaatcacagctcatggcaacctccgcctcccaggctcaggcgattctcctgcctcagccttctgagtagctggaattacaggcgtgtgccaccatgcccggctaatttttgtatttttagtagagacagggtttcaccaattggccaggctggtctcaaactcctgacctcaagtgatctgcccgcctcggcctcccaaagtgctgagattacaggtgtgagtcactgcgcccagccctccttttgtatttctaagaaaattctctttttttttttttaattatacttttaagttttagggtacatgtgcacattgtgcaggttagttacatatgtatacatgtgccatgctggtgcgctgcatgcraaataaacttcctgaaggtcttatatcactctgtgttcactagttttgttatgtattcataaaactatagattagtataatttttaggcagagaggacctcaaagtattaactctcctggtccattatctacaggaggtaaggggttatctgtgttttataattgaagaggtgacatacagaattctaactttcccatggtcacatttctaacgattagagttttaggtttcaagagtgattaatcttaataaagaactataaacaatattaattaatgattatgatttaagcatttcatttgattctttgctttaagcatttctctaggttcaaggtttaataccatcatatttaataatactgcaataatcctggttaatcttaaaatagtgtcactagggaacatgtaaattacaggatatgttattctttgaatgaatttcatctactattgtggaatttgaggtaatgaatctgaaaacagtttgaaggctataaagcacttaacaaatgttatttttttcttctttgtttttatctgtcatttgcttgccattttccttagaatctggagtaatatgcatacatttgcagagaaaactcatatctgatatttttgcttgctaggaaataattctgttttgtacaaataaatatataattatacatcaacatgtagcacattttcaaagtatgatctaattaaaataatctaaataaaattttttctaaactgatacaaaaccagtaattggtgtcatagcagcttgtcactctgtttagtaatcttgtagtattgtttaaatatgtacatatatgtgtgtgtgtgtgtgtgcttgtgtgtgtatccttaagactgtgagccaagacaatattttcttatgtacctcctttttcttcttataattccactttaaaatattatctttatctattttctgctactttaacaatgcatgagactgggtaatttataaagaacagaaatttattctctcagagtctggaggctgagaagtcaaagattaaggcaccagcatcttagggccagtttctctgcttccaagatgctgccttgatcagccttccaagatgctccctgccattctagagggtaggaatgccaagtcctcacatggtaaaggaccagaagagagcaaacggattccagaagccctttttatagtggctttaatccattaatgaaggcagagccctcaatatgtaaacacatcccattaggccccacctcccaatgttgttgcattggtgattaaattaaatttccagcacattaattttggggaacacattcaggccataacagatatatagggagagcaaaagtagacataagtaaggccagataatttactcttaattgtgttatagtaatgttaatatctccataaatatatttcttaagttagtgaaaacttaaaccaaataacaaaatggtaaatttgttaatgttacatgcattttagatcctctaatgtatttcaggcattttggatatatkcttttgatctttgctcatttctaactacaaggaatgcctcatttcattgtacttcacttaattacagtgtgcagatattgcttttttaacacattgaagttttgtggcagccttgtgttgagcaaatctactggtgccaatgtttgaacatatgctcactttgtgtctctgtgtcacgttttggtatttctcccaatatttcaaactttgtcatcattagtatatctgttatggtgatttgtgtttagtgatttttgatgttactgtagtaattattctgaggcactatgaactgcactcctagaagatgccgaacttaataaatatgtgttctgacagctctagtgatcagctgttccccatctctctccctctcattgggccttcctatttcctgaaagacgataatattaatatttggttaattaataaccctatattggccttgaagtgttcaagtgaaaggaatagccacacatttttcattttaaatcaaaagctagaaatgattgagcttagtgaacaaagcatgtagaaagccagtatgggccaaaacataggccttttatgccaaacagccaaattgtgaatgtaaaggaaggaagtaaaggaaagaagccatcttcataacataaaagtgcaaaatgaagtagcaggtgctgatgtagaagctgcagcaagttatccagaagatctagctaagataattgatgaaggtagctacactaaacaacagattattacggtattcaaagtagccttctgttggaagaagatatcatctggactgtcaaagctagagagaagtcagttcctggcttcaaagctcaaaggacaggctgactcctttgtcggggctaatgtagctggttactttaaggtggagccaatgctccttgacaattctgcaaatcttagggcccttaggaattatgtcaaatctaccttgcctgtgctccgtacatggaacaacaaagcctggattacactgcgtctgtttacagcatggtttactgaatattttaagaccactgtcgagacctagtgctcagaaaaaaaaattattttaaaatattatttctcattgacaatgtacctcattacccaagagcgctgatggagatgtgtagggaaattaatattgctttcatgcctactgacacagcatccattgtgcagcccatggatcaaggagcaatttttatacatttcataaggttgtggctgccataaatagtgattcctccgatggatctgggcaaaagaaattaaaaaccttctggaaaggattcaccattctatatgccattaagaacattcgtgattcataggaggaggttgaaataccaatattaatcagggtttggaataatttgataccagcatgcatggatgactttgaggggctcaagacctcagtagaggaagtaactgcagatgtggtggaaataacagaggattaaaattagaagtggagcctgaagatgtcactgaatttctgcaatcttatggtcaaacgtgaatggatgagaagttgcttcttatggatgagcaaagaaagcaatttattgagatggaatctattcctggtgaagatcctgtgaacattactgaatcgacagcaaaggatttaaaatatttcataaatttagttaatagagcagtggcaaaatttgagggaattgaygccaattttgaaaattctactgtgggtaaaatgctatcaaatagtatcgcatgtaacagagaaatcttttgtgaaaggaagagtcaatcaatgcagtaaacttcattgttctcttatttgaggaaattgccacagccactccaattttcagcagccaccgctttgatcagtcagcagccatcaacatcaaggcaagaccctccaccagtaaaaaggttatgatgtgctgatggaacagatgatwgttagcattttttagcaataaaatatttttaaattaagatgtattttttagacgtaatgctattgcacacttaataatgttcaatatagtgtaaacataactattatatgcactggaaaccacaaaattcatgtgacttattttattttgatattcactttattacaatacttgctttattgtgatatttgctttttttgcaatggtctgagccaaacttgtaatatctccaaggtatgcctatatttcttggcacaaaatatagaaaaactttgcaaaaagacagaatttttttactgtagaaagtgtcamatttacattagaagacaaatgtatggtaatattaaacaacaggtttaaatatgagttgaaatgttggcttagattctctctaagatcactttcaccctcaggaattgctaatcatcataattatgggcygtccaatttagctattgttaactgaggtcccataggatagggatgaggtcccattgtctctcttattattttgtggcagagattcaaataaaataatggtgactgctgctcctggatttgcagaccataagatgaggcatccttagagcactggttgtttgtctggaagagacatccatcctctccggttgactgtctgggtctgcacgccctgagcagagggattgtgggtagagagcatgcagggaagggctagaggaatgatgaaggtgaataaaggaggttggaaacttcgtatactataaattgcaagattgctaatctagggacatgcatatggaatggaggactgtgtgatatttggagaatgtgtagtaaacttagaagtaaagtagtgccaggggctttctgatttgtttttagattccgtatttgggttctgctgaggaggtgcttaccctgagccaggcaacattttgaatatggttttgactgagatattttgatgtgtaccaaaacaaaaaaagaggtagtagcaagtctatgttttgttttgtttccccatgatcaaggaggtaaagagagatcttcatcccattgctgtttcccatctctaggtcttgggtatggtccctagaggtcagggatatcagttgtacacatttatcagtgataaatagtaatttttacattttgacactttgcatcaaaaggctgtctaaagaactaagtgaaatatcctgtttagaattaagggcacaagtaagtgccaggtgatcgaaccagaccagggcctaggagaaaagcatagctttgggtcagattctgagcggctggtaggacacaaaggggaagaagtcaatgattatgaaggatatggccaggtaagaaggtggaggccagtaaaacttaagagttcagagtcacagaggctgacttcgccttggaatccagagcaggggaggagctgaacacccagctctgtccttggcctagagcccgtgggattctagtgggaacccctctcccttttctactggtttaacaatttctctccgttgcctccccaaacccacaccatcccacatgcccagcaaccagtgccagagaggtaggcatggtcaaaccgtattatccttggttggtgattttaggggcagtagatggattttgttggcaactagaaaatgggcattggcaaaggacaatgtacaattgttgccttcaagagtggcctgagtgtttcatgaataagaaagtttgagaacactctaataaaacagtaataaagagtgtcaaagaagatttttgagttaaaatatatcagtatgggccaggcatggtggcttatgcctgtaatcccagcactttgggaggccgaggagggcagataatttgaggtcagaaatttgagaatagcctggccaacgtggtgaaactcatctctactaaaaatacaaaaattagtcagtgcagtggtacactcctgtaatcccagctacttgggaggctgaggcaggagaatcacttgagcctgggacgtggaggttgcagtgagctgagattgcgtcactgcactccagcctgggtgacagactgagactctgtctcacaaacaacaacaacaacaaaatctcactatgattttccagataaaatatgatgtaattcacaatagcaaagacttggaaccaacccaaatgtccaacaatgatagactggattaagaaaatgtggcacatatacaccatggaatactatgcagccataaaaaaggatgagttcatgtcctttgtagggacatggatgaaactggaaatcatcattctcagtaaactatcgcaagaacaaaaaaccaaacaccgcatattctcagtcataggtgggaattgaacaatgagatcacatggacacaggaaggggaatatcacactctggggactgtggtggggtgcggggagaggggagggatagcattgggagagatccctaatgctagatgacgagttagtgggtgcagcgcaccagcatggcacatgtatacatatgtaactaacctgcacaatgtgcacatgtaccctaaaacttaaagtataaaaaaaaaaaaagtaaaaaaaaaaaaatatgatgtaaaatcccaatatattatctgttctacccaagtcatctctaccataattatgaaatgtgatcgcccttccttttcatatccagttattatgacaggaacctccacttgccaagttgctaggaatttgcccatttcaacatgctctcaaatgatttaattagctcacttgggcaagttaattaacctccctatgcctcaattttctcctctataaaatgaggagtctgagtcaaactatggccccagatttacctgtgaatctcttaccatgaacttcttccaggattatgcacagtgagaacagctggggacacccctcctctcttcacaggattttagtcaggtcctgtgtggcacyaacaagacaataaagaagtaggacatcattggtgaatttcccaaatcccacatttatgcatggtcaatgtaaaacagaacacagtgcagctgctttggttgaagtagggagagaaactcaaagccccatctgctcggcttccctgctcaccttaacccttcaagccactctgctacgtttagaatgaagatgagatcctcaaagcatcatttctataatagttyaggagaagtttatgggcaaagtctccttttttctgtcatgaatgaatcattttactttagggtagccattggccctgaatatgaaaaaagaggttgcataagacatcagaaaaaaaataattctctgtatatttaatattctaagtaagaaaccaaaaaatttaaaaattaccctgtgctaggtgcttcaaaatatattatgtttatactatccgccacaactctgtgaaaaactattgtcctccatattatagttgatgaaaatgccccccacttcctcggcagaagtgaaatagtttgaccgaggtcataatgctcttaagtgatggatttgtatgatgctgaaggccacattctttccattcccttcttcccatttgtggagccttcaggaagtgtattgtgcttctttaatttttgttgtaatatatcatgattcattattgccgtgagcagagaagagagtcgaatagagtcagtgaaagttgaaaagcattgcatacaaagttgggagcatttaattgacacgttgtcattgataaaactgacatcaccttagaggcagaggacaagtcctcacattgtttctgggacaggggcatggaaaaagagaagctttcactaactccctttatgttgtgtatctcaatggctactaaatacacctctctcctttcttttttcttttctttttcatgccacaaaaaaaaaaaaagtacggtaaatttttaggaactagttacagttataactagttacaccactcccatcttcaaaatcatttagctgtcccaactcattaaaggtcaaatgtggtaaccagaatatggagatgatctttgctaacaaaggttcagactctttacactgtgagctggattggatttagattttgtatcagtggttgacagcctatgatcttaagtttagtagcttaagcaatttatattcatcaaagttactggtaccttttccctctgcagctgatggaaaacatgtcctatttaattggaaggaaaagcatcttaaaataacactgaatcttggacatgttgaagaacaaatagtttcatttccatgtagtgcgaaatcctcattttattcgggacatggctgacatgtttataagctaagtttcttttcaaactagagaatcccacagatgtctcatctgggaggacttatgagctgtgtgacttactttattgttattgttaataataaaacaaactgttcaatttagaaaccatttcttatccttttcattgctttttacacatttcctttatagttataaaaggattctttgtattttaatagtttattcattcattccaataaaaatagctaaaaaataaaattacaataggcactgggagtacatcatgtccttggaaaccatattggtactaccgatattaaaaggaccagacagccacagataaaattctgccaccgctttcctgaatgtatagaggtcactttggtaacattgaatattactgctgcaatgtaaattttcatttaggaaatgggatcctttaaacatgcacaaattatttcaagttgaatacctaggaagtcaaaggagaacttaaggtcctatcaactacccaagaaaatatgactcttctcctccatgaatgggccacacactatgtggcaggtttggctttatatatctttggaaacttggacatgtgtttcattgaacactgggggtctggtagatgtggatggatggagatcttctttcagctaatatatgaagtgttaaagtttacatttgcctcttgtattcgttgccttcctgtcacttgtcttccctattacctccttttaagggctcttatactggtgcattgaacagactagtgacagtcttggtaatttttgtactatgcacatttattcctgtattaacacaatctattatttagaatcaagtgatttctgtaactagtagcaagcagattagaagatccatgagatcaagtatcatgtatcttcccccttaatcgctgtattaccaatgcaacctagtggctgcatccagtggatgcgaaatgactatttgataattgaatgaaatcatgttgtctatttctgggtagaaatattgaagcacagggcttcaaagttatacagcaagtaggtaagaagataggaactagaacttatatctttttgttatcctaatgaatctctgttttccatcggattctgtttctccaaaagaaaatccttaacatataaaaatcagattgttaataggtaggttaatttttcccaaattatttatcaaacagggaattgttctagcctaacttcctcagcaaaacatcttggagatagaactgtgcaattgttgtacaacttcaagttcagataagttttttttttcctagaatctttcagactggatatggaaacatctatgagcaatatgcatttgattcagttaacagtaaaatataattcaatttattgtaacaagtgtgatctactttacaagcttgaggtacaaataaggtcatgtggtagtcatcagtgctgtttaccaaatatttccagctttctgacttttggcaatgtggcaggattcactttctggctttcttatagaggggtgggatgaagactagatctggccatggtgccacaaacagagggttgtatgtcatttccaggccagagcattctgtatcctgcctgagaccttgaagagctctcattttccttggcatggtggactgataaatgcttgatacagtggcttctttgtcagcctgggttcctcaatgattgaaaggaacagagtccactattgacccacagttgaaatatagcatggaagagaaatgaacctttgttgttttaagccactgagatttggagttgctgttcctgtaacataattcagcctatcctgacaaatataggtactattttttattttccagctaatctttgagcccttcagatatcatctgcctcctctattagtttctccgaaaaaaaaaatccagtgtattattttacccaaaaaggtcaggaaaagactgaaaagtcatattagcatgcttctgccttttctccatctctgtcacatagtgtacccatggcttctcacagacaagtggattctcatctgctggagtgataatatccttgcaggtccagatctctgcataggtagtgccacatgccaagatatcagctgtttaaattcacaaccttagctgttgcttaaagcgcagcagtgtgaaagggtaactgaaccacagcactcaatatactggaaccatgcctttctcttgagttctggaccatggtgggcccctctctaccagtagactatagttagagtgatgattcagccaagagattctaattatcttcactaccaaaagggacgaaatcaacgtcttgaaccttgttcagggagctggacacatacacaattaattcatgtatatcagcatgccaggtcattactatacaggcagatgctctttagaaaggccagtggagggaggattcatagaggtgataattgttytgggcattcatgtatataaatttctttttcctagcagagaactagagaaagggtcactgcaagaagagggactgttcacgtagacatgaaatccagagtgagaatgagcatgcaggggtcaaacatctgtttgatgggacatcaacatctgttaacgggacaaacatctgtttggatgcatgggatgtgagccataactgtaggatattatttsagaaaaccaggtggtcaagaaggtgacagaagatggtaactttgaccaakgaatgacagctaccatcccagacacaggatctgtgtagatagtgtgcaaattttcaaaccacacatgtgtgatacatggctctcagaatggagagggttgacatttgagagagagagaatattagaccgtcaaaatactgacaaggggataatgattcttaataagagcatctctctcatctccaagaccatcttcttttctgtccacgattctaaacttaatggtggctgaagagttggaattgtaaggggaacctaaatggggcctaccttcctctccacttccttctaaatgaaatactgtctcttgttgctgctgccaacttccgatgccacgggaagcaggtctgttttgtggtcagatgagagagggaggttgaaaccgacactttaagggaagcctcagaagctggtgctcgagatttgcttgctacccaatattatccttgccacaggataccatagggttgggagagggtttctcagaagtttgtgggtagcgtgtgtattctcattaattaggaaattaaattgttcgctgtaaattgaagggtaaggaatgtttttatttaaaattgaggaaatgaagtgtgggagggtagatgatagccatgctttttacaccaaattgcagtggtttacttgcttttgctttgagggtcatattaacttcagcaccaaagctggtcccttggaatgcctttcagtcctcctaagaatggattcattttataagagttcctgtatgagcatgattctgggtaatataagtcaccttattgattacaagttttcattctcttcctccaaactgcccgtctgattttctttaatattctctcttactccttgtagaaacaaacttaaaacccaattgcttttgatttctaagctaagtttccccaggcttaccagcttgttgataatacataataaactgtagtattgctttctacccactggtgtaactctgggcctctagctataccttcaagcagtcctttcttattttcctcactctagctccccttactggagtccaaatcccaggaagtcaagtaggggtagtgcctgagtgggagtgctatatggatactggtctcagcattcaaagaaccggcaccatgtgctctggaagcccttccaaagtgcccgtagggtgccgggatacctgcgtttctcattgtgaggaggctgcaccaggtcacatgtgaggagaatgcttctcttcctctttgcagttatattttgtctgttgggctctggagaaacatttcttgtgcccgtcagcagttcttctttctatgggactggtactatgacccatacctgaagttgaaagcagtctgttctgccagtcacagcctcttcctggatgtgtctgcaaaaccatttcattattctttttcaggaaccttcccccaaacaaacagagcaaaaatttccaacaacagagttcctgttcactcatttcttatgtgtgtgtgaatcccaatgtagactcaagctggatttctgtgcatctaagaaagttacttcatgcaagtctcccattagcccaaccaacaaagttgtgctggaaacactttcacccaaatcccaggcatcattgtggctagatgaatgggttaccagggctgactgataacacatggtttgcagaatgtcatctaaggtattcattttgttaatgttacaaggtttattagagaacctctgtgcatctgcttaatctccagggctttcacatcagtttgggggatataattgtaacaagttctgttcatttttctttgatgagagacatggagactttaacttcctaattgatttgaaaattgaagcctcaaatacctttgggaagtagaaatcatgaaaaccagagtaaaccacttttctttttttcttgatcaaggggacatgtgaattcagaatttctgaagaatcaaggtagagagtttttttttttttttaataagacttgtggattggattcaaatgaataagcattcatttcatataaagggagtagatatgtctgtggcatgaggatgatgctcagaattgtctagttagagacaattttgttttgtttttaagctatctttactttgatatgggggagggggcagttaagtactttttaaggtacttatgttcaacactatgttccaatagtttttggtcaaaacatgaaatgtaccactgtcattctaatatagcaacataaatggaatactataaatctgaagccagttctagaaagaaagaggagaaaaggatattttttaagtcccatatttatatgaagttcaaaactgcttatggtagtaggcaaacaaaatttctttagtttatctatgtgcaggaccctttgaatggccagatgtattagtagcaaatagttcagtatttgctatttggatgtcttaggaaatagcttccaggtgggaatctgtagagtttggcattggggtgtacaatctaaaaactccttgttattctagtttaccttttgtcttgtattgacctgaagttcctagctcatttgattggcaaagggagagatctgggatctgcagacaccaggttcccctgtggactgtaaccgtcaagaacacatgtccttgccacaaatctttgaggtactcatgtaatggatttctgagtgataaaataatactgcttagaaacattttctgaaggttttgagtctgttgtggaaatacttacatgaaccacaaagtaccctggctttatgctgtggttcattaccatgaaattccatgatgtggagtatcacaggaaccttacgctttgtcttctagtatttgacaacagcagctctgcatgagaaagcctaagcctctaagacaagcttgtccaacatgcggcctgcagacagttcgcagcctagatggctctgaatgtggcccaacacaaatttgtaaactttcttaaaatgtgaggacttttttttttttttctcatcagctatctttagtgttagtgtattttatgtgtggcccaagatacttcttcaaatgtagcccagggaagccaaaagattggacaccctttttctaagatctaacccttcaaataagatctaacccttcaaattgccaaattcaaagtgtatctaaaaaaggattgccctttgcctgagagttcgcattttaaagcactcaacattttcatttagaaatagtttctttggacttttatagacatactctttcaagtttttaccttggagacctcttcatataacaatacttagaattttaaacatggtttcactttaagtaatctcagcccaactctgttgagtgaaatagatttgtttcctctctcaattgtgtctgctgtaatgtaggatcagattataggtcaaccctcaaaccatggttatatacttaagccatgggaaaaaccaaccaaccaacccccaaacctgagttactgaggcagtaggatgctgtgctttgccatggttaccacgggactgaatgaagggggatgaacccagaaatgaaaacttaaaagaaactgttttaatgaagggatctgtcggggggaagaagagggctccctgcttctrgtgagcaaacacagcagccctgagcctttacagcccttcgtatttattgggtagaaagagcagggaggaggaggtaacgactggtcagctgcttgactgatcacaggttcacattattgctaacaggcttcagatgtgtctattcacaagaaacacttgtgcctgggttgtgactgccctcagtattccttctggaccacagactcagtttgtcagtttgccaacatcctgctttcatgagaacagtttgctgtttactcatatagcctccagtggtatacagagctgatcatgaccctcactcttttggcttgcaacagtaggaagtcatagtgtcctcatgaaaacctactggaactgtttccttcccttctgggatcttctgttctttttgtcatccattctaatcatttctaggtgtatgtactatctctcccttccatgggattagcaatcccatcctagacattattcatagtagtggtaggattttccaacaggatgacactcttaggatattctcactttcttctagaaatggtagaaatttcccaaacagtcttgggtggctgcttttcagaactgcagtagtgatgggatgttggaacaaggagctggcatagtaattctgagcataaataggactgaggggaacagaactctcatgtgaacttctagggaagttaaattctaggatgaattaaatatattcttcacttacagttatcctctagttggtgctcatgtgtttttaagaatatgtaacctctatttttcaaagaaatgcaacctgagagtatagaaaatatgttgatttaaatttgattttccaaagttcagactctatatttacacttgaataattggatgttaagagactaaaagggtttagatacataggaatakgtatgacaaatgcataatgatagcgaaagtgctttctttggtattcttgtgtgcccaaggttacccataaacccaataaaaaagaagtgatttcctctacttgatttgaagtagtctctgaatttctaaagacaaagattacattttattgatctcagagttcccaaaagagtctagtacaatggattaaatatagtagctgttccataagtttttttgtgtaattaagttcctgtataatgaataatacttttatgatttgaaagtaggatagtactgataaaatctcaaatcccttgagattttattctggatttagatggttctcagccttatggtctgcataaatagtagcccttagcattgttcaaggcatgaggccctgggtttagggtgtaagtcaagtggactagaaatgagaaaaattccccttcttatttggtatgtcctgcttttcaaaaataagttaatgatcttgccatgccctatcataattagtaagcatgaaatttaatttgacatttcatgtttgatatgcataaacttgccccactattttctatttctagaatgatcttcccaacatgcaaatctgctcatgtcattcccctgtttaaaattcctcagtggcttctcgtgagtttaagatatagataatatccttagcgctatttacagtgagttacaccaaccttcatctttcattatccccagtccccactttgttctttagcccatcctgaggtggccaccatttttcagtagccatgttccctcctgcttctagacctttgcataggagtgggggaggttcctcaatgtgggggtaaaattccgggcaggcttctcgtttctgtgcttgaggcatattttgaaggaagaaaaaaagtattttgtgacatctttctgagtgttcgcccgaggcccttgctatctcctccctcttaacaagtttcatgattaacagagcagacaagcaatctccctgcaaggcctatgatggtcccttgcttttctcagaaaaagcgtgggaacttgtaggtttccttgaatgttacatgaatctgcttggtttattttgtatttttaattttttctttctagatcactggcccttcctcttacatagatcaacagaagcatctgtttttagaatgtgagaggatgtcatgttttcgctcctcttctacaagctcattaagtataaataacgtatttaggtgaaggactttatgccattgagccttttaatagactagtgatcttaacgttacacttccgatgcctaagatatttaaaccaaatcagtaagagtagagagtcattttcattcagtttggggacaggggcctattgaaaacccccaccttgatcgtcccttattcacttacagaaagaaagaattagaatgtaggctatagccagtttagggtgctttctgtcactgtaaggccaagtaggagtgagttaaagcttccttttccaagaaatcatcacactcctgagtgaagagcctcacctttgccctctccctatttgctcccaaacgggtttgcctgagagcttgaggttcactaacacctcattgtgagtgggaagaacagaacagaatgccaaggagcaggcaaggacaggaggtcagcacgctgacccggattcaaaggcttgggtttgttgaacaacttcacccagtcctgccagcccgctttgatggccggcgttgcacggtattgggggctgtgtgccctctgctgggcagagcagcacacgcgtccgcctctcagcgcctggcttaaagaatttcaascttttgctaacacgggggcagattttcctctcaggagtgatgctctaccagcataagacgatggccatggaaatacagccttgagttatttggggaaattttatgtcaaagaaacaaatgataacttactttatgttttactccaatcaacttcagagccaccagtttcctttcatcgtggaatggggctttacatttgctctgatgacattcagttcagtggcacaatacaccaaagtgtacgtctttatgttcacagacacaaatggacccacacaaagaattacctagtaactcactctttccactcaagatattccgtgtttttttggagaatacaagatttggcatatttgtgtggctttccttatgtttaacatagctctttctaaaatcaaagccttaaaatctatttggatttgattcattcatttatttttcagtcactgaacagacatgaatgggcaccgactatgtacctgccattgtgtagggctgtagagagcagtcagaaatggaggagaaaagagaatacctacaatcttgagaaactccgtccagaggagaacttaaaaaacacactaataaaggaagatattaattgcgagggaaacacagagatgggaataacaacactatgaaggggtaggagttaggatctgctctgcaggctggtgagaggtaagtattaaaagatatttgtatgtttgaaagatacttgtatgtttgccagtaagacaagtttgggcgtggcagatagtagatggtagaagaaatggtgtgtgtgtgtctcacagggccttttgagaggctggagtccaaggagtggagcttggtgagaggtgggctagagtggtaggttacaatcagtttgtgcagtgccttgtctagcatgctgagcagattgcatcgtattcagtcggagaaggcaagtcgttgaacgactgtcactaggagagtgtgagggctgcttttcattttagaaacatctctcaggaaggtagtggatggatagagggtagaggaatgtcaaaaatagcaacaggaagctgtctaccttctgttggagcagaaaagacaaaagaagaaggacaaagagagtggggctcctggagaaaggattaacgggaaagctttctaagaggcagaaagttgattgaaggtggaggatgacaaagaaggaagcattgaagaagactgaaagtgtggatgacactgataacaggatgagctgagaaaggtttggtgctgcagtcgtgagtttcactttgggcatatggaaactgaagcgaccacgtgtgaggatacccactacacagatggaaacagggtcttcagctcagagagagaaaatgcaaaagggcgagatttgggatcctagagcatccaggaagcgtctttgtgtggaatacaggggaatagaggcaaatggagcctttccttgtttcctgcttcccttttacttaggagattaaagtgacagtttcattaactgcttttaccacattaaacattgktgaggatttggatttgggtaacattttgtcttaataagaaacctactaaaaagtaagtttttcaaaaaatgttttactcttacatgatcaagtctttatcayggaacctgtcagcgttaacatctaggatttaatgtcaaccaacgtaagcttttaaaaagccatattaaatcagaaatgacttaaaaataaactctagatgaacttgatctatttaagttaaaggattaagttatatacatgatggagcatcagagattgagtcctttttgggtgggccttggaaagggaaaatgcagaaagttctaatttgttttgctttcgaagaagaatcatcctttttatgtattcatatgcataatttgatcagaaaaatgcttgatattctaaccttttaattaggagggaggaatgtagagatcatgttgtaaaattgttttccaggtgaggaatctgtgcaataaatttgagaaacactgaaggctttattgtatgctttttctggattttttttttttttttgagacagagtgtcactttgtcagccaggctggagtgcagtgatacaattatagctcactacagcctcaacctctgggctcaagttatcctcccacctcagccccccaagtagctggaactataggaatgcaccaccacactcagctaatttttaaattttttgtagagacagggtctcactatattgcccaggctggtctcaaactcctgggcttaagtgcttctctcacctaggcctcccaagtgctgggattacaggtgtgagccatcacacctggctgaattttataatttaccttgtgacattgaagactctgagaagttctgcaggaacctagcgtttcccagtcttatttgatggccaacccagtatttcccagagtttggatgatgttactttaaaagttacctttataattaagtagagmaatgtaagtgttcaagcttttagccacagagctcagttcaattagtaaacatgtattgagctcttttatcatagttaccctgttaagtccccaaatcatgaagattattcataaaacaataataatgacaacaataatagtagctaagacttgttgagtgcatactaggtgccaggaaatttactaagcatgttgcatacaccatctcatttaatcctcacaactctgggagaaaagtatccattttagaaaagaggaaattcagacccagagaggtgaagtgcttttcctaaggccatagacctagtgaattacagaactgggttttagacatgtttctacctgatactgctgctcacattcttaactaccatagccctgtctatggagaatttatggcctcaataatgtccatgaatatttccaagatgggcttcaggtattttgacttgagggtcttcaacctgtgagttctattattagtttctgatattctgcattaccctgaaacgtcttcctaatttagaaccaaggtagcccctttctctctgaatctgaagctctttgtatcaaacagccttttgttgggatgtagtatctcgtttcttccacattacgtaatgtaacatacatgaagtagatcaggatatagctaatttacaactttcctgcatcgttcctgaatgttcctttttcatttttttaagtgggaaaaatgaacactatattttaaatcttccttatacactctaggcaatacttaaacatttaactcttagcaatttgtgtttttaatggaatagggttttccttttgggtcattttcgtagggtaactttggttgtccaaacatactctgaaatacgttggggattatggtttcaacacatgtaagcctaaggccaaagtatgagtaacacatgatattttgttacatttcatgaacaaaccactgttttgtggtataatacaaaacatagctaagtagtttagattactatcaggcattacaaggttaggttttcaatttatgggattactcaaagctcattagaagtattttctctagctctagggaatgcagcctagaaaatagtggtttcccttgtgaaaacggtgtgtttttagtccatttattatattttttagtttatctcaattatgtccttttgtactttagtacaatagttgaattcacaaataagcttacaaagtctgttttaccaatgagccaaaaatggtaaaaagaaaagagggaaaacacattgttgttatttattaacttaaactgtcttcagaatgtcacggacactctgtcagtgacacttttcagagcaaacctactgtgattggtagaacagctccgagttgtagttctgtctctagcatacactacaatgccagtttgtctttctgattttttttggttttctcatttagaaaaatgggcctagtatcctgtattctgctatgtgaatgttctttcaaggtatgctaggaataacatgagctttgcaattacatataaatgggctcctattctcttgctgtatgtatctgtgatctcgagcacattatttaacctctttgagccctagtatccttatctgtgaaacaatgataatggtagagtgtacatgatcggattattgtgaagattaacttaggttcatgtaagtaccagagaccaggatggatgcagggtagcttctcactgcatgggaagttctctccattcttccttacaatagaaatatgattatcccagcactttgggaggccgaggcgggcggatcacgaggtcaggagatcgagaccatcctggctaacacggtgaaaccccatctctactaaaaatacaaaaaaattagccgggcgtggtggcgggcacctgacgtcccagctacttgggaggctgaggcaggagaatggcatgaacctgggaggtggagcttacagtaagcagattgcacctgggcaacagagcgagactccatctcaaaaaaaaaaaaaaaagaaaaagaaatgtgattatcactttattctttcacacactgtttcttaacttttgtttacatattggtacttcaaaattgcactgaaaactcttaaaaaaataacagcaaaacaacaaatggattgtgactatatagctgatacctgaagaattgggccgaatccgatccagcacatgtttactgaccttttgctttgcataatgcattggagtaacaaatgatctctttctgagttcttgataagtcgacatttcaaaacgctaagtgatttgttttttgattttttttaagccaaatcagaatgcattataggccattactttcaaattttcctttataatggagtagagcaatgtaagtgttcaggctattagccacaaagctcaattcagttagttaacatttattgagctcttkgtattataggtgccatgtgaggttcccaaaccacaaagcttgttcatcaaataataataataacaattatttcttttggtttaaaatggaaacactgaccatattttaaaaactgaagtattgtctcgtctgcaggacaccacttccttctggagtggcttggggcctaagggaaagggcagcagccattgctctggaagggaagtgtgaaggaaaaccttcatgtagcatccgcatgtaagtcttaagtacacccacattaaggaaatatttatacatgtaatttttgaataatcatttacatctgggtctctatctgcaatccctttaacttaattcttgcaaaccttttctcttcttgctttgactaccaggaagcttaaaacagaatctgtggcccaattatattaactttgtgatatattttttagcttgggtgttatttttcttggtcctgatttttgtggtgtgtcttttattttgttgtctattagtgagtgataaaatttgttgagtagggaagagcattaatataatacataagtcagaaaaaaattctaggaaaacattttgctagaagagagctagttctcaaatgattcagacattcgacttgtaacgcgtaatggttcaacttacacctcatctgctcccccttggaaactgcatttgttttggcaaagccaaaattgagtgtttagaaatggggtgttctgagaagaaaccagcaaatcctagtgattctggactgcccttggaatcccagtgctggtttgaacaataatcctgatttttaacagcttattatgtgtggctccactttgggccaagggaatttagttgtgtttaagacttcgaattccatcatgaactttggtcttgcctcctgtcagtttaagattaattatggtaattctcaaagcaactgaatgtgtgtcagaatttctatctggatcagcactcctcctctgatccagaacccacgtctggggaggctgggtaaggaagtggaattaggggaaaggcatgcattttagacatttcccctgagtgtgcttggttctgactccaggccttgtctgcccactgttgacggtaacttcttgtacatttgctgtacatttcatggttcactcatacagttttttagtcagggtgcatcagatttagtaatatgtctccagaataaccatatgctttgaggtatatttcattttccaacactgaaaatgaaagagctattaggctatgaatctgtaaacagtcagtcgttccctgtgtaaagtaaaatgaattatcataatttattagcaaattcaattttctttgaagtgctagttgtattttcaggctgcatcataatggttagtaatgactcatttaaaataataccctaggaagttttccattttagattattaatggtggggcatgattgaaagaggaacaaaacatactgaatgactgaatgtcctttcacaaacttcaggaaatagggttactggatcttcatgtggagtgttgcttttattttaaatcaaatgtgatctctacaccatgtgccccatttcttctcttgggttaataattctctcacaagatatactgagttaggtagtaaaattgcatagtagtggtagtagtaacaatagtactcctagtaatagctaactctttttgggtatctgccaagctttcttcaaagtacattacgtatattagctcacttaaaactctttgtcctgtgagtcaaactttcttattatctccattttataatcctattaaggcaggcatttttattatcctcattttataggtaaagaaactgagacatagacaggttaaagaagttacccagggtcacacagccattgagtagaacagctgatatgatctgtgcagcctgtatgcagagctgctgctgtaaccactatcacagagctgtcttctagtcatttttattgttaatattttataaatttatgtctcattaaagcactgttaaaaactttgattcccccccctttttttttttacaacagatcactgattagtaacaacattcttaaattacaataatgatcctcataatgtgttatgcagtttatttctatgttcatgatgtctcttgtggctagcatttatggataggccgtttttcaaagtactttatatctgcgagaacctttagtcctactattatttaggtaatattagataacagtctcttcttcatacgttgttgtgagaattaaatatgttcatctatgcaaagtgctctggaatatgtggctcatagtaagtgccctggaatgctgatcattatgatccatatgttacagctggggaggctgagactttagtgaggttgaatacttgctcgcaggcccttacccacttagagacagagcaaagctttgaactcgtacacttgccctctagagcccacacccagccaccacacaaacaagaaatatcaggaccttgtctttgtttactttggcaaaccaaagcttttgtttagcttacaagaagcagcatggtatcaagattaagaggacagagtctggagtcagccttcctagattggaatagcatcaccctccttccttgatagctgtgcagccttgggaaatttacctcaactctctgtgccttttctcatctgtatagtgggaataattacagcttgtatctcacaggttagctatgaagattaaatgagaaaaacctgcaaaacttagtacagtatctggcatatggtaacattcaaataatattagctaacatgattattagaattgtatttgcatttcttaaatatattttgaattttaaagtcactgcttaaatccttggagccaccagatgcggtggctcatgcctgtaatcccagcactttgggaggctgaggctggtggatcacttgaggttaggagttcgagaacagcctggccaacatggtgaaaccccgtctctactaaaaatacaaaaattagctgggcatgatgggggatgcccataatcccagttactagggagactgaggcaggagaatcgcttgaacccaggaggcggaggttgcagtgagccgacatcatgtcactgcactccagcctgggcaatgaagcaagactccatctaaaaaaaaaatccttggagccaaattcaacgatactcttatatgccagactccccctgagagtctgtatgtgtgaagcctcttacttcgaaagactgtggggctgtcatagcagggttttggtgggggccgtcaccatgaggctgctttcacagctggagtcgctaaaaggggcacgaagtgaagatgccctaatgatctgcatggccacatttgtttcgggcactcagaaactgtgtttagacagtttattctctgattatgtgtggagttagacttcacttagctccatcatgactttgttttccccaactgggatagatggaggagacagagagataaagagcataggcagtggcttcttgacattagttttcctcatcagaattcttttattctggaaagatgagctcaatggtgtagtcttcttgcaacagctgacacacacatttgctcttccttcccagtcttatcctgcacccaattttttttttttttgagatggagtctcgttctgtcacccaggctagagtgcaatggcacaatctcagctcaccgcaacctccgcctcccgggttcaagcgattctcctgccccagcctcccaagtagctgggattacaggcgcctgccaccacgcccagctaattttgtatttttagtagaaacggggtttctccatgttggtcaggctggtctccatgttggtcggtttgatccgccctcctcggcctcccgaagtgctgtgattacaggtgtgagccaccacgcctggcctgcacccagtatttctaactacatagtagtgcatactatgggttacagtttgaattttattttcaagttatttctgtcatgtttcgaatgtcatatctgtgctaattcgtatgtctatggtttttagtctccactctctgaaagcctaccatttaattcagggaattaccctgaggtcagggtagaagataagccaaaaattataaacaaccccaaggctgttttttttttttaactacattatccaattgactttgaagaatgtttcttcatttttcttgctttccctaaattttgttgagttctgcattcgagaagaggacacattcttgtgtgtctatagccaacttccccagtctgttctgtataaagcaagtcagaggatgttaatacatgctctgctaaagacatgtactgctttatgttagtttgggaaccaccagcacatacaatgtaagcaggcttcttttctgctggactttgagaatcctttgctaatccaatgtaggtgtctgtctccaggaggagacaatcatatgctgacatctttatttcttgcagcatctcacaaagtcagtgtcagaggaccatgctttgggaaatgttagtttatgcagtagtcattgctatagatggaaatagggaaaggtgcaccagcttaatggtagttgtgctgtttttttttaaagattaatgaggccataccacagtttattaaaaacaaacacaaaattgttgaaatcagaacttaggaaagtgtttttctcctgtattgaaaataaagaggaaaatgataaaggccatactactcaatggctgtgtgaccctgggtaacttctttaacctgtgtctcagtttctttacttataaaatagggataatgtggctcacgcctgtaatcccagcgctttgggaggccaatgtggatggatcacctgagttcaggagtttgagaccaggctaacatggtgaaaccccatctctactaaaaatacaaaaaatagccgggcatggtagcaggtgcctataatcccagttacttgggaggctgaggtgagagaattgcttaaacttgggaggcggaggttgcagtaagccaagatcacgccattgccctccagcctgggcaacaaaccaaaactccatctcaaaagaaaaaaaaaaaagaaagaaaaaaagaaaatgataaaaatttaaaaagaatttatttacaaacacactgctaattctatattgaatgctgaatccaccacaaatttgatctaataacatacagattccatctatagtcagattgatgaaagatcacccagggaactacaagctcctcagttttcaaagattttttttctttaaacaaatgtcgcaatacaataaatatagattaacaagcaatttttttaacacagattttaacaaaaatgttttctggacattcccacctacccagaaaaccatttttccagaacctctcaatcccagtaaataaaattgtttattgtggtgttatgttaattcatgccctttaattctcaagtgagaaaaaaatttattttttgctatcaagataggaacctagaaggatcctgagcagaaagtcagaaggccttggtgaccttgttaaatacagatcaccatgcctcttacagaatgggtacccaacacatcgctgtagaatggactttttctgcctgagctcatctgctgttcagtggagaagttgggcagaatacatgatctcctaggttctttcagtcatggaaatgtgggatccgtggtatattgtggttattcaattgtttagcgaaaacacaaggatcatttaggagcaaataaaatttttgtctttctatgtgtaatcataagcccaagtataagctttaattttaagaaatggggcttcccaccttcttctgcttcatcctcctggttgtgtgtgccatggattcttatgtgcccccttcactgcatggaaagtaaaataagtgattaagaagagtttgctctccattttgaaagacacctataccatttaatatgtttaataatattacggtttaattaatgcatttatctcttggaaacatcacctgtttcttttccctcagaggtctctatattttttatttcaggatcactacctaatgtgaaaaatagcataaatatatgactggagaatgtggttaataattattgaatgactattatgtgccagatactgaacaatgtatttacatgtgttttcttctttattctttgaagaaaccaggaactaggtatgttaaagtagtttttttttttctttttgagatggagtcttactctgtggcccaggctggagtttagtggtgcgatcttggctcactgcaacctccacctcctgggctccagccattctcatgcctgagcctcccaagtagctgggattacagttgtgaaccaccacgcccaactaatttttgtgtttttagtagagacggggttttgccatgttggccaggctgaccgcaagtgatctacccgcctcagcctcccaaagtgctgggattacaggcatgagccaccacgcccaacattaaattagttttatacatgagaaaatcaaagcgaaataaagctaaagtggtttgcccaggatccatatgctagtaaatgatgcaataggaatgcaaacctagttatcctcagagacaaagcaaactattttggggagtaagtagtccacttgaagtgcatggtggattgtgggaccatggaacgagtgaaacaaggaaagactctgaaggtggccataaggactattgtccttcactcagggagaagtcctgttggggaacagtcttcaatagaagtggggttcagtccccttcccaccttgccctscaaggggaatggaggcctcaagtagcattttggtctgaatggaggggtcctggagacaacacatttaacagcatcttctatttgattgatgttggttgtcctggaaaagtctatattttcccatttgcatgtaaaacccaggtatccaataaatttttccatttcaaatttgaaaaggtggtttttagtggattaaaggtcaggcataattatgacttttttcatactgtgccacaaggcaaataagttttgtcttattttttaaacctacactttatttattaatctttttcttcttgtttaatatttgaaaaaaaaaatccaaagacatttgcctctatttcccactattttgaagaaatcaatcctaaagactggaattatgtctttgaaaaatggatgaacactattttaatgtctagctgaaaacctttgtcataagggggcttaatgaatacttttagatgatcaaggttagataaaagctttgagaggtcatccagtcctaggctttgaataagatctcctccaaagtttctgtcaagcttgaagctttatacttttatgctatctgaagtgtaccgatgaaatgtctccttttgacatatttttgaagaagaactttgactcacagtacaagagctcagatgtccagtaaaattctgattcaactggttagatttatatgtgtgtgtgtgtgtgtgtgtgtgtgtgtgtgtgtgtgcrtgttttcttactcgttgacttgctcttccaggagaaaagaaatttagctacttgaaaaaaaggcacttaacttttatgaatgccattatagaaataacttactgggattaaaaagtgaaattctaaaatctgggaagacttaaaatgtcttagaaattccataactttcagattttgtctataaattgattctaaacactgaaaaccaataactgcatacttttttttccaatggagagctgtgactataattttttctcaaagctttcagtgatataacccttgtgctactcataaaaaagctaaagagattgttttttcttacattgtactgattgttcaacatcatgtcttccttcagttttttcatatgtcatcgactctgaaatactatttttctttttgttttaattgccttctacataattgagagaaaaaagtatttttacttcactataatcctgttgcttagtcattatgtatatccatttcattctttctctagaagacattcttgggggctttttgaattttgagtgattgttttctagacctgttacacagctaatgttctgagaattattttcaaagaactcttaagttggttttgacattctttattactgctatctttcttttttgatcctctcaattcttattttgttagagtactacttgatatctctacatggatgtctcataaacatctcaaatttttctgctagtcttgctctacccaccgtcttctgcatctttatttatggcaagtccatctttcccgttgctcaggacacaaatcttgaaactacagttgactgtctcacagtccacatctcactcaacaggaattgctgtagctttactgccaaaataagtcagaacctaaccagacttctactgaagccatgagcagcatcaaagtggtacccatactactgtcctagaattgcacatgaccaagtaactttgttttcatgaccaaactggaacttgaaaggagatattcaggctagtagcatgtcttcatacattctgtgttgaatatgaaattttccctcttcgaagatccttgatggcatttgctagctattttcaaataatttagggactgtcagaagtaatttttggagttcacatgatttattatttatttgtatagaaacttmgttcataaggcactatacatgattatctcatttgacttttataatttttgttggtatctattttatcactgttttgcaagtgaagaaactgaggctcagatactacattatttgagctaatcttgttaatggtgatgtcttcagaatttaaatctgatttttctgtttctaaattttattttctttctgtcatttctgtcctctaggagacagaattaggaaacaattataagtctgaacttatagatagaggatcctgttgaacaaagatggacactctcctaattagagccatccgatgttagaatgtgctgaaaacccaccgtctttgagtcacattctaacattcaacactccctacctctacctcctctcccactctggccaggaatactatgggagttcccctttggctagatgacgccttccatattttctttcagagatgagattctattatttacaaaggcccatgggcatgtctgcttctgtaagaacccattacatcagaaatataaccaggcctcttgcaatcccattttaatagaactattttaattaaataattgaaacatctacattactagtcatgagtacttctgccttgtttattaattctttaatgtttgtattattgtcttccatcctatagtaggccagtatatttaaaatgaaggctaaagaaattttctgataaataattggaaaatattttgtttattttacattgccaaatggcatacatctattaattttgtttttttccttcatctagagtactcacagtttttatattaaaatctaaatgaagcaaataatttctgccaattttatgattgaatttttttgtttgacagtttttatatattaataatgcatggcctttccatcagctttacaatttttgtttgggattttttaatatgtgggagaatatatttttattatatagcttttaaaatctgatacaggaataaaattcactttagttttatgaatacacatgaagtaattcctatcttttatctcaaagttttttcaacccagtaaagccatttaaaacttttttcccttcagattcatttgtgatgtcatttgttatatcagccccatgttaaaagagggctgatagtttccattagtgggcttatcatactttatataatgtttccttgtcgtattactttcaattcagctttcaaagttatctacaaagagttttcactttgactctgacttcacacagcaacaggataacttagtggctttcctctatattttaccattacaatgagtgaaaatagctgatagttagaaattgtttgatactgccaggaagaaaacatgtccagtgtccaatttccatactcatacttccattctcaagaatgtggcagtgaaggaatattctccttttagaattaagctggtctatattcaagccacggtgtgcatgatgtcagggatgtaccttacctgacaattgtgatccccttgttgggggtatttacaccttggaaccagcaaatactaaagatcaggactctcctatcaccccaaagagccatttgttaaacatttaccagcacagcacttgttcaagcacattgaatttatgttactttgctcaagatatttaacctcaagatatttagcctcattttctatctctataaaatagtggcaagctagtactctacctacatcactcatttttcaatttggatcacttttttttttgagacagagtctcgttctgttgcctaggctggagtgcaacagcgatctctgctcactgcaacctctgcctcctgggttcaggcgattctccctgcctcagcctcctgagtagctgggattacaggcacctgccaccgtgcccagctaatgttcatatttttagtagagacgaggttttgccatgttagccaggctggttttgagctcctgaactcaggtgatccatccacctgagcctcccaaagtgctgggattacaggggtgagccaccacgcccggccaataactcttaacatagtatggtacttagcatttggtgaatggccataataataatgagactgataaaaattatcatttcaaacacaaatagattgttaagtgttaatttataggactgctttcctcactgttagctaaatagcaagaggaacaagtttgcaaaacagtaggggaaacttcatctatctttaggtggaaatagtcttggtgagttttaacttactttggtttaattcagatctattttttgtatttatcagaaggcaaaccaccatgataaacagagagaggaggatgttttgcattttgttgcctgtttccttttgtttcttctcagygagtaaaacagttctcgaaataagcatcaatgtttttttagcctgtatttttattccttctatcatcacaggcttatttacttgcatacagamtacaaatatttgtatatacatatatgtattattagtattgtatttattattgtagcaggttgaggaataaatgggaagtcagaaattgaagatacacaaggaagtcagcaattctagcccagcgaacacagcagcaagaacactgctcccctgaactctggggagctttcttatgtgtgttattttggtttctcctgtctttctccttgtaatgatcagtgatggaaatcagccagtgtggatattcttagagctgagatgctgagctgctttttattccctggcttgaggcttgaacgcacaaagtctccagggaagagtgggttggagtagctacctaaggagaaggaataagttaaatctctggggcctttggctataaagcaaaggaatacagagtaggctggtgtcggcctgcagatcagccctgaggctgatcagaaggggctctggtgaggttttctgacatatggagcagttggagaaatccggtgataaaaggaagaagggggtgtttcagtagcttgaggagaaggtaacaggcaagagaaaatcaaggatgcaggatgtgaaatcaaatgatggaactttctggcttaatgcagaccatctggctatcttatctttaaaccaatgatttctcagacatttttcatcttatatctacaatgaccacatgtccctgagtttttacgataggccagatttcaaatatttctgcccattgttaggctcttggtcccaaattgagattggaaaatatgatcattattcttacattccctcccccaacttctgttacctttgtcacaggcatttgaggcaagcccgtggaagcctccaactggttaacagcatcgttaggcagctgtccacagcagtgggtctcaaacctgaccgtgtatcagaatcatctggtgccatcagttaaaatactgctttctgtggcacctgcctcatccttctagccccagaaattcggattcatttggatgtgagagatcttcagattatttgtgtttttagcaggtgtcccatgtgctcatgagacgtgtgtcccttggggcaggtttttggaaatcagtgtgccaattagtgcctttcacatctttatctgatcattcaaacttcttacaacagggcttctcatacttgggctttgacttaacggtgatctttgaacttytgaaacttgatgataaatttgtgagtatgggttcttcagcagttcctgggagaggacctcagctttcatcaagctctcactggtggtaatgcccaaaacagttacaaacccaaggctgctcggtcagcaatatgaagaccatccaaaatgtggaagctacttttttcattgatctcagacttaactgccctcatgtttgttgtggtkggttttttttttttttttttttttcatcttctgaaaactaatttctggctaaaattcacacacatatatgcatactgctatacccacccactggtgacttattcttaaaatgatgacttctttcagaccagtattttcagttttatcagccaataacacttaataggatgtgtgtgtgtgtttgtgtgtgtgtgtctgtgtgtgtctttgaagggtggctggctgtcggggtgggaagatctaattaggcctcactgttttctcaaccatcctctcttccctctctccctgactttccacatgcatcccccaaaacaggttctgagcctgtgataccatgaaaccccatctggtttaaaccttgggctaatattctgcagctgtgttgcctaagctgtagggagactttttccttgacaagcatttgtggtttagggagccaaacaattgattggaaacttcagggctatgagttctaactcttggtctgctctgacacagtgtgtgaccttgggcgattcatttgatctctgtccaaactctctgatgcttgataacaggattttctagaaatctccctgccagtaaagacatatggaaccactccttggtgccacaagggaaggctacacttcattatctctcaggcttttaactctctttctccatttgcccatctctccatgccagggactccatagttttttctaagtcttagaaacacgttcctacttttctttcccaaaatacatcagcaatgctactctatttcagtcatccccaggattttagactttgtccgtaaatatttatcccataatactaaattacccagactgctttggaacagggaattgtgcagaactggactctgcccttaatttcacatggctactgtaaataggagagctgcatttctctctcatttttctgtattctacaagtacaatttattgttttatgagcctccacaaatcattttatactccctcttctttttaacatctccttttatagaaaattattaagttaataaattttattaaaagcaatacaattccaagaatttttttgtagaaaatatgtactattttagcttttggacttcgttagaagattatttactcagataataatcttaaacttgccttttaagttttaggaatgatcacacacatgtgcacgcacatgcactcatacacacacatacacacacacacattccagtgtgtaatcaataattttttgggatggcatacgagagaattatgttttgtaagcttttataatgactggttcctcattttagaacaaggctgaagaaatagagttgtaaatatttctttcttactttcttctgctttctgcctcaagattctatgtctctctgggatactgggttttgatattttaatcactttatttctgttaatgttaattaagggttcttgggccaaaataccaagaagggtcagtatgtggttcatagtaaatcaatcaaatggacatgcgttaaacaggtcatgggctaatttctgttgtgtgtcatatgtcagacagtctctggcttggagtgatttactggttactcttcctggaaggagaacgttgcttccctggcacttccctccatctcctcccagtccacatggggctgagacagagcacccacctcaggcctcctcccccagtatcttcctcttgctctaggctatcctctcctctttctccaccaggaccttttttaggtaatcgccaaactggaaatggtttgataacctcatatctatatgttattatttctgtgaaaaggaagacgtatattaaagtaacagtaatagttaacacttatttttaactctgtgctagtcctttttacagtacttaacatgtaattttacatttaatcatcacaataaccatgtgaagatgtgtatgcttatatacctactatatattaatagatgaagaatgaaaaagcattaagccgattttcctagaatcacaggataagtgaaggcaatctgatttgagaccttgtgtgcttaattaactaatgtgctgataagctgcctttttgaaaaacagccaaatgcacctctatatgcggttttaaactgcgatggttagactcctatcacgagtagaactgctctttggataaaaggaaagtcgggagtgaggaaatcaagtaggtagggcccctgacttccctcctctgtctctgtaaaacgtttctgtgcaaacacacacacacacacacacacacacacacacacacacacgcacaccacaaacacgccaagctgagcagaccttcttttatctgttttcacaatggacttccaagtaatgtttcatttgaagagtttctctgtaaaaaacaaacacactttgaaaatgactgcctgctacaaccccacttatcatagtgcattcttatctttcccccccagttgaaaatgctgatgtaactcagatgttagctgaggtcatccttgtctctgaggtcactctgtcctttgagattgaaataaaattgcctcaatcccccatttcatatctcctaaaaggttccaatgccatcccccagatttctgcacattctcggacctattctcatgggtagttcttcctggcgaactcttgacctgactgcatcttacctcctccggctgcatttttctctgtgctccatgctgacctagacgtggaactcaatcctttttccttaacacgcaacccccttcatccccacttcactcccacagagaactgttcgtgaagattttcagggcagtaggtgaaggtttatatcccagcaaaacatttaaatagggtatcaggatccatgttcttaaaaattctgaagccactctgccactggaaggttcttcttgactgcattattacgccttaccaagttgggcacccctcactccctcacctcctcttcctcctcttccttctcctcctctttctttttctccttgccatccatcagttcaaaattcgtcttcatttcttcagtgaggctttgattgctgcttccttcttacccatgcctccttgagcctcacctcttttaccccaggcaactcattagggtatttttctaaacaaagacagttttctctccaggagaaactgtggtgcaaactattaaaataaatttattaagatgaaatcccccagcccctgcaacattaacacagtatagcggattggcggggtttaagcaggctgattagcaagccccatcagaagctaacttaaaccctcactgtagaacagtcagggtccatgtgcaggacaggtgaatgattgattgctttttccatgaacaatttattaggagtgattttaaaaaattaagcaattgctcagcatcaagcatggtgtgaagcacttcacattctttatttaattgaaattcacaccctgtgaagtacatatttgtattttcttttaactaatggtaaaagttaagcaatttacccaaaagtcacagcattagaaagtagtacagcctttgataggccctgcaaggaccctccttgttcttaactaccataccagggcattcaaccaccttgtggccaaaaggacgttcctttatctaaatgttccattctaccttccagcactccttgactcctcaggaagcttcccccagactctgtgttattttcctgcctttaaagagactttctttcttttttctttcttttctctcttttttttttggagatggagtctcactctgtcacccaggctggagtgcggtggtgtgatcttggctcactacaacctccgcctcccaggttcaagcgattctcctgcttcagcctcctgagcagctgtgactacaggcgtgtgcctaattttttttttttttgtatttttgggagaggtgaggtttcactgtgttaaccaggatggtctcgatctcttgacctcgtgatccacccgcctcagcctctcaaagtgctgggattataggcatgagccactgagcccggcccagagagactttcatagaattttaggagtatagctattttcagctttctcctgggaatgtgtgctttctgcaggattcaggaaagaatgaaatgtgctaagtaaacatttttacagacaataatgagaaaacttatggggaatgggttcttggggtcagacaaacacgggtccaaatcctagttctgggtcttattgtgtgtcctatgccaagttgcttatctttactgagcttccatttctgtataacatgcacaatcatacctgcttctctagctcagtgcttggcacacggaaaatgctcaataaatactagttcctttccccgtgcatgtctagttaaagttttcatatcagcatatttaccgagtatttgttcaaaacatcaagtagtttcaacactgcaagttgaaggaaggcaatatgatgaaaatgttttatttttccagttttccttatatttttatgtgcattgcaaaggtattgcaaagtgccaacaaggggaggccttttatcccactcctacttttggtgaagattgaaaggcatgtagacaaagaagaggatgtggagtcaagacccattgttactggtggaaggtgtccagattcttggtgttttgaagaaagaattagacaaaatgcacaaacaaagcaaggaaagaatgaagcaacaaaagcagagatgtattgaaaatgaaagtatgccccacagtgtgggagtggtcctgagcagccattcaagggctgtggatacagaatcttcttgggtccaaatacctgctagagctttcctattggccatttggtgttcatcccatgtaaatgaagtggtggcccacaatcagtctgattggttgtggaaagcaaccaatcagaggctgaagtgaagttacaaaggtcacattcctacgcaaacatctgattggttgtggaaagcaaccaatcagaggctaaaatgaagttacaaagttgcacttctgtgcaaacaaagacttggcccacaatcagtctgattggttgcagacagcaggctgaagtgaagtttcaaagttacactcctatgaaaatatctgattggttgcaaaaagcaaccaatcagaggtagtttcagtttcccatctgccttgcagaaaaggtgggggtttgcaaagggagtagcttctggtccttttgttacttaggcatggaaagttagggttttcctttcaatttagttctaggaagtcagtgtgaaacagccttaggttccctgcctccagacactattctcctgcctcaccatgacatgaaacttctctgccagggctaaatggcaggagggctctctaaatgtgtctggcaggaattgagtacagcattgacatcctcaaattgaaacatgtggcctgcatttatttgaatataacagttattgccttttggacttcgggtttcatgttatcaatgcttactatattgagtggttttatatttaaatgtattgtgcagtagggtccccccttatctgtagttttgctttgtgtaattttggttgctgaaatcaactctaattggaaaatatgatatgcaataagatattttgagagagagagaccatatccacatatctgttattacagtgtattgttataattgttctattttaataacctaaactttccactggggttttgggacatatcccccttggataaaggggactactgcaaatgttttgttgtttaaataggcttattgaaatgcaaggtgctcatcagaggtatgctaggcggttggatcatttagcaccagtccagtgatttgtcaaatgtctccctcaataaccatactcacaaaacatctacactgttctcgtttagaaccactggttttgtagctgtgattcagtaatcagagtatgccatttaaattgggggttcctgtcaggtgggacatctagatcaggccctctggccagatgagagcacactcaggaacgcctgccatcttgaatggaaagatctcacctgacgttgaatcctgctcttttcttaacaccaacaactgcaagtttaaatgaagtgtgtgtacaagataaaataatgttcctcctttcaggtttttaattatctctgaaagtggatagcattcaacgctttagaatttactcagtttttgggtgtgtgtgttttgttctgtgtgtgtgtgtgtgtgtgtgtgtgtgttttagatggagtctcactctgccacccaggctggagtgcagtggcacaatctcagctcactgcaacctgtgcctcccgtgttcaagcgattttcctgcctcagagtctctagtagctgggactacaggcgtgcaccaccacacccagctaattttttgtatttttggtagagatggggtttcaccatgttggccaggctggtctcaaactcctgacctcaggtgataggatttactctgtttcagcatcctcgttttacagcactggttcccaaatctcactgtccatcatgcctgccagactcttaggttcctcctcataggttctgactgagttaacttgggatggaatgcaggaaccctggcctttccaaagctccttcttgagtatttcagcgcagttcatgcctatctttcaaacagctacatacagccgacacttactaagcataatttatgtggtttgaaacaatgaatgatagagaaaaacctgtgtgctgmtcttcaaggcatgtcagatctaaataatttagccagtcattagacatgacagaatctgtcacacagagtaagtaataaaccaggagtgagggtagatgctctccctgagagttgtcagagggtcaggggagactctcagatgaagagctttgaggaaagccttgaaagtagactctgagtttgcctcacagacaagaggcagagggcttttaggatatagcaatgaaaataatgtgtgtggatctcaaataatcctatgtggcaggaatagggggctggataacggcaggaggaggtggtcaattttgaaggccattatagagggagaatatgttactcgaggtcatgtcatctgtgagtaactgagatgggaataaagttaatttatttgagaaggggccagggaaagttattgttcagaattagtgatgagagttaatgactgcctcctctgtcaggtttatgtattaagaaataccagtttttaaatctatatgttttatccgtatgtaaattacatgtaactttttgcatatggataaattttatattacatgtaaaattaccctggaaggataatgttcatgactcttgaaaagatctgttaatccacaagaggagctcattttgtgacctgcagagttgcagtgagaagctacagggtttgaaaggagacattctaaatttttgaggccaatttcattggagaaataaaagcctagcacttcaggagagaacggttttggggattaccagcctgtattgccattgactcctgacttcttgcttcatgattttaaatttatactaaggcatggaacactcctcacttcctcctcaaccagccagagcgatcctacgctttgcgcctcccatcacttcctccaaactgttctttatgctacagggaaacctgtctcctgtgagctgctttctcatttcatctactatttctccttcagtgatgttccttagcacaaacccaaagtcttgtaataccagctacgtatgaagtcacaacacagagggaagcccctgccctgcttcccgttgaccctctggaagtggggaactgggtccttttcttcttcatccatggcttgattagttgacattataaaatacctgctatctgctcacagtcgcctgacccaatggagaacagagatgctatttcagaagaaagagcgaccaacagaaaggataagcagaaactaaaaaatagtaggacctctttttgtaatattgtttttggttaaaaaaaagattttgcctgtgcataatggaatattggaacttagatgctatcctatctcagtaaatggagaagagcactcttaggacatgagcataataaatgttaaaaaaacaaaaacatgaagtaactttttctgactaactgtatgccaataactttctgaatcctcatgacagaaagacaatatgatacatctcctgtcccccaaaagggctctcagtctaatagaaaaggtaaatttatagcaaatactttaaaagttgtataataaagtatattcaagattctgagctaacacagtggggatttataaactggtctgtgtgtctttgtgtttgtgtgtgtagatgtatatgagacccacacacggggtcgggggggtgggtgggagactcgttaattttgtacaaaaatcttatgatatgggtgtcagtatctctgtttatagattagaaaattgagactcagagtggctgtgtgatttgaccacatcatctagtacgtggttacttgacattcttacccaaatctttctgactgtaaagtccaaagttattttatttcatcctactgcttcctgtctccctaaccctgtgttctagaatgataggaaagaacaaacatatgaaaacaggagagagtatttgttttcatgagcactctattgtggcataaatgtattgcacagctttactttcagtgattctgtttttttttcagcattatttacgtgtaacaagaaaccatttagctttcagcatagactcctgatttgatttatgcttaataacaccctttcttcctaagcttggctgtgtatggacggttataagttttggatataaaatgcatcctgaataggagtgaagattaccatgtgacatttgtttttcctgccaccagctgtttagatttagtttcaccattcaacaaatkcaacatttgatggttttcactcatcaaagaactaaatcagcagtttccctacaaattggtaaaagctagtcctttcatgatctgaaatcccgtgcctggattgggtctggataaccatagaggggaagaagtgatccatgtttagaccttactttttgaaatcaataaggtaatgccacagactkcttagatcrgattctgcctgcagatgtccatgtctcctgagacataagggcagttccatctcaaaagcctgggtagggtttgacagaggtagctagaagaccactgagttaagattcccttgaccatggacaggctcctgtcttttctcataggacatagctagaaggctagaagaccactgagttgatattcccgtggtcatgaacaggctcctatcttttcttctaggaaaatagagatttacctcattgctacatggatttgaacttttacttttgataatccagggtcatccccaacttgatttttgaagttactgagttttttctttggactctgaccttaatccctgcagatgctcccaagccagagagccctctctaactcttctcctggaatgctagcgccccaggagcaggatctcatttcccacaagatctccagggcctggaaatggtgctttatacatactgtgtccaccataaatatgagtgggatgcatttggcacaggtggaccctcaggatgacctattcttgtttgacattgtctccctcatgggatggaagtcctgattctttcctgccctgtgtcagcatcattctgaagccttgataagctcaagccttgaaaagctgctggccttttgctggaaagtaagaattacggccttagacaatgggcctggcatgtggtgtataactagtaaatgccaaacctgcttctctgaatcttctgcctctgagtctccttaggtggtctgtgattgccatgggtggtggtattcaggcatctgttcctctgtactttatttattcatttttattttttagtccattttcatcatctgtactttattttccatttcctagtcactcaacatgaagacatactagatagacatgaaaaaggaatatggagttacccgaccagtttctttcttctgacttgcttgctgttcyatgcctgagtaagaagaaaaagaatgttatgtatctgtttccatacagataatgtaaaaccatattcattcattcatttgttcaaaaaagatttgaakgtcaagtatatgtcagtcacacaagtagttgaaaatatgatttatttttcactacatcttcaaaatagagatttaaagtcttccatttagaatttttaagcaaaagagactagtatacaagttcacttgaaattgaagtgcatgagtattcttaagtgtcactagggttgcctaaatttagtgacctgtacatttcatgagtctggatacagactctattataaagaggtttttctttagctaattaaaaataaaagtcaagccatgttggttcatcttgagcttctagtggtaccacattcattatacacatatttatgggaacacaatatgtgcaaggcactatccctaggaggatagcttcaaaaactatgacagagagagagaagagaattgagtgatttataagagattcatcacatagcacaagataactatattataaaattggctagaggaggaattgtgtatatcttactcattctttttatcacctagtgaagatgctcagtaactttgcttctgagtttctgtacagacacttttaaataatatcgaaaccaaaagtgtctatatttttttctcttttaagtctattgaatacttagtattgaggatcaaaagaacatttctccttcattttttaagtaaaataaacattcactgatatatcctgcatgccaaaacacatttctttgcagaaagatgggcttacactgaaatgggctgacttgactcaggatttcgaacatattaaagtttgttcacaatgaactgacatgtagacaagtatttatatgaagtctcttgtcagtcagtgcatatgtcaaatcacctgcacttttagccaggaaagcgataccttttagcaggtgcttggtacaaaatcaagcaatcaggtcttatctttgaaaattataaccaaagagccagtcctcacctggccagaaagttgtttatgcaatgaatctcaagcaaaacccaccaattccaaagatttaaaggctcataaaggtagcttaggagatctgtgaaaggttcatgtcctatgtgaggaatacaatgtgtgtgattttctacgtatcttctggttttgcataaatatacatgcatatatatttaaaagttagcactgaatcaaatatttatcagacctttgcattacctataatacttgcatcataatattatttttagttctttattagagcaaatatatcattttatgcaatgatatgcttgttttaccttcttctgtccatcatgataaatatgaaattttatctctgaaaatatagggatcgtcatgctaacttgaggaaatgaaaagaatcactcttattctgattcttgcctctatagtcaaaatggcagagtgagtacacgtggaacacaaagcagggagtgcctctccatctacttggaacacagagagttggaggaaaaaaaacacttaaaaaatagagtttcactgataaagcagaatttaaaataaaaatttctgctgaacaaaaacacagtgaaaaaacacatggcgagctggcgctgaagtgcctggggcactgagacgggaaagagggagctaatctaacccttatcgtccaaaccccatgagacactaaatgcaacccaccgcggtgcatctcgagggctactgctctgtgtgatgtcaagggctgtggtagaaatgatgtggcccagagaggaatcagctacctgctcattccagtggattttccagtggtgcctccatgtgatcccacaggaactggaactatgatttcctcctggcaagatcccggacttctactataagacctggttctgcactgtagactgtggtgtcagggctgaggcaattgtcaaactatccactacaggtaggcaagtttagaaagagataaaaacaatgaagcaaaacaaaatttcctaggcaagaagagcttacaagcccaagttttaaaacgcgagggaatttaaggcagatagccagtgcacccaacaaatgggaagcattaacacctaaggaaatagacattatcatgcattgctcaagttatttgaaaattattttataaatctttgaaaagataaaaaaggaatgagtatccaaattaagtagtaaaaagagattgtcaagagaaagcaaattttttgaaattaatatgaatgaatacagccaataactcatcacaaatcttgtaaataaaattttcatacagtttaaatgtttgaaaaagactctaattaggagaataaataatagatcgaacgcagttgaagtgacagttaatgaaaatgggactgaggctgggtgcggtggctcacccctgcaatcccagcactttgggaggccgaggcaggtggatcacttaaggccaagagttcaagatcagcctggccaacatggtaaaaccctgtccctactaaaaatacaaaaattagctgggcatggtggccagtgcctgtagtcccagctacttgggaggctaagtcatgagactcacttgaacccaggaggcaaaggttgcagtgagccaagatcgcaccactgcactccagcctgggtgacagagcaagactctgtctccaaaaaagaaaaaaacaaaaaacaaaacaaaaaaaaacacatagggattgagtcaattacataaaatattgcagaaagaaaaagttggatatactatgaaagagaagagcatcaggggatgaactgagacatgaaatacaggaatttcagaagagtgaagaaaagacaatatacaacagatgacaacagctaagaagtttctagaactaaagaaagtcatgagttatcagccagaaaaaacattgaatgctaatcaaattaaattaacacaaaatagcaataagaatctctatataaacacattgtgttgaagctccaaataagggaatattttgaaacatttatttctttcagtcctgttgttgccagaacagaatctgtctgcattattgtctcttcttctgccactgagatctcctattaatctgtttttattgccaatatttattaaacgaaggggcaagttatcaaaatagccaaaagctgaattttgttttctcccaatcaatgtgtgaatgttaatcaccattgtgcagatacccaggtatcactggatgattcaagactgttgattccttcctaccttaactttggatttaagttactgtggacttaattgacctaaatattccacagccatattgtctccaggattccctggagttggcttgtgaatttttggcttgatctattctatgggatacgtggagcacagatattcagctgatatatacctatgtgatgtactggccagcattcaccacgactggttggtattccaaatctctattgctgcataacaaactacccctacattttggacacaaaatgataacatttattttgcttatgaatctgacatttggggagggctggatgaggccagcttgtctctgtttcacatgacattggctgaggtggctctaaagctgggggctggaattagctaaaggctccctcacatgactagtggttgatgctggctgttgactgggtcttcagctgaggctgtggccagaacccccttgacctctacatgtggctgcttggatttctcagagtatggaggctggcttccagggagaggtggggagggagtcaggtggaagctgtattgcctctgtctgagcctgcaatttacccagtgctgcttctacctcattctattcattaggaatgtgtcactaaggtaggcccacagtcaagggaagggaaactctttgatgtaaaagagtgacaaagaattttcagacattaaaagcactgtagtccttataaaggtgcctagaataagcaaattcttaaagacagtaaactagaggctgccaggaactagggcaggatgcacggggagcttgtgttttatgggtacagagtttctatttgggatgatgaaaaagttctggtagtgaagagtggtgatggttatataacattgtgaatgtattttgtacacttaaaatgcttaaaaggatacattttatgttatatatagtttaccacaatttaaaaagccatattgtctgcatccattctaattaatcatgcctattttggtcttaaaattttttaaatggtccttttggatacatgtatgtccccaaaatattcagaaagatatccctaacccctcctttcccggcaaggatttcacaaaggcagaaggaaatattactagtgaaaggagtggtgacttttgctgtgtgctcctggggctaaaagatctagaaaagtttgggaataagctattaccaattttatttcatgagcaacccgaaaggggagctacttttaatatgcggggatgactgatgaagctcatgtttcccatttatgtttgatgaactcataattttgtttccctccagggaaaactcactaraatatgtaaaagggaaatcataatggagattttcaacttctcaattcagcttcatctttctgtttgctgggaatgggaaaagccagatatccttatggctcacagagtgacactgggacttggtgagaatgtgctaagactgaccacctagtgaatagaaggtcctttggtgtcttgccacacaaggcagcctcccctgaaacattgaaatctaatatcttgcatcaaggagaggtatggctgaggcataggaaccaggatctctaaaggaagaaagaagtgtttgataggaaacggggaggaccccttgaccccagacactagggtagttccttgatttaaaacatctttttgatatttgttgttaattctttaacatcagatcctagtcagcaaactactagaacacatggctctctagactgagaaaactggctacccccacttcagcgtgatggtcctctggtaggaacaccacagcttagtctctccatgttttgcttctaactgagaacctggacagatgctgtcatgtatttacctctcttgtttcttagttttataaaagtgatcatactcacacattaactaattggttattatgctaacagcatgaaatatgcttctttgagattataatatggtgattggaagattttttagtatgaaaggtttagaaggcataacgtttctatacaatcagccaatgtggaaggaaagctttgggctcagtaacacagtgtttcttctaatgacttgtacagagtatttgtaagtacttgattgcattattatctgtcctgatactggttgaaatttttagaagaggctatagggtgtgtatttgagcatatgtggtgcattttatctgaactacttatgatttcagctaatttgccacaaaagagctccctcctgtcagtccctgtttctgtagcttacctctgttgaacagtaagttgcttttagagtgcagggttactagccactgccttcaaatatccggcacttgttttggtggcaggtttgtaaacacagtgccttggctgtgaggtgtgttgtaaaacataggcaattaattactactagttaagtgaattcaagtggtttatttttttaaaaattgagcagattcaagctttttgctttaataatattactcttatttgcattctgaaatgcttccttgatgaaagagagtaggtgaagctctggctggatcactctcatgagagtgtagtctgcaggcagaggtcatctatcctgtgcatattaaagaattctagttaatctcagcgctttacatggcttgtatttgcttttgaaaaaatctgaagacagaaatgactgaacacatgttccaaggtgttaaaagcttgattagggtgctgccagaaacattctgacttttctgcttagtatgaggagaagacccagtacccaagaataatatgaatttgtcctttctgcctttggggatttgctccatccttgtgtgcaaagtgctataggggccagtaagggaggaaaggagcagggtgtatattaggaaaatgatgtagtagggatgcaatgcctgtgatgtcagattgccttctggaggtgtgatggggataaacaggtcatgactgggtgaaggagagggagtaatagggtacgtcagaaatgatgtaggtgggacgtgtgctgcaaggcaaaggcattagaaaggcttgaaatccaaggaaagaaatttaagaacccatccagtacctctaatctaattattctacctggccctgctgaaatcagagaaaccaaagaaaactgattggaaaacactttatttaaatagaaatctcacgctattgagattgaattgggtgaacagtgggatgacttgaagtttagaggatgaagttgattactcagcaaatagttttctgtggcatcttgtgcagaatgcagaatttatatcatttggccaggttccccttttgtcctcttgtatgctatactatctgtttatagcccaaattttacttattagtactccttgtaggtctgtctcccgggctagatcgtaaactgtgatggcaggaccacatctgcctaatttaccgctacattcccagtatagcgcccagcaaaaaaatcagttctaattaaatattggcaaaagaggaagtataacacagaagaaatgccacaatatctcacagcagatgaacttgagtttaaattccagttctattaccagataagaattgacttatcaaatatctaacttgagacggtcacatcaattactatgattttcaatttatttgcttgtaaaagaaaggtaataatatatgctttttcagattttttttttttttttttgagaaggagtcatgctcttgtcacccaggctggagtgcagtggcgcgatcttggctcattgcaacctccacttcgtgggttcaagcaattctcctgcctcaccctcctgagtagctgggattacaggattaccatgccgtctaattttttttttttttttcagtagagacggggtttcgccacattggccagtctgttctcgaactcctgacctcaggtgatccgcccacctcggcctcccaaagtgctgggattacaggcgtgagccactgcgtctggcttgctttttcagaatgttgtaagaattaaactcactgtctgtaaaggatgtcattcagtttctggttcttagtcgatactcaataaatgctttttattatttatagtaataattttaaagtcatctttctctgtctcttgcttgattggttagagaagactaatggaattagaaagctatgaagattcagcatcatggtgtttgaatagtatgcaagaaagtgtaaactatccttaaggcacttgctagaactcatttcagaaagacataaaacaattcttgcaccttcttaatgaatccttccctcagacttctggtggctgccttttcctcttaaacccagcaagtcagaaaaatcaaacaatgaaactaaaaaagttaaatctaaccatgggaagtgaaataaatatttacacatggcttccataagcatgatatatgtttatacctttagtatgttttgatttgtgtatcttaccacctcaagatataagcatttagcagctggaaaccttatcctggatatattttgtattgtactttattgtatctaataactgtcagagcccaccaataaatatactacacttagtgtagatacatgcatggctaattcaacaagcattcttatctaaaattttgtgtttttacttggctgctgtattggtagacttgaagactcagccacagctgtcctgagaggctatctataaaagtgcaggtgttcagcattagcaaatatttcttattatatggattgacttttggcagctagtaacgatgtttcctgagattgaaaaatgattttctaccttaaacagtggtttcacattactggaatgctgaattaaaaaacacatacacatgcacacacacaccccccacaaaattcttctcatcaagtagtaccgaaactgtttttgttagttgtatacatttcatgatttgtatattttatagtagaatgcaagtctttctttttaactgttgtggttaggtttaggtcctttgccaaatgaagcagactatgaagaattaggaagcgtaatgcatcctggggttgtgttcctggtaaaggggacttggacctggctggaagccaaggaaggacctggggctggagatattttcaagactttaaaactatcaggacattttggtgttttactattggagacttttttgcatcaacagatattaacaaatagccttttatccctgtttacaagaagttcaaatacccttcgtgatatctctcttccccttcttaaccttaaagtcacaagtgggcagagtctgaggaccttgtttcaaatgatttatgggaagctgagaaatccctccctctgcagtcccttcatttcctatatacacaccaaataataaaaccaaaggataagacatttggcttggtatctgttaatttctacattaaatctagaaattatagtttttctgtattctataaagcaaaagactaaaaattgaaagtaaagggcagagacattttccttttggaacattatcgaaaaaatatgaagatcatttgcagtgggttaatgaagyttgcatttaatgcctgagctcttcactgcttgcctgagagtttgccaaaccaacagagaaattagtttggctaaataaataaatgacaagagggcactcttgggtgcggtggggttggataattgaatccaacttaagtatggctggttctgttaccctaataattttccttactttggcaacacattgctgatgttttggaatctttacaaggcaggtaagccttcagatcgaggaaaaccaaacaaaccaatgtcaattatttgagctaagctctactttgacacacttgagttatggcccatggcaggaaaattcaaaaatgttccatgtgtaaaggtttcccctttatcatcttaccttctctgtccttcaggtcttcgcaggagagtgcgtttcaggtttttgttgaacttatgaaaggctcagtttcaaaggcttgggttttcacatccatgtcaatatcacagattgaaatgtgacacgggtacctggctgcatactttctttaaacgtgagccagttataccacaaaacgttaggggaggcactctttcatctcacactttaaagtgaggtttgttgatgtaacccaatttccagtctgcagaggtcactctgtaatgtagtgcgatgatgataaacccatcaatcctgtttgatgtttgaatttcccttcccgtggtctttacctccactttgttttgtaaagtaagtttggtaatagtgatattctggcttgccaacgtctgatgatctgaattcccctgacactcactggctttttaaagcatgcacatgcttttgcagagattatgccgtggatataattatgaaggggataatagaaataaatgtttttatatactttcgatgatgttcttgggaagaataagtgatcaaatgcagagatactaaaccttggttcctggccctcctgtgacctctgaaagtagtgaaagttcttctgtattctgtaaagtgtttggcagttggtatgaaatgagttggtggtctcagcagtctctgtatgattgtgggtgtgtgggcatgaactgagggtaaggagaaggaagggaatggacaagaaccagtattagctggaggaagggcatgatataactcctgtgacatgctcagtccacagaaccttaagtagaaggctgcactatatttactggtccctgtcctaagttaagaggcagaatcagggatgaacaagggactaaagcctgttatttggaatactggaaggtaagagtcagttgagaaccaggccagtgaaatacaggttgaaacatattaaagtgccagtatttggccatttatgatttacaaaaacatgtgattcagtgtttccatttcattggatttcatgtgattcaacctgattctgcatgcagtagccgaattggtttttttctgtttgtttagaaacacccacctcaccgcctccttgctcatggaaagccagggttatagtgagggcaatatggtcgaattagcagctgcccattgtgacaaatggttgtttttgttgactggtcccttctggcaaggggcggcaaaaaaacaaaaacaaaaccagaaaaagacaccttattcaaattattgtgttggaggtgactggaagctccattagctcatcacttttcctccagttaaaccatctggattataattacttgccactttgcaaagatctgtattactggcagtggcacaactctttttagtgatatttttcagtgtgaacttcctggctaggtacagcctcctctaagacctatgggcatcagaatatgaggtatattgcaagataagaagaaattagactggtattaataatataagtccctttcaagtgacttgaagctctctgtgttgattttaggaccttgtcaagatgagccaaaccgtgatggatcctagtagagtacctccaccattgattcagctgtgcaatttgggcagtcacataacttctctgcttaacatttttccagtgcagtagaaccatttcagaggtctggaaactatagtgtgaagtgccgggttcctctgagttgcttttggatggtgctagggaggagaggggagtcctcttagttgagcctggacttcccacacctcttacgtttttgtcccattcaacaagaacacctctgtcttttgttttgtatctgaagaaagagttcaatgctaaaaggaaaacatttgaaaacaagtggatcaaaaaaatctctaggccttctcctagctcatttgaatttttcttctctaaatatcagaatgtacaatctgacgatatatgccagtacaatggaaggaggctaattttcttcctttccaggcatccctactgaggcccgtaaaatggaaacatctgtccttctggaaatactaggaagggaggaagctttcacccttcctgccagccccctcccaaaggaaaggggggacttatctgattgcctaactggggagagtagctgactttctatggctcagccccctggggcttgctttctgtcagcccagtttgcctgcgggcaggacatgttcttctttccctttgtgctaatcttactgggcaagctgtgcgtctgcctctggaaaacctgtcgtttgggatgggtgcgggaaggtaggaagtctgatcgtgacctcagatactagccacattctctggtccaggtttactagtaataaagatgatagattgatccctaactgactcctgcatcagcttctctgtaagttctgaaactataggaggggggaaagatggcggaggtttcctgggagaaactctgacaaataaatccttattccttggcagttcattattgatttcccccatatagcgaacaccytgtctcctgatcttgatctgtcttaaagtgccttccatgtccagattaagatcctgtccccttgaatgttctctctccttactgcctctctggttctgggctgtgcccacagctacccctcaatcactgctttctggattatggagccactcactactgatcatgcttttgcttttcctcacattgcctctgcatttcagctttgattcacaaccctgtgggccaccatgggtggatctatgtttcacaagaaaggtgtcaattttttaaacttcctacagctgtgtttgttgatcccaagaaaccatgcagggtgttcagcccaggttaatgagcagtcggctcacccacaggcactctctgctcagggatgctaagccctttcatctctggatttcatcactcttagaactgtcaggcagttgccagctattagggagccatgctattagggagtttggcagctcctcgaattccgtgtgcaggaggaagctcctgtcattcctcgtctcctcatttcctttgtgggcagaccctgtgtgatgcttgccgtcaccgaaacttgccctcctcagactggcttatggggtttacccgagttgctttgcgagcccagcctcctgtccgcacctgggtccacgggcaaggcagatcttgcaccttccctcaaccgcactgtggctgtgtttctgtgtcaggtgttctccagtgcttacagcatgatacatttcaacatgcttcccctgctggtcccttcttcctgcccgctgcaggccttttaatctcatgagtcaacatcgctctgtagagcaggtgctgctgttctgtacccccatctgctatctcctgctccttttcctttgttagtcagcacctacctcgcggggagagacactgaactgctggtggctgttacatgggctgcatcttaactccacaccttccgtccttttggctgctctgcctaaaatgtcctcatcgctcttagggagttggacaaggagatcagagcctcattgttctagagagcaagtgagaggacagtcctagaagaacaccagagcctggtgctgtgggccgtggctcttttctgtctcccaggctggaatgtggtgtgggagggcccaccatgtacaaagggccggggactaagtggacatgaaataaacatatcagggcttgcctctcttgtgtactcctcagttcacaccacatgagcaatatctattcaattgcttgcaaagaaggccatctgttccaacatttttcctaccctacttccctgaagcactgtggattcatcctcctcagaaagacactacctttctgctaatactcatttaaatacacgctcatggtagaccacagacacctggtccagtatagactggattcagattggaggaggcagacctttggtatagaagcctggcaaggaatctctaggtcatatcagtctcgatatcaaacacctgggatccagtgggatccgagggtagatctgggtctactgcacagtgaagaggaacaggtgggaggtcagcttctctgccaatcaagctggggttcaggctcaggctctattcgcagtggtaactgtctcacaaggcagttccaattacaacttccacgttttcatcctgagcttagaccccatgtctcagttccagacatggatatctaactgcctcttttcatctccattgggatactggatgtgcaggtatttcagttaccacattttcaagactgaactctagtcccccttttcatcttcaccactaccagatacccccaacaagattttctcaagtctatccttatctcaatgaatgaccccaccagccagccatttgctcaagcaagaatcctagcaatggcccacatataatataacttcttcttccccacatataatataactctattatggctttcccaacataaagctcaaatgcytccaattctctgtgaccatactagttcaaggccccgttatgcttcacttgggactcctcatagcctccttattagtctttccacttctacccttttctatctattatctattttctatctgtttttcagaaagcagccacttttgtaaaaatgtaatttaaatagctgggttttttttctttgtttaaaacccatcaatgccttctcagtgaaattaaaacaaaatcaaaatgcacttcttcctgtgtcctacaagaccaagtgctgcagggtctggtctctgtttagctaactcatatctgtcctcccttctctgcaccactcactggcttcatttctatcatttttactgggctagtgctttcctgttcaggaccttcacgcagcagaatttatttcttctcccgggccagtctttcccagtctttgcacggcaggttactttcatccttgaagtttttaatttattgtcacctccacaaacaggccttccccaactacccaatctaaccaggtcacctcttcctcttgttctctgtctttgtaccatatcatttttctttttggtgtttatctcagtggatcattctgtatttgtttagtgctttaattcactaaactcgaggaggcaggtgcaattttgytcagcatctagtaagtacagggcctcccactcaatgaatatctgttgcatgaatgaatcagggtgagcaggatgctgctgctgattcagaaatcaggcatacctgccagcagaattagtgtagtgggcaaatccagaccgctgtgctctgtacacactggctagagttcagtgaagctgggctgggtacacctgagtgtcacaggccttcagcacatgcagcttgacagggcaaagcaggaacagataatatcagggccctcagcacctgtggccattttttactgggggctggaaaagtaactgaaagtctctaacattaaatcactattatatcaaggcacttgaaggatatcaaagaatattgggaaatatatcaaacttacctgtgtatttggtaggggagagacaaacacaaatatctaaggggtcactttcagactactatgccttgtttgtcattgaagtcatcatactgcatttcaggagaatgtactcaatcagaatatattaggttggtgcaaaagtactactgatactatcagatactccataggaaattgctggtcaaattatcggtgaaaagcagttgacttattattcttattgaatatatgagcaaaaacctttctaaaatgatgttctgagacaagccctatcatatatccagctttaatgttaggacagtgagacacgtagaagttaggcccctcagccaggcgcagtggctcacgcatgtactcccagcagtttgggaggccaaggtgggtggatcacctgaggtcaggagttggagaccagcctggctaacatggtgaaaccctgtctctatttaaactacaaaaattagccaggcatgggggtgggcacctgtaatcccagctactcggtaggctgaggcaggagaatcgcttgagcccaggaagtggagattgcagtgagcagagattgagccactgcactccagaaaaaaaaaaaaaagttagaccacttgcccaagttcacatagccaccaagtaggagatcctgactgtaaacccagtcattggtgtataatcttcattattaccttatgagtaaacccacagctatcctacatcccgcacattccttgaacattgattcaatcccttcaaaaagcgcagatgcatattcacaactatcagaagatgggtataaaaaatatactttactgttactgctgtaatgcaaagactacaaaagtctagaaaagcgttttaactgtaataaaatatttaaagtatagaacattatgaagatgaaactaataatcatctcgtcctaccaacaaagtcaatgatgattaatatttcagtgtactttccctaagatttttctgtatatatatacatacataattagcagtcattatatctttttgcatatttaagcatctatttatattttaataattttagttttatcacatcactgatatttttatgtattagtcttccacaaagttttagtagattttaaatatttgattatatagatgcatgctatttggcctgtttccttattgtcatatatttaaattgcttccagttgttttcaggtatataccttttgaacacagtacgtagttgtgagttgaattgtgtgttccccaaaagatacgttgaagtcctaacccctggcacctgtgtctggtacctgtgaatgtgagctcacttggaaatagagtgtttgcagatgtaattgagtttacacaaggtcatagttgattagggttggccctaaatccaatgactggtgtccttacaaggagagcgtttttgtccttacaaggaaacatagccacagacactgtgtggaagatggccctgtgaaggtgaaggcaggaatcgaagtgttattgctactttatttcatttcagctacaagtatgccaaggatggcctgcaactaccaggggctagaaagagaccaggtgggatttttcttcagagccttcagagggagcacgggcctcccagcaccttgattttggacttctagaactgtgggaggatacatttttgtgttttaagccgcctagtttgaggcaatttgttacagcagctctaggaaactaatataatgagaatattttgttctttgaacaaatttatgaaacttttttcttaaaaacttaagagagctattcttatttgttatcattactaatataattggtctaaaacttctttcactaatttattgttttttaaatggttacttaggtttccatttttgagctttttctttgcttatattttctctggtgttttgaaatctgtacgttttactacctttccatttttcaaaatattttttttcctatgttttttaattgtcagaattaagattcaaacagcagtatttgagatgcctgtgcttgagatcagaagtcaagcaaatttaatttttgtcttctttgccactttttacctcttacaatgtaataatagtatgtcacatttactgagtaggtaccatgcccccgtgatagtctttacatgtcacacctctgctttacagatggggggggaaggattgagagattatgtaacttgccctaagttactagataacctttgcatagccactgcttctgtgatctctagcactatgctatcaggccttctaaataaactctggggtggtagacttaattatttaggatattttctatattaattctatcttctattttcagatttcttttggacattttattttgttattaaagatagattgattgttggtttaattggttgaatagctgatttctaaatctgtgtagtacatagagacataatggtattaatatgtatatgaggctcttgctcaaactaaaggcgtcttccttcccaagaccaagagtaattttcagttattcaaaaattgtccatatggtagaaatttcagaatgccaagagacggagagatcaaagagtcacttactattttcttactcttaaatttattcattattaacctgtaatatattggttatttattgctgcataacaaattatcccaaaatgtaatgacttaaagcaaacatttattatctcctagtttttgtgtcaggaacctgagcatggcttagttggatggctctgcctaaggcctttcagaagactgcagttgacatgctggcctaggctgcattcccatctgaaggttcaaatggggggaatttgaaatcagggttcatttcctcataagatgttggactaagggcctcagttctgcacaggctcttggatggaggcctctctcagttccttgccacgtgggtatctcagttttgcaggtgacaacatgacagcaggagtcctcagggcaaggaagagaaagagggctgagacagaagccaatcatcttgtaagtgacattatgctacctctaccacattctattcattagaaggggataactaaattcaatctgtgctcaaagggggggattacacagtagtgtgtaccaggacatgcagactattggaggccatcttagaggcctgaaacatgttggtttcagctctctgctcttgtaacttctaagcagggttgaataatctgagatcatttagaggaatccaacactaaaggtttggtccgctccctgtgtatatgttttgtagggtgtgttttacctcctcttataatctgttaggcagaaataattggcagtgatcccatggacatgttttagccaactttcagcaataaatcagatactcctccattttcatttggtatttagtgttgcaaaggatattgctaagaataatcaaaatttgttgcctcatattgcagaatttgatgactttttcactcaactttgtacttttttattttaagttctagggtacatctgcaggatgtgcaggtttgttgcacaggtaaatgtgtgccatggtgatttgctgcatctatcaacccatcacctaggtattaagccagcatgcattagctatttttcctaatgttgtccctcctcccaccctaaccctcaataggcagcagtgtgtgttgttcccctccctgtgtccatgtgttctcattgctcagcttccacctataaacaagaacataatgttgtttggttttctcatcctgcattagtttgctgaggataatggcttccagctccattcatgtccctgcaaaaggacatgatctcgttcctttttatggctgcatagtattccatggtgtatatgtaccacattttctttatctgctctatcattggtgggcatttgggttgatttcatgtctttgctattgtgaatagtgctgcaatgaaaatatgtgtgcatgtattcccattcctaccaacagtgtaaaagcattcctatctctctgcacttcaccagcatctgttgtttcttggcttcttaataatcaccattccaactggtgtgaaattgtatttcattgtggttttaatttgcacttctctaatgatcagtgatgttaatctttttttcatgtttcttggccacatgaatgtcttcttttgagaagtgtctgttcatgtcctttgcccactttttaatggttttttttttcttgtgaatttgtttaaattccttgtagattctggatattagacctttgtcagaagaatagattgcaaaaactttgtactttttaaaggttatcatcatgtgcctaggcatgcatttttttcactggttttcctgtgaaccactaagctgtgaaccattgaaactgcttacacatgactttcttcatctcatagaatttttttaatcttttatctttgattgttgctactttctttaatttcattcttttcttcagaaacatcattcagcctcaacttggttttatgggttttatcatctgtagctctcatttccttcttcctgcttagttcttttctttgtattctaaggaaacttctgtgcttaccaccgcatttttgtttgagtttatgcgtcattgattctgcccttccttcaatgcatattttaattctaataatggggttttagtgccattgcaattattttttcattttgtcatcactcattttatttcatctttgtatctttttacctccacctgttctttccttaagattatttgatcccatcctagatccttgactttttgtcctcattgaagaagccagatgttttcatgaaatttctactcagtcctgaaataaatgaatgttatgaagtcttttattcttccctattttctggatgctatttcttattcctttttgggcaaatcattttctccatgttggttttccttttacttatcttcaaacaagtgttcagtttcagtatttttcagtaaataaggaagctaaactgtcctttataccctgaggttgaattactttcttagttttgcatgtggagggcagattcatttattcacccattttctaacaggcataaattatagtgcacctctattctatcaacagaacaacttactcctgccctgccttcttatttctctggtttgatgaactgattgaatacatgaaaaaatacatttgtgatatcaaggttatgtctatctccatcttcaaagctgtactattctacctctaggatctccctccaccttcatgtttactactcagtggctttctggtttttggtctgtgtctgaaaatagaatggtatagagacagatgcatctcagcctagctccaattatctaatagctattgcacattttcctaaattcagacatagtctgttgatattagttttaggtttattttagtattttttctgtcttcatggatatttgaacaagaagttgggggaattgcactggttgcttccaccaaacattattttgaaagaaaaatctgtattgctataataatactttccctctccgatctgtttgctacagtgctgcctaaagatctttgtaaagggcatagatcatgtcccctccatcttaaagcaccttaatgaccttcttatccaaactcccttcttgtggaatatttgatcttcagaacctcatgtctgttttattctggagatctgcctctttcctcacactctgttctaactctccaggctttgaccactggcttttcccttacctattatatcctttcctcccagtttgtcttgaaaatgcctgttcactttttaggactcagcttcagcttcatctctaccatgaagaggagacttaatgatttcatctttgtatctctgttgggcaccatgcataagttagtctcagcacctctctgtccttattacttttacttgaccatggctgggcaaaggaagtttctagtttacctctgattccccagatcctggtctagcacctggcatatattaaatgcattttaaaatggtggactattcaaagaacacttgaatgtgtaactacatttcttttttcttctggtaaaataaaaaagggttgaatatgggattagttcttttctttagttcttcttatctcttaaggacttaatacccaattcttgagcttattattttttttccaaaataaaaacttcttgtcctttgaaaatttatagcatgttatgaatttattgtccattacttctactctgtgacagttgtatacatcaaccctcctatcaggaaaaatggcttagtaagctagctgactcttgaatggacattccgacgtgtatttaaaaagctgacttcagtgaccccatctccttttccctccctttcagtttcttctctcctctcttctggaattgttctgattgcctgggagctgcctggtcagctgcaggaggtcctaatcctcacccagataggctgtgaatctctgagggaaccacttggacctttgggtgtcttatttttaatccctgaaaaacattttgacttggttcattgtgttgtttcacatgaaatccatctattaagtagcagaaaaatagtattgtttttctcttcttgaaagctaaatttagtttctgtggaaatgattttgttgccgctaacagtattgcggactcctgtgtgacacagtagcaagtacatatcagctgttaagaaacaaagatcttgctttcctactggagacatatggttaaaaccacaacaacaacaattaaaaaaaaaaaggataccaaaaggatattttgcatacatagaaagaagtcaagagaattagttttaagtaatatatcacttactttcccataaggtatcaatatctcacaaacactgaatagcattgatccaatttttaaaattttgatgttaaattaagatgctagttactttagcaacagggagatggatagagtacattagagagtgagaactagtcttttgctgttgtcacttatgagaatgaaaaggataagaagagctcaggggaaaaaaaaagttcatttctaattgcagtgcaacccacaagcttgcacatcctataacgagaaagctccttgttagctgccaaaatctgccatccaatctgtctagtagttgatttcgttattacattttgatgtgcccttgacaagctttagcacacaaaaactcaacacctcctcctaagctcctccggtaccagaaagatcatgaagggatgacaaaggcctgtgcttggctttttattattcacatagctagaatgtttataaacagaacagagtgtaacgagagcaaatgctcaaccacatcaagtggttcccgtgtcttgcatgtcatttaaatatcgatttaatctcgtcctgcactatatgcttcacacacacaaagacccaaaccaagtgcctgaaaactgtccctaggggctttcaaaatgtggacaaacaactctcttttctttggataattgtgatgccttgttccaccactttgggtctatagcatctggtgtttctgaaatcatctttagatgtcactgtgatctctttggtcagcactggtccactatctgtcccctaactcaaccttacagatttacgtctgcacacagattcaagtgggggaaaatagacaatacaattagagggaattgaattaaattattaatttcatgaaatatattataaaccttagaacaacttaggcgaaaggcaattaaaacaaccaatgccttgatgccttaacaaatataattataggctaggtgactataattataggcaatatcacttttggaggctgaggcggggcatcatttgagctctgaagttcaagaccagcctggacagcatagcgagaccctgtttctacaaaaaatcaaaaaattagctgagtgcggtggcgtgtgcctttagtcccagctcctcaggaggctgaggtgggagaatcacttgaacccaggaggtcaggcctgcagtgagccataattgtgccaatgtactctagcttggattatagagggagatcctgtctcaaaaaaaaattaaaaattaaaaaaatttatataattatatcctctctccctctcgctcttttccattcactagtgttaatgtgctataaatgtactggctgggtttcactgaaaaggttataacctgctccttgggagtaaaatactgctttcagcattattcttagctacactaaacttcataggaaagcagaattctctcccctactctgacaaagttttactttgcaaacttgtccactggtaaccttgagtgttatggaggcgtcagttacaaagctgatgacccactctgagccaggatattctttaatgccagggacagtgattgtcctgcttacagagggtcaagatgatcacaatatgtgagtaattactatttttggcaaggtcaggggaggggtaggggacagtggtgaaatcaaaaatgttcagtttaccacaatcataaaaatatatgccaggagatacatttcaagaactgtattaaaccacaacaataaacttttttttggccatatccaatggagaatacttttaaatccatgtatatgcttaatttcttgtattctgtgccatactactgatgttttaggttgtaggctatattgagcttcctgtctcattatatttgccaaaaacatattgcctttggaaaaataagttgttaaataatagaaggaaggagccgagaggggcaagagaattaacaattattgactaccttctatagccagatagtcataattgtttgttgttttacatatgctatacaatttaatataataatcataatatagatctctttaagataagaatgatccatatttcccagataaggaaaagataaagcaagattaagtaacattcccagagtcacacagctagtattttaaaatcttggtcagtcttaagtcaaaatcatgcttattatcatagcatcttttttttttttaatagacaagatgtctgaacaccgagatttgaccctaacacactaattctcccaggaaaaatgtgtacctcaaagggatattccaaagtttgccttacttaagcaacaacagattgaaactatttgtggatatagtactaataattctggtagaaatatgatgagaagcaaatagatccactagctagaggtagccggtttgcatttgagattaggttattctttcttgttttaaaaagtgtaattaaaccaactgtcctaagaaaactcttccttctgtcccacatgtaaccaattccagatgtgaaactgattccctacaataattggttagtgttttactttcttaaaacctactccttgacctttcttaaaacctactcctctctcaaactcatttagatgctagtttccagactgaaatcaaatttggaccctaaaatgaggaatgtctgcaaacagaattccaatttaatttgcactgttctcgaaacattagaagttgaagggaaggaaagaatgatgatctcccgagggccagagatccaaccccactctttggtgtgttcctgtggtttagcccctcttccaggcaagaccctcaactggggctttcttggcttggagtcattttgctgcagttaacatttagttcacacatcattagatgaagccctggttacagagatacactgctcttgtcatagcagaagtatgctgcatgcacctgcagtttgaagtttttgttgagggaatagactgaaatgaatgaaaagattgaaaccgtttacttttttgtgactccacctgctgtggtgtatttttgttggacagaataactggaggtgtgtttatagcttcagggaaaggatacattaggggttacatgattttaaggtgatttttttttctttaaagctataaatcaaatttccatgaaaacagttatatgtatataactgctatagaatttgtggagatatatatgtatctattatgcttcttttccccttggtgagtaagaaaggaataatttcctttgttgttgtcatcccagaagtaatttttccatggtagtggtatgtcagtaccatatctgtgctgtatttgagattgacaataatgtcaatcgatgctagcctatcatatctacaaacttataattattagattctgttttaagtgtctttcagaacgcatatactgtatcaagtgctcagtcaggccctgtaacatttaattagtaatctcgtgaggtagatttttttttgagacggagtcctactctgttgcccgggctggagtgcagtggcgcaatctctgtcgcccgggctggggtgcaatggcgcagtctcggctcactgcaacctctgcctcccgggttcaagcgattctcctgcctcagcctcccaagtagctgggattacaggcacccgccactaggcccagctaattttttgtatttttagtggagacggggtttcgccatgttggccacgctgatcttgatctcctgacctcgtgattcacccaccttggcctcccaaagtgctggrattacaggcctgagccactgcgcccggccatgaagtagattttataatccccattttctagatgaaggacctaacgtgaaagaagataaatgtctggctgaagcttttgcagctcttcagtgatggagctgggatgataacctcagtcagacaccaaatctagtgatccatgacacaacagtaccaaggaaaactcttagagggaattgaattaaattattaatttcatgaaatataaaccttagaacaacttaggtgaaagggaattaaaacaaccaaagcctctaatgacagtgaaacacattattcctttattgtatcaagtcttcgattaagccatttttgtccatgaattctaggccttctgtctgttggcatttatgttgttaatctctgaatatttacaagtcagcatgaatatatgatgtataacctcgttattgaggagtctcaactctgagatagaggcatgaaatggtcttggttttttccagttattgtttcaactctgttatgttgaaccccttccccctttccgtctcttaatttcctattgagatgactccataagtttctggttattttaatatgagacctaatattattataatcccaaactcggcttaaagtcctatctttttcccatttaaggggcagatctgtcctggctctgatttcccttctcctcatcctcatcaagacctagatccttatctgcgggtcagggaactagcaaaggcagatactctcttgtgttactctggttacaggcggtaggggaagtgtccctggctgtactccgatttgatctagttctgtctgatgctatggacacttcatttaaggtgaatgtgttttgagtgatgaattgtcttgggataggcttacaattatttgagtcccctttgttgtgagtactttctcacagagaggctgtttagttttcctttggcatttccagccgtaaaatcccacacccctcacagggtggggtagcctcatgcctggcctggtggcttcttgtgtaacccatggcttttgcctggctcttcctctccatgtgtcatcacataagccaagaaagctacagaaaatttcttctgttctttgagggcccggggaaactggagtggtgtggagtttgactcatttcattcctaggaacagtactctatttgtccctacaagacctgttggcatggctgctccagtgaggctctcatttctggaagtttctagtctgggagcagtcactagtctctgcttatgaatgcactcacacttctgggaatggattaggcaggctttctctgatgttatagggatctaatatgcaggacagatcaactcccaaaattatgcttaaccgaacaatgatactttattatcccatagtttccctgggtcagaaattctaaagaaatggctgggcagttctatttcagggtttctcatgaggtcacagttagatgtcatgtggaggtgtagtcatctgaaggttttattggggctggaggatctgcttccaaggtagctcacttccatggctggcatcctggggctcactatgggcagaaagtctcagctcctctccatgcgtgcctattagtagagctgcctgagcgtcctcatgacatgatgctggcttcctcccagaatatgtgagccaagagaccaaggcaaaagctgcatgtgttttgtgacctcagctcataagtcacaaactgtcacttctgtcctgttctagtagtcacatagagtagccctaattcagtgtgaaaatggrctacacagatatatgaataccaacaggattcttgtgggtcatattgcaggctggttaccacagtgggccttcaggtttctgaaacttaactaaatgaaaaacaaaacagcaggaaaaagaagccaatccacccttcttgcatgcagtcccaatttctaaccagtgactcactgagagccctcgaatttacttgacttggggtgagggacaccatcactttctcctccttagatatactctactactctactatacaatagtgtacagtatagtacactacactgtgagtgggagccaacaactcatttctcttctcttcttgttcctctccttattaaactagagaggaaatgtggagttatggttggtgtgtgaggccactacatctaagtaatttttttgaagacgtctccaacttccattataagacacatgatggatgtaatattggttacagtgacagctgctataacaaattaacaccaaaatttgaatggcatattcaccttcagtttataggtttctcacgtaaagttttctaactgggaggattgctctatatagtcattgaggctgagagaggctctcccatattcaatatgaggtaatgtctccttgacattgatatacagccagtgaaatggggtaaggcagagagtatgggaagtttgttattgttgttgtttgagatggagtcttgctctgtcacccaggctggagtgcagtggcatgatctcggctcgctgcaacctctgcctcccaggttgaagcaattctcctgcctcagcctcccaagtagctggaattacaggtgcccaccaccatgtctggctaatttttgtatttttagtagagacggggtttcaccatgttggtcaggctggtctcgaactcctgatctcgtgatctgcccgcctcggcctcccaaagtgctgggattacaggcttgagccaccgtgcccagccaggaggtttttatagtaagcttggcctgaacttgcactcatcagttctcagacctctttggctttgatgatctgtcttcctctctgctactacctgttggaaattcattcaggcgggcataccttagatgtaatcactgccaacatcacaacagagttgtgccacctcagaaaactttgtttgataaaaacaacccagtctctgacttcctctgtttacctcacttactctgattctgcctttccaagaactctcccactaatctacagctgtacctgttttcagttcctcaccattctccttgtgccctcacctctctgtctactggcctggattcccgtcccagcattataaccttcttgccacccctgtcccttcattgtacatgactgggaaccccctgaggctggttaaaaccaactgtctacttggcgccacacctgtatttgtgctcttgaacawtgtcagtgaaaaaacatgcaactttactcactggactcgttacaaatttacaaccaaaagtgtgaaatgggtgctccacactgcatagatggactagaggactcactttcttattgtctaagatgttcatttcacaccttctccagtctcttcttaaatgtttttagctaatgacctcaatctataattcttagagataattgataaaattagtcaataactactttaacttctcattgctcatcatgttacactgaaaagtgattcctgcccctaaaaccaaccgcttcagtttttttcttagatcctgtcttttgtaccttctgaaagattcagttaccattatcccctttctgtcttgcatcatcaactttttcctctctgccagatcatycccactggcaaataaacatactgtaatataattcgtcttaaaatgaaaaacaaatccccttaatttggtccttctttcaagtgccaccccatttcttggctttttttcacagaaaaactacttgaaaacattcttcaaattcactaattcacaaattcaccctaaattttcccctctcatttctttttcagtctgctgaaattggaatttgactcctacaactctactaaaagctttcaaccagatccccattgatctatgtcttgtcagtgccaatagttaagcccctcctatactcagcctctcagcagccaccctggttacatgtttcttctgaaacayggtcttttcaggctttctgcaacacaacatcctcttggatttccttcttcttggtcttctttgctggcttctttttctctaccatgttttacatgttagtgcttcagccataccctctctcctgatgacctcatccagtttgagttttttaaatcactgatacacagatatctctaaattgttctcgccagctcagtctgcaactaaggtccagacctttaaatctaactgccaaactggtatctctactagaattcgtaactctaaactgacatgcaaaacagagctgtttgtttttgtcaaacgtatctcccccttgccccaaagcaagcttttctcttttcagcaaatggtgccatcaaaggcctagtttcttaagctaacatccaaagaatgtccttgaggtttgtgagattttttatttttgtccattgacaagtcctgttggttcaacctccaaattatagtcctaattcaactctttcttaccagctctgttgctgaaacctagcctgcactgtgtcaccagtttggtctacttcaagagccacctcactcgtctcctcacatcctctgttctcctcctatagcccatcctccccacatagaagtcagactgctattttaaagatgagatcatgttatttctctgcttagaatcatccaatcgcttttattatcataggcttcaaggtctacctgaccagaccctgcctagtcctctaaccccaggcccctcctctctccctccttgttcactgtgcttctgccacattggccttccttttgggaccttgaacctgccaagctcatccctatcacagaaacattgcacataactatttttttgatttggaatgctctttctccagggagttgtgtggcattctcctcctctttcaggtctcatttcatatactgcctcctcaagaaatcttgcatgactatagaagctaaagaacttccactttgcatcatagcgctctatttaattttctttctagccgtactgggacctgaaatgatctcaacatattttatattttcatgttaccttttaaaaaaattaatacttataatcatgctctaatacttaagctccttgaagacaaatcctttttcgtttgcttcttgtgatatgtctagtgccaggaacggagcttccctcagagtgggtgctaataaatatttgctgaatgaatgactaactctcgtaatttcaggcatttcaattataactgagaattcaatgtgacagtcattagtatagcagcaatcttgttttctatatgtagaaaacaggcaggtttagtactttaaatgacattattaaaaatgttagcatactgtccagctaatggcagcacattagtaaactattttatcttcatactgcaatgaagaattatttccctctttcatgaaggtaaataaagaattgatcagtcttatggactttgtttaatttttaattaagggtaattctttttaaatagctattttaactttttcttgcttactaatgtaatacatgtatatttcaaaaaaaaaatctggaaagtctgggaaaaatagttatgtgaatgtattattcactcttaaagccatccagagaaaagtatttctgacattttggtgtatttctttctctcgttggtctccatctctgtccctgtctctgtctctttgtcttcttttctcactatattcaccaaattactttgtggtgtatgtgtgtgtgtgtgtgtgtgtgtgtgtgtgtgtgtgtatcattacttaaaggtttatttctcccaccccaagtctctcttggagatcctctgtgatggggtggtctcttgtatgttcctaaattaatccatcccgtaggcatgaccagtaacctgtttctagtactctgcccacctgctggttgtcccttagatcctctcaattgtatttatctgaaaataagcgtgcttcaattccacccagtcccatgcacaggaattgtgtctggtagaaccttgttcttcgaagggtaatccatggcccagcagtgttggcatcacctagaggtttattagaaatgcaaattcttgatttccaccttttatggtttaaattatgtcccaccaaaattcacatattgaagtcctatccctaatacctcagaatatgaccttattgggagataaactctttacaggggtaatcaagttaaagttaggtcactggggggagggcctaatccatgtgactattgtccttataaaaagggaaaatttggacacagagaatgcatagaggggagatggccatctacaagccaagtagagaggcctggaacagattcttctcttaacgtcctcagaaggaaccgatcctgccaacaccatgattttcgatttctaccctctaaagttgtaagacaatatatttttgtttttaaagccactccacttgcagtattttgttatagcagtcctggcaaaccaatgtaacactgcaaagctatgaattggaatctgtagtttaagaaaatctccaggtgatttttatgcatgttaaggtttggaaacatggagctagagtgctttacagagcaagtcagggaaatctaactcaaatagtcattaacaataaacagaatttattgcactggctcaatctggatgcatgctagggtcacctggggagcttttaaaaatcataatgccaggagcataacccagaccacttaagaaagaatctctggaaatggatcctaggtatcagtaagcttccctgaagaacggaatgagcaaacagagatgagaactgctgatttactgatgtatgtaactgaaacaaagtcctccactgaataactgggaacaagcatcttcacttatttaacattagattatgctaaatgtgcaatgatgcttataatcttttaaatttaattaaaatctttttctggagctgggcacggtggctcacacctgtaatcccagcactttgggaggccgaggcgggcagatcacgaggtcaggagatcgagaccatcctggctaacacggtgaaaccccgtctctattaaaaatacaaaaaattagctgggcatgatgggaagtgcctgtagtcccagctgctcgggaggctgaggcaggagaatggcgtgaacccgggaggcgtagcttgcagtaagctgagattgcgccactgcactccagcctgggagacagtgagagactctgtctcaaaaaaaaaaaaaaaaaatctttttctgtgtcatttttatggcgatctaattttttcttatatgtccactgtaattattttactaatgctgtattattgaacaccctggggaatatagatacataaggctgggccaagaaagtgaactttacaaagcaaatttacaagtaccggccaggctggatgtggtggctcaggcctgtaatcccagcattttgggaggctgaggcgggcggatcacctgaggtcaggagtttgagaccagcctggctaacatggtgaaacccygtcgctactaaaaatacaaaaagaattagccaagcattgtggcgtgcgcctgcaatcccagctactcgggaggctgaggcaggagaattgcttgaactcaggaggtggaggttgcagtgagccaagattccagcctgggcgacaaaagtgaaactctatctcaaaaaataaatwaataaataaataaataaataaataaataaataaataaagtactggctcaagagagaagagaaaaaccaggaaaatccagcatgagtgaagccaagtgaaaacaccgttttaagaagaaggcagttttcaagggtggtgagaactaaagagaagtgaagtaagagaaaggaataaaagtttccactagtttgagcattccagaagccattgtagggaaagaattactctctatagagtggggaccaaaaccattttgcagcaggttgaggagtggggattggggaacggaggcagtgagtgaagacaagtcttttaagagtctaggtaggatagggagaagataaggtgggagcacaggatgtgacagcaaggttcttatttattttgaaatttaatgtattttattttttaataggtgtgccggtaagtataaatgctgaggttgataattcagataatgagaagaaatatatacttatatataatggtatatacttatatatgcaggcttatatactggtggatataagcctctgtatagggtagagagaataggatttgatcgacagtttgaggaaaagagccttgaatgggagaactgcttcttgtggccggaaggaaagaagaaagaagggagggctgggtgcggtggctcatgcctgtaatcccagcactttgggaggctgaatcatggggtcaggagatcgagaccatcctggccaacatggtgaaaccctgtctctactaaaaatacaaaaattagctgggtgtggtggcacatgcctgtaatcccagctactcgggaggctgaggcgggagtatcacttttacctgggaggcggaggttgcagtgagccacgatcacaccttgcactccagcctggtgacagagcaagactctgtctcaagaaagaaaggaaggaaggaaggaaggaaggaaggaaggaaggaaagaaagaaagtagggttataggttagtttttttttttttttttttttttttggkgggtggacaggatatttagggattttctgcttcatgttttccatttttcccagggactggtaaacaagaatgttttcaaagaatgaagaaggaagtagtgggcggatagtgggaagaccaatgatatgaacaagctactgtgtggaatggaaaaaaggaaagccagccagggaaaccaagagtgtgttctgcttagtgctgaagatccagtgacttcagatataatacatttatgttccatgtgttcgtatgatttcccccaacactgcataggaaaggacaagtctgataattagattggttcaaagtcataggcttacttgacgggtacaacataaagaagaagtggacacaacagattaatatcaagaaagatgttaaagtgatggatcatggactcgcaacttgaaagataagaaagtgctcatgggagcactttgcgaggctgagcatgaggattgcttgagcccaggagtttgagaccagccttggcaacatagtgagacctcgtctctactaaaattagatgtggggttgcacgcctgtgatcccagctacttgggaggctgaggtagggggatcatttaagcctgggaggtcaaggctgtatggttgtgccactgcattccagtctagatgacacagctagatcctatctcaaaaaaaaaaaaaaaaatgctcattgggacaacaaaatgaatgaaaggactgatgatttctaatgagatagaaaacattttatgtgtctatttagttgattgtatggtttttgtttttaactctgttaatttaattaattatatttattgatttgcatatgttaagccaatcttgcatcctaggaataaagcctacctgatcatggtgtattaactttttgatgtgctggagttggtttgccaatattttgctgaggatctttgtgtctatgttcatcggggtgttggcctgtagttttctttgtctgttgtgtctttgccagtgtttggtatcaagatgatgctggcttcatagaatgagttagggaggagtctctcctcggttttctggaatagtttcagtagaattggtactagcttttctttgtatgtctggtagaattcgactatgaatctacatctggcccagggcttttttttttttttggtaggtttttaattacgaattcagtttcagaactcgatattggtctgtttagggtttcagtttcttcctggttcaatcttgggagactgtgtatttccagtaatttattcatttcctctagattttttagtttgtatgcacagagatgttcctaatagtctctgaggatcttttgtatttctgcagcattagttgtaatgtcacctttgttgtttctgattgtgtttatttggatgttttctttgttaatctagccagtagtctactgatcttgtttatcctttcaaagaaccaattttttgtttagtcaaccctttgtatggatttgtgggtctcaatttttttcagaaagcaactgagaaaaaattataaggatattatatttgataccaagaaacctgatattcataaaattagaacattatataatcataattaaagcaattatttaatcacagtttcagtgctcattgctaatcttcttaaaactgagatttcatacttgagttaatttgcatttgtcagaatataaatggtacatctttaattaaattcttttacagtatgatatattggtgaatggtattgactgagtcctttcacatcttagaatgtttctgtgctgtcttcacatatgcagtgcagtttgagttcagaattttaaaattatttctttcaaacaactccgaggtatttaatggttttctgccattcattgcttcattcatctttatttttattttattcctttgtagataatcttctaatttatatatgaatagttgtagattcattatatgtaactgaagtatttaccaaaatatttttgtcttggggatcttttcattgattcattctctaaaacagaattttctttaagaaaagtcaactttggagacttctgctcccagaaaagcagaataaatatttgtacttttctctattccttctgctaagtaaaaacgaaaactctagatattatatatgaaacaaacataagaagactctaaaaagtaaagagaaaaagacagactggttagrcatctcaagacccaagaagcaataggatggtcagttcttttggacttatatattccagagttagagctaaagaaggtggcaatctggaaaccctaataggccatggacaatgaaagctccaagaacaccaaaagacaaggaaaggggcagcctcacaagacaaaaatattttagacaataactgctgtactctagccaaacaccactgaaaaactgtgaactcacccccagtcactctaaagccaagttgggagcctagacttctacccttgtcagggtataatgagacactccaacccccctgacagggtgttcagagaaggccaaataaagaactaggactttcatctctgccaggctgagaccacatagggaggctggaattttccctctactcagtagtagcaaggcccccttctgtgatgtcggtgccacatgaggaataggacaaagattwtttgccccttccattcagggcaattttaagtggagacctactgggaagccagaactcccactcctacctagtgatgagtggtttcctcctctccagaaggtctaacataggccaaatggggaacctagacttctactctaacctgccagtacaggggtggctgtattgaagcagagttagatgaagccagctaaaacagaaggtttaaataaggtccagagtcacataacataatacccaaattgtgtaagcttcaaaaaaaaaaaaaaaaaaaaaattactcatccaaccaagaactaggaatatctcaaattcaatgaaaacagacactcaatagatgccaacagagatgctagaattatatgacaaatattttaaagcagccataattaaaatacttcaagcaattataaatatgcttgaaagaaatgaaaatatagaaaatctcagcaaagaaatggaaagtctcagcaaagaaatagaagatctaaaaaagaatcaaatggacattttagaactgaaaaatacaataaccaaaaaaaaaaccaccccaaaacaaaaaaaccctcaacttaatggtggatttaacagcagaatgaagggaaccaagaaaagaatcagtaaacttgaagatagaacaaaataaatcacccttaatggacgacagatagaaaatagactagaaaaaaagaaataagcagagctttggggacctgtgggatctaacagccctgttactggagaccaggaaagatagaagaaaaagaataggtggaaaaagtactagaaaaaatttgatgaaaagctcaccaaatttgttaagagacatagttgtagagattcaagaagtggagcacaccctaaacaaaaacttaaagaaattcatgccaaaatacatcataatactgaaaactaaaaactaaagacacagaaaaaaatattgaaaacaactaaagaaaaataacacctttcctacagaggaaatacaatttgaatgccagtagctttctcatcagacatcatggaagctacgaggaaactgcactccagcctgggtgacacaggagactccatctcaaaaaaaaaaaaaaaaaaaaaaaagaagaagaagaagaagagtttcatatcagtaatctaagatctttcttacttcaagaacctagaaaaagcagagcaaaataaaacagaaagagaaggaaggtattaataaaggtaaaagcagaaatcagtgaaattcaaagcagaaagccaagaaagaaaatcaatgaaacaaagggctggttttatgaaaagaccaataaaattgacaaaccttttcaaagactgacaaacttaaaaaggagaaagaacgtactaatgtcagaaataaaacaggatattactacagaccttgcagacatcaaaaggataataaagatatactacgaacaactatacacacataaatctgacattaaaaaaattttttttagagtcattgtcttgccatgttgctcaagccgtcctcaaactcctaggcttgaccagtccttctgcctcagcctcttgagtggctgtgcctgacttaaatttgacarcttagatggaattggcctcctttcaaaaatgcaaaatactacaactcactcratattaaacacataatataaatagccttacaattattaataaaattgaggtcaaaattttaaaactcccccaaaagaaaccttcaagcccagatgattgcaagggaacattttaccaatgttaaaaaaaacaaaaaaacccaccaattttacacaaacctctagaaattaaaagaggacagagcacttccagttcattttatgaacagacaaggcagtacacaaaagaaagctacagaccattatccatcatgaatatagaagcaaaaatacttaaaatattagcaaatggaatttggcaatatataaaaataattatataccatgactaaattgggtttattccagggtgcaagttacaatgcttgaaaaccaaatgttatctatgtcttgctcagattttgataggaattgtgtgaaacccgtatatcaatttggagagaattggcacttttcatctgttgagtctttcaatctgtgggacaccatggatccatcatattaacaggctaaagatgaacaaccatataatcatgtcagtcaatgaagaaaaagcatttgacaaaaatgaaacactcattcattataagactctcggaaaagtataaacaaaggaaaactttgtcaacttgaaaaagagcatctacaaagttctggaagttctagcctccacaacaaggcagtgaaaggaaataaaagatatgtgaattggaaaggtagaaaataaaatggtctttgtttacaaatgacataatttactgaatacttctagaactaaagattgagttcaacaagttagggggtgcatgttaaacacatcaaaatcaattgtatgtctatatactagcagtgtacatgtggacaccaaaattaaatatgcagtaccatttacattctctcaaggataaaaatgaaatagatgtaaacctaacaaaacatatatagcacttgtatgttacaaactacaaatgctggtgaatcaaatatacttttaaagtggagatatactgtattcataaattagaagataatataggaaagatgtcatgtctccaaattcatatataagtttcatggaattcctgtcaaaatccaagcaaaacataaacaagcttattctaaatgttttatttagaggcaaaggatctagtccagcttaaacaattttgaaaatgaagattaggaaagtaggaattcgtctacttggtttcaagacttattttatagctacagtaaacaagattgtatacagagaacagatagacacatagatcagtgaacagaagagagaacccagaaatagatccccacaaatatacccaattgatttttgacaaaggtgcaaaagcaattcagtagggagagagaacctttttaacaaatggtgctggagaaattggacatccataggcaatacaaaacacaaaacaaaaaacctaacctaagtttcacatcctatacaaaaatttactcaaaatacatcacaaattttaagtagaaatatctttaggatctgggttaagcaaagagatcttaagagttgacatcagaccacagtctgtaaaaggaaaaatggtgaattgaatttcatcaaaattaagaactttcctctgtgagatactttattaagagatgaaaagacaagttacagaatgtaataagaagaaacaaactattgatacctgcagtgacttgtatggatcaccagggaattatgcccagagaaaaagacaatcccagtaggttacatatgataagattccttttatatgtacattcttgaaataacaaaattatagaaatggaaactagatgagtggttgctaggatttaaggagaaggtgaggacagaaaggaagtggatgtgggtgtcaaagggcaacatgaaggatccctgtggttatgggactgtggtgatggaatatatctttactctatcaatgtcaacatcctcactgtgagactgaacaatagttttacaagatgttaccattgaaggaaactgcataatggttatgtcggagctctgtattatttcttacaactgcatgtgaatctacaatcatctcaaaataaaaatttcaataattttaatttcatttaggtatagtttacatacaataaaatgcctccttttcgtgtgtacaatttgatgagttttgataaatgtataaatgataaatgtgttggtgtgtacccaccaccacaatcccccaagcaggctccctcatgcccttttgtaggcgatcttccctcatcccagaccttggcaacctgcaatatgccactgtaaattagtttgtgttttccagaatttcagtatttacttttaaaccacaatatttagatctctatcaatatcagtaatattttcttcaataacttataactagttttgttccatttgtctttgtttcttatttggaaaattctattttgtttagattaaaatttggaatctccwtcctccatgtctgttatcttctttctcatgttgttttcatttctttgtttctttcttctatgtatcaggagaacttctcatctttgccccttaatcactgatttgatcttctgtagagtgatgtgtctgttactctcaccaacatggattctaatgctgctctgtgctaagtatttcttataaaccacctgtgggctctgctcctctctttgctgctctgactctaacttcccgtggcctttcatcatttagtttcttcttctgtggatgctatttcatctctttgccaaaactccctctgaaccactgagtcacttcctctatttaaatcttgcctcaaagccttcttttccttttttatttatttatgaatgaaactctctgtgaggagttttgtggttctatttaagggcgctatgtaaagctgaagagtattatataaccatccataaaatgtctctgactgaagtacaacatacaaatggaggctgtacaattcataaacttcttttatagtcacctatcacttaataaatatgaggggactaactgcattacatttttttcatgaacaaaaaccagtctttgaaacaaaattgcctatgctttggagccgattctatctttcatggtctaaaatttatgcattgtgactttgtactgttggagatcaataattcttccctcaattatacaaagggtttttgctaccttaaaagatattccagatatctagaaaccttttctacgacccaaactcattttctgtcaaagccacttaataacaaacaggcactacaacaataacaacaagaaaactagccacagactttacacttttaaaagctctgttaaaatgaggattgatccgattaaagattaagcatattatgcaagaaaaaaatgtaaaaggcttaaactaggagtccattctttggttttttcaaagaacaggtttgttattgttaaagtaccaagtactatttcttcttggaaggtataaattttataaaaggagtggctacataaaatggagacttttactataggatacacagtctgtggaaagtttcattaccttgtagtgcaagctccctattgcagtttattgccaaatctgatgcttcacttcagagaaatagagctggttggtgccaataatggcagaagaataagtcctttaaggatgggcagggatttcagttcaaaatggcatcatattcacattttatgaaatgtccttccctggctctctactgaaatactcatgaagacatttaaaaaggcaaaacagttatgaaaaccaaagacagttgtgaaccatttaacagctacagaggaattctcaccaaccacagcaggaaagaacctggacggggaccaaaaattgtggccccggcatgtgtgcctccacttccgaaaaagagcctcatccatgaaaaataaaacagtaaaataaataaaaataaattgggaaatgtataaaaatgactctagttcacaagtagaaatgaagaaatccagacagtctggtttttttgtttttgtttttgtctttttttagaggaaaggttggtatagaaatagttttctgtttaagtacatagcaatattagaatgtatatcaatgatagtaaagaactatagaaaatcaagtcagtgatttaggagacaaagatgagaagttctgccgtccatgatgcagaaggtggaggtgagtgctgtatattaggaaagtttttgattgaacctagtctacttagaaggtggagtaagatcattaagaatataaattagagtatgactctagagttgaaaagagaatctctcctcctgttagataattatatgtaatattatatatgtatttctaaaatcttttttttttttttttgagacagagtttcactctgttgcctgggctggagtgtagtggtgtgatcttggctcactgcaacctccgcctcttgggttcaagcaattctcctgcctcagctccccaagtagctgggattacaggcacgtgccactatgcccagctaatttttgtatttttagtagagacggggtttccatgttggccagtctagtctcaaactcctgacctcaggtgatctgcccgcctcggcctcccgaagtgctggggttacaggcgtgagtcaccacgcctgaccaatttctcaaatcttctaatgtgtaatcacatatgtataaaatatatgttgcctatatgcatatatatttgtatgtgtagaaaatgtggtgtgttttagaaggagaatgagtagttaactgtgcaagtttagttatgctaggctcagagagagacaaaagcacaacactgaggcctggattaatagaagcacatcgtgctaaaagaaacgtctagtgaggccacttaagctacagctgggggtcagaagtgatgtctaagatgaaggaggtatgggagttgggcaaaaagagtcagggaaattgctccatgcagaggtgctttcggctgcaaatgcctggagctggaaaagcatcaggaacggggagacatccaatatggatcaaacacagaatgagcagtaagagttcggagacagaggtgtcagaatggagaggactgctgggagatggggctggaaagcaaggaaggggtaagtgacacaattcagaagtatcatgtcaaggagttttgatgtaattctttgaacaacagtggagaaatatgaacaagtatagacaagaaagatgtctgtggccgcagtcagattggagaggagtcagggagaccagtgaggtggctgaggctagtcacatctggaaagcagataaaaatgrgtaataccaaatatataattaacagtagctggtaattgattagatttggatggggttggggagatgtgggagccggaaacaggaggcattgacacataatgatatgaccaaaagctctggactgaacagtgctaggcttactttgtaagcatcatcagtcttctcatctagcaaagggactgattaaaaaacttacttcatggagttattgttaaatttagataaaatagcatatagagtatgcttggaaacagtatagaattgaaatatggctactattacttttctaacaattattactttatcatcagggcaacaagtgaaatatgttttatgagatcttgcatcttgatcttttgccaatatatrttttcaattcatgggctaaataggaaaagtatataccagatcctgcataatgtttacttgggtgttactcatcgaagcagagacacaccaaggagaaaaatcccttgcggttttgttttttkttttttttttttttttgagatggagcctcactctgttgcccgggctggagtgcagtggcaaaatcttggctcactgcaacttccgcctcccgggttcaagcgattctcctgcctcagcctcctgagtagctgggattacaggcatgcaccaccacactgggctaatttttgtatttttagtagagacggggtttcaccatgttggccagagtggtctcgaactcctgacgtcaggtgatcctcccaccttggcctcccaaagtgctgagattacaggcatgagccaccacgcctggcctattcccttgtgttttgaagtttactattttgtttcttcacacaaaaattgttataaaaaccaaacatacaaatgcaaactttcagaatgacgtgtgtgtgtgtgtgtgtgtgtgtgtgtgtgtgtgtgtgtggtgtataaagggtcatactctaacatgccatgccatgaagtgcccacataagtcattcacctcccatgtgagttttctaaatgttccgaaacgtatgtatggaaaaataagctggcccaatcagtgttttcacatttacctctaactctacagcttttatcattgcrcagcctgcatcccaacaggcaacagttataacaaatgtttcaccactgcataataaaggtaatcctgtttccaaacagaaagagttggaacctcacagccagatgtcctatctctttcattcggccaactctacattttaggacgtgttctctaaagcaccccttcttggttcaaaaaatgaggagttctgtcagccgtaagtgatagaacacttagctaacagtggtataaaaacagggtttattttaatcactcaccaaagtggtaggaagttgccaacattaatttacttacccaacagtgtcataagggacctgagctgtttgcttgttttcattccacaatcctctgctgtcagcttttcaccctcatgcatgtcacatccctgctgtaagatagctacctcaaccccagacatcatgttcatagcagaaactgggaggaaggtgctgtgtgatgaactctctttctacctgctccttttataagacagcttcctcagtagactcctgtttatgtctcaytggtcagaacgagttccatgcccacttctggctacaagagaggctaataagaacgttcatatcttgcttttaaaagatctctatagcaggagtcagtcaaaagagaatggggttggaaatgacgttgggttagtagctgtatctattgctacataatatacccccaaatgtagtggctttaaacaaaataagtgtttcttatttttcacagtttctgtgggtctgaaattcagaagcaatcttgggtgatcttgactgttacatgttggcctgggctgcactcatctgaaggtttggactggggttgcaggtgctgcttccaaagtggcccagggacatggctggccagcttgacctggctattagtggtcagcttcagtttctccccagtaaacctctccacagggcacagccgctggcttcctccagagaaaatgattcaagatatcaaagcagaagctgtaataccttttatgacctgttctcagaggtcagacatccttacttctgcagtattttattgaaaacagaggtcatccctgttcagtatagagggacatcaaaggcatagctagtaggaagcaaggatcattggttgccgtcgtggagactggctaccatagcagcaaagatctaaggtgctgctcctattttatctcctctctcactcggcattggttttttgcactcatagtaacatttttacagcttttcatgctccctgtccatgagcaggaatgagtgaatatatgatgaaggaagaagatccttgatctaaagctatttttagttgtcaaaaaacaattacccatacttccctttttcaccagaaaaatccctctgaactacccagccaccaaaagaaagaaaagagtacacagtggggtgtgaatggcaattcatactttcccttcctgggcaaatttgttggaacccaaaaataaataaataaataagccagacatcactgagtgatttttaacaaaatcataagcaaaattccactataataacatagaatgaatggtatgaattgtttttccagtagtgaactattcatatagtatatctagatgagacataagggcaaggaactgtaacattttgaatacagttttgtgctttagggcagatattttttcctacatgaagaaaatataggtaatttgattcagtgaatctcacactgtaaccaatttggtttgtttgccctgggcttttagaacagtcctttcactactattgcgaagtgttattaaaagcaaacaacaaacaaagaaacccgtggcaaataaataaataaatagaaaacttagccacttcagctcataattttgaagttccttctggttgactttggtagccacctatagttcaagatagtggtgaccaagaattattcaaatcagagactagacataagagtactttgcagagcccaggccacccttctgaagggttcaggccattgggcttcccatattcttatgcctcattctcttttatgtgaaggtacaaacgtctctgtagtatgtctacccagttcacatatcttgacactaaattcactgagaaaggagcatttctaatatccattatgctgaagaacaaggcccctagtgtttatcaatcttgaagatagctgaaagctatcttgtgaaaactgtatctggagttggccttttgtttaagattttttccatgctagcccaccattcctggagtgtgtatccctgataagaacagatgaccagctcaaaggtgtacattaaaatgaacacttgcagatacattactgatctatgctggagtgtcttaaggctacaatctcatgacaacctctctctgactaggcaagtttgcatcctaccagaaacaactcccctcatttatgccagtctcttgaatgaagtcaagagcctctatttataataaatagtactctagacaacctttcccactttgctgctgttctgctggctggatgcagagaataccttttctggcatggacaatagaagagagctagttgataaaatagtgatattccattaacattggaaaatttatgattaaaaaagcccacatgtagaaggtagagtcctgagtccaaggctaaattgctcaggaactaaaatttagtttgtctttattaaaatcctcctcccttttccagatctcatttgctatcctgtgattgatcctcttattcacaccagtattctctcatgatgagaatttcatatccagtctacacaataccttaactgaaagctacttaccatactgcagcatttgtgtcatgatatagaaagatatgctgtttgatttttttaaggcattgttgctaatgcatggccctccatcctaaattaaatggttagatgaaagaaaatgtaatgtcatattttggacccttcagctttttaaggaacaagtccacaaaaggtcatatcttaatcttcacagaaggtttattttgcagagaaatgcaatcctttttctcaggcagaatagggaggaaggatttactatcagaatcacctaaataaatagagcttgtttttaactttttggtttggtaatagatggatttcttttaaaaaatcgaagtcagctgtttaacacctgcaaaagattcaggatatattatgttcaataagtgctaactttttaaaagaggcaaaaattcagcaaatagaaacaaaaaaatctcagtacaataaatgttagcatctgagaatctctctttggcttattcatgagtgttacttagaagtctgtctgaggctcattaggccatttaaaatcacaggtctatccatgtgtagaccaaatgtttaagaaaggattacacacccacaaaagaagtaaaagaaaaataaaaggcctgaagactgtgccttgaaagtcccagggtgcattctcttgtcaaaaggtaattatactctactcacctccccacccaaggatataactacttgttccatgaagttttacaggaggaaaaaaatctcatattttacattggtacaatcctaatctggaggaaattatgaaatttataactgggaatcacatatcccctattctgcattttctatgctccctttgattatggtgaccatagttaccatatgcaaatcaggcatgtgtggccaatgtagtcatgatcattctrcctggggttggcagtcttctaaagtagtagtacagtaggtgaggctctaggggcagtcatgagtaatgagatgaagcaccatgtccacacttaacattaggaaaattcatgcactttaaacctgaacaaaattgtaagtgcgagcatgtttccactagcaatggacaactgaagacttcctctggaatattaacttcaaaacatcctgatcctcatttataatacacctcagatactgggaaccatggggtttgtgatatcgtgaaatatataggacatttagtctttctctaaagaaaaccctaaaagccggaatctccagtgattagtgtgtcttttttatgctaatgagacagcatgactcattagatagtagtgattggcagcccctatacagtttagaatgagtttggttaccagaaaaaccaaagcctaattagagggttggaactttcagccccacttccccaagcttcagggagggcagaggcgctgaaggttgagctaatcaccagtgcccaatgatttaatcaattatgttaatgtaatgaagcctccataaaaacccaaaacaaggttcagatgagttttcagatagcttaatgggtagaggttccaggagagtggcacgctttgttatagaacccaactggggcccactttctccgtacagtaagaccagataccacaccgaggttttgcaggagtagaaaggaaggcatttattggcagagctctaagcaaggcaaatcagggcagctgatgcttctttctctcctgaactcctcaatggcttgcaggtaagggtttttaaaggcaggcacaaatttcaggaaagcagaagttacaggcaaactcataaatcaaaacatggaccatatacattggtttgacctcaaaaggcaggacctcttgaagtaggggacccacaggccagaggtggattcaaagcttttctcatttgtggctggttcaggacatgaagctttgtttaaaattggggatcagcagaaaataatattagctctagctcatgggcatgacttccttcaggccctcaggaagaaatttggaatagagaacagtggtcagagttcagtcctcagtttttcgagtaggcagatctgtttggtgggggtctgggtttctgaaaaacaagtcaggggtgcatgtgaagatatcttgagtttctatagagaaccaaacattgttttgactaacttccttggctgttgttttagactactattacctttttgcttattaagttgctcatttacttctcaaggctagctaggtgcctggaatttcccttgaaggagctcaggattttcctttatttccatgcttcggggttccccacagcctgctaaaagaggggtccctgctccatctcagcctggaaagggcatggaagctctgtgtcccttctcccattccccaccctatacatctctttcatctggctgctcatttgtatcctttgtagtatcctttgtaataaacagtaaatgtgagcagtatttaccagacttctctgagctgctcaagcaaattaatcaaacccaagaagggggaccaggaatcttgatttatagccagtcagtcagaagcacaggtcacaacctggggcttgtgactggcatctgaagtgggaagcagtattgtgggactgagctttaatccgtgtgatctgctgctgtctccaggtagataatgtcagcactgagtagaattacagagcactcagttgatgtccgctggagaactcattgcttggtgtatggggagaaatcctcacacatctggtgtcagaagtattgtatttactggtgtgtgagagtaagaaaaacactttgttttttttctatgtctattaaggtttcatagaaaactgactccctcccatcccctccccaccccccaaaaaaatccacctactttctctgggaagaaggagaagagttaagtttttgtttgatttacatagcttgaacagagtcattattctttttctgttttgtgaatgtggatctaagttatatttatctcattccattctacatttttggtgtctcccaaaggaaaagatatgtttgaaaatgaaaggtcagtatgtattgtgaacatggaaaaggttacttccatttttgttgctgttctttcacaacttttggaatttgtgccctgtcagtagtgaaataggattcctttgcatttttttaatttgtcaatttacttttctcactttatatcagtaaattatccttttaaaatttactttagatgacttttctgcttaaaaaaaaagtaacctgacttttttctgtaaatagaaattttaataaagacaatttctcagttattctttattaattaattccaagaggctttgatgttctagttaagaaagtgatcagggcgattttcctgatttgctggctgtcaggttgaagtgaaggacaacatcttttgttaaagcctgtgtagccctgaaacttctgcaaatgtcrcttctcagagggctgtgagagtaggttagtttttccacctgtgctcaagaccacccccttcctttcttcagggcaggcttctgaagtctgagcttgtgcttttttatcttgggtgcttataaatatttaaattccatcataaacacatcccactggcttggacacatttgagaaatggctccagtggaagaacgtggaagaaatttggttgtttgaagttccctttcccactgtgggaatcttcagacttcttggctgtgctaaaaactactgatcagcctgtgatggcaagatggatactccattgcttgactctcagttgacccttgtcaattaygttgagaagatgagacaatctctgcagtgaattttaagttcatgtgtttattgagcatattaagtgtcaacattcactctcagacgttgtcacttaagtaggtaactgcgtgaaatggcttgggatttggcagtctatattagttctctattattgccatcacaaagttccagaaatgtcatggctttaaacaaaacaaatgtattatctaacagttttgtaggtcagaagtctcacataggtctcaccaggctaaaatcaaggtgctggcagatgtattcctttctggaggttttgggggaaaagccatttccttgatcatgtgtgttactggcagaattcaaatccttgtggttgtatgactgaggtctctgttttctttgctggttgtcaatagaacgctgtctctggcttccaaagcctgctgcattccttggcccatggccccttccttcatcttcaaggatcagcaagggtgagttgagcccttctcttactacatctcacttcctgcagccaggaaaggataatccaggataatttctccatatcaaggtttgtgaccttaattacatccatacttattcatttacatcacaggtttcagggattaggacatagcatctttggggagccattattctctctgccatagtcatggtgttgtttaatggacagagatgcaaagaggcattccattttacttagattccatttctgagactctaccctctctttaaaaagccttccttgtaattttttaaaacattttaatcaaagtaattcatacatatggtttgaagaaacaagtagtatggatagatttataatgaaaaacagcataaccttgtgccacctctcgtcttcagattctcgtctctggaaaactctgaaagttatttattcagctaattatatctaggtttctaaataatacagttaataccatttcctaatattttttgaattttagacatttattctgttccatggacaatgaggatttagctctcttgttccattttctacacaactcacaacctgcttctctctctcccttcccaatataatcttatatcactattttggttaaataagtagctaatatttacattaccatgagtatgtaaatgtttctcatggttgagacacatagtgttttatgagttttcgtggttgtttttgttgttgagacagaatcctgctgtgttgcccaggctggagtgcagtggtgtgatcttggctcactgcaacctccgcctcctgggttcaagcaattctcctctcttagcctcccaagtagctgggactacaggcatgtgccattgtgcctggataatttttgtgtgtgtttatttttttatttttattttttttcagtagagatggagttttaccatgttggtcaggctggtctcaaactcctgaccttaagtggtccacctgccttggcctcccaaagtgctgggattacaggtgtgagccaccacacctggctcttatgagtattttcctgaatttaacaattttgacttcattcatacactgcttaattttctgtgtttgttctagtaattcagacctaaattctctgctggagttgtaaaactgtgtgatacaatatttaaaaatcaagaaatttacaaattataatctacctaaagatattcctcttggagccctctatcctgtcttctgatgtggattaattctctatagacgttgctgtttgactgtcttcctgaattgtcctctcaccatcaacttgggaccattttctagaaccctgttttcctattggaaaaagatacataggatataattttgtggagattttgcatgcatctttatcccatctttatctttgattggtaatcggccagatgccagtcctattctaccttcagagttgctgttgcatgcctcatcccattctaattcttcatcttttgattgtggatttttttcccgtctagaaactttaaaaataatcttttaatatctggtgactatttctcagtaatatgttttagtgtagatcttttgtccaaccttgtgctagttggttattctttgactcatttacacataagttttaggccgcacgcatggcgcatgcctgtaatctcagcactttgtgcaaccaaggtgggaagatcccttgaggtcagaagtttgagaccagcctggccaacatagcaagaccccatctctattgaaaaaaattcaagcaatttggaagttttcttatattaattctttgagaatttcataccacagctcaatctgttgttactttctagatagatcatcctagttttctatctcttttagttctgtaattctattttatagctcatctatccaattgtctgcattcacactctcgttctctgaatgaaagagcatcctgtttttatttttttatgattgtaatattttacctgagtaaatgtggtacagttggttatacttttcttctggttcctggtttcctgttccattgtttccctttttttgcttcactttgtcatgtttgaggcagtaagatgtacaggttagaagcatgagctctggataaaaaccaaaagactgtgaaactggccatactacttagtagcttgtgaccttgagcaagttacttgacctttatgtactttactttccttactgaaaaaatgagaatagtaatggtacttctaaaactggtataaagtggtaattaagtttatrtgtatatatgaaaaacattaatctatatatataaagaagttaatttgcataaaaattaaaatatgcttagaatggtgcttgacacacagaaagacagcattaactattgatatttcagagcgtggcattgataagctgactgggagctttgtatgtgtgagtaggatttgacgactgacagcttcttgagtggaagcagataagatggtaagcgggctttttcattgaaggaccccaaatatcagcatctacacatccattctcttggtctgttcagttctctagagggaaactctacacatctctgcctgtgrggtttaaacctgattgtctttgttctaggagctcagtcagggaaggaggatagggaatgtcaaatttggcatgtgaattttcagttaattgtctggttttctgcatggaatatcacttttgttcccagctgtggatggtgttacaaaatctacagcttctatgttcaaaacctctagaagctgggggaggggcaatcacctatttacaaactttaagccgatgctcatgttttcagtgttaccctgcacacccaccttcctcaggttactccagtcccaggattcacatgtttgaactggcttctttctcactgccctcacccccaacccacaatttcatttttttcccatcttctaagttgattactgcttatccactgcattttcagcctgtaaaatgttgttaccatctatcatcatctgttgtttctactcctcttctctttgcccttctaggtttgttcttgaaaaaaaaattctctactgtcattttggtggagaattatgagggaagagtaataaacactgtgttcaacctaccacatctaattgtcactctccaagcaagggctagcttcattggcagaaggggacagggaggaagcagacatttaagcagaaattcttgttttgagttttgtctccttttctctgacactggtggactctgttgatgtagtagttgtgatttcttgaggagactttcaattttactccagctccctcccagagagtggcagattaattattttttagctgcatcagtagttgatggtctagtcccttctacctttttctaatggccatttggtggccccacagctcccatatcccctccaacctctgtgttcctttatgaggagctgaggaaccactgagttctttccaccctcaaaatttcgtagagaactggaatggttatacccgcaatttttcttcccacaaacaccataccgttatagccccttcatgtcctattggcatgagctgatccaacagatctcagttcctcagtaatctctagatgagaagcaagcactagcctctatttttaatttgtgccacctacacccatacatacttcagaagacttatggcaagcttcttaggaactccttcaccaggcttctgtgaaggcttccaggttctatgagtgagcaagcttgaagcagagaggcggtggctatacttggaaatggtggagataatttatttttgtccatttcttttgtgtgtatttggaattacagggccccccaatatttttagccaccagtttatttaccatggaagcagtttgttaatttggaactcttcatccttcaacagtttttattgaatattcaagatgctaagacttaatttggaaactcttatacaaatctataatctcaatagtattcttaatgcartggtcagtaattattagtcctttgataagcagagacctcgggactgccatggcacaatcagtcttggcccaacagcttcaactttcttccatgtgacaatgttgcagttgaagccattggagacccagtctttctctgttacacagattcctggatcagcacattcagaaaagggtgtctctgttaccagaaatttaaagtgagatgtttcatgataggaattttgcttctgaattcacgtttgccccaagaaattacaatccaagtcttgtacccagtcactggaatagttgccatggcacttctatttgtcttgaaattatatttgtcgctaagataccatgtaatagtaaaaatttaaaaacaactcccaaagcctctaagcagttgtatctgaattacagatttgtcatcagaccactaaaatatatatataatatttaaaagaagataagttacaaaatttctagcacatgttggtcactgttatattaaagacaatatgaaaaataaaaaatttcaaaggaaatacactcaagtcttaacactaatagtgtttggaatgagattgtggtgtaaaagttagggctaactttccccttttgaaaaatgtttctctgcatgttacacatttcttgtactgaaattatattctttttgagttagaaaaaataatttacacaagcacatgatataaattactaaattaaattaaaagtagcatatttgtaggtaaaattaagtatttaaattctctgttcatattttaaaaaaaaattttggagagagtacagattctaaatctttaccccatcacactactgaattctgaaaagaaatggatgtgtgtaaaggctaacttaaaggactgtggagtggagcaaatatggtagkttttacattgactattgctggttcagtttatcaaggaaggaaggaaaaggagagacttatttttctgaggcagacccaacttaaagtttctttaaaagcttcttgtaggttaagacatgttcagaaagctgcaaaccactacgtgttccaattcacattgcccttcatttttgcctgtgtgtttactaatttttagcctgtcaagtaatagaaaaggtagccttgggtggagcagacatcttgttgttctagagaagrcttaggtgtccagtggatagcaagcaatgagcccccaaattctggggaaaataaaaatatcacraaggcaatcttttttaccttttttatgtctgaattttttaagaaaatcatagatttccaagcaaagcagaaagaccatagtttgtttagaatgtcactttcaagaggattatcgtgggtaattttccaatgagaatatttagcaactttagtggaacataatcctctcagatttcagacagaggctttctactcctgctgatcttccataaggacaaaattctttcctgacttgtacttccttcacactatatgaagggcatcatatagccaacacagaaaatcttctagtggaatcctggtgcaaatgagatgaaaccatggctaaaggcccatttcttataaacagaccacgtctgtttgctccaactcaaattcttgtagcagccaaactggctggacagtttcacttaattgagtggcagggggtggggtggatggattgaagggtggggggattggggagaaggatattgagtgagtcataaggattagctgtgcatattattttactcagggtactctcttccctaattcctatgacttacccctatggattttccacatgtaagcaacaagtagccactgtaaattaccacttaataggatcagttccctatgtcagaaacctaaagtacttccacagaatgggaaattaatatttggcttttgctttctgagaatccatgcatatggtcaccatactacaaagaatttcaaattcatatttacataaatggatttgttctctttgcatttgtaatagtaacataaaggagtcttcatagttgagccccttattgttgagtccaaaaaggatgccgaaaacatgtggagcttgggatatgggccaagatggtaaacataatggttacaatttggttgtctgggactgttgccttaaagttgttgtattcacaatatcattatatatatgattaagaatatttttgtgacatgagtagacttctgctcaaaaaacaatttataaaacgttttagaaccttaagtagaccttctagctacctttagatgtactctataaatcaaatattatctttcgtaagcacttacttcttccctatgcctaattatgttaattattgcccaatacattaattatattaataggtatattatgcttaatatgttaattatttaaaaactactttctcataattcttgctgtaagtcatattaatggaatagcaagatatagagagatcaattcatccctataattttttttttttgagacaaggtgaaactctgtcgctcaggctgtagtgcagtggctggatctcagcttactgcaacctctgacctcctcggctcagatgatcttcccacctcagcctcccgagtagctgggactacaggcacgtgccaagatgcctgactgcctgaytaatttttgtatttttttgtagaaacggggtttcaccatgttgcccagtttgatcttgaattcctgggctcaagccatccacactcctcagcctcccaaagtgctgagatataggcaggagccaccacacctggccatccatataaacatttgagctgaaatcttaggaggacctaaaggttgtaactagaagtcactgacagacaccctcaaggtctggttcttctccagaggaaaaggcaagagcccatctggacsaaatatacttgggccttttgcacttggctgtctgatatttcctctggaatagaaaaggaagactcaggaaaaactgatattgggtcttcctactgttggagaactaaggatctcaaagaatgaagacggattctatagaaacaggaaacaagtggagctgcatgaaatcctggagtgacctggccctctacttgaagatgcaagaaatggtttttgggctcaaggtcaatcaatattttctcttacgaacctacagtgtatatgagactgtgtagactcctgaaaactacttgattaatttatgtgagaaactttttttttttttgcctttagtactgatataagacagaactttttctcctcacagctggatcatacccagaagccatatttcttactgatcatgagctatcatagctattggggtttagaaagaattgaaatcagcatgatcaataattcttcccagaagtcaggcccagctttctggtgagagtggaatcagatataaacttttgatatatgttagatatacgctagatatatcaaaagtttaatggagccaaaccaagacagcctgctatatccactcagtgatggcagccagaaattattaaagtcttggcttaagaatcctatctttatcttcatactagaaactttyttgacatcagatttatagtattcaagtcaaatggaaagtcaaatggatgtctttctttcttagagtctgcttggatgaactcacctaaaacttgtcttagaattcttttttatctaaagtttcaacaaccgccttcttctttyctagggagaggaatggcatggagtttggggaaggaggaatataaagagaagaaaatgtgggcagatttcaagagacacaaaaatttgttaagtgctcaccatgtagcaaaaatatttataaccctttctcattggattcttattgaaatgatctatttcatagataaacagaggttcatggaggtcttgccataggaggtgataaagccagaatttgaactagatgtctctaataccaaaaattgtgctgtttcgctgtatcacctctgcctcacctatcctagtcactygttaataatgtctcagtaaaccctattctgtgtctgttatgtctcaaggctatgctagatgctgagcagagaaagggcttgatacattgccataagtggtatagtagtggtacttagggggaatcatgaacaactgagtggtgcagacaaggtaacaattctgttttgcagggaatgcagatactcggttctrtaaaaactacagtgaaggtgggacatttaagtcttcccctgagaataagggtattactttgccaggttaagaggacaatggattggggcatagaatagggaaatgaagaagctacttcaggtttaggaagtaagaacaacagaagcaaaatttgaaagcttgacagtcctgattttttggacttccgtggtacagccagtgaagatgcaaagggtctcgtactgtgtattaagagaatgggagccttcctggaggtgaaactggatgagaaaattagagctgtaaaatttaatgatggagtagaatatactactgcagcacacactttggctaactcaggaacagttcatagagcctggcttcctgggacaccgggatagttgtactggagagaggattccagaagcaaaatagatacagaaagggctcgggcaccaattctaaatttcatttaaaaactcagcaagaacctgctaggcctgttttctttcacctagaagccagctgaaatgggttcatggtcccattctaccaatgagacacacagttgtgatgagagtgacacattcttgagaattggttgagtaaggggaagaagaatagctttgagatattcatgctttgtgctaagtgtcaggaaaatgacctgtttaagggaagtttagtttgactgagctagtaggggtcatctttgaaatcatattacttcatctctactatacgggctttggagagaggaaaggagttgtgaatgtctcctggagggtcatcaggagctacttcttaaactaagaatgtgccttatctccgccctagtagccattgtttcctgcagtacaatagaccaactcttctcttcacagtcatttcccccagtacattattttgtgagtgattatgagcctgggctttaactcgtgatagaagtttttcaagtactggctctaccacttatgagctgtgtgaacttggacaagttaattgacctagcaaagcctccctttccttatttgtggatgagaatgatggatggtacttaactcacagggcctgtgtgcagatgagatgagacctagaattaatagcacactttcaggtgctattccaaatgctttacatgcattcatgcattgaatttttgaaacggtaaccatataaggtagtgccatcattatccccatttaacagatgaagaagctgagggccagagaggttaagtaagtttcctaaagtcacatgactagtttcagagctgggatttgaacccaggcttttaggcttcagagataacactatttggctactgtgctatactgcctctgaaggagcatgaatcacctggacatatttgctaaaagatataatcatgaaataaatatcagccagtcaagaaagcctgactttttatttcaacctgatgttcagcgtattcctcagtattagaattttggaagctcaccttacctcactggtgcattagctggtatttatttcttccctaatccagttacatgaacacaattaaaatatttgctatttccatgacctgggaaagttctacgggaagacacttctttcaatcactaatttaaaacaatttcatttcaacctcacaaaacactgtcccgccctcagaaaaacgtcctgctgtgttctcaccattcttttggaaaacattcccacagatcaaacaaattaaagatgtcaggatccattgcacagccaatgtgtatctagatatttcttgtagtgcattttcactgaagttcaagtttattctggttttatcagctattgtccttaaaagggatctctagatgttgtaaaacttgagatcttgattttgactggcttctattttcgttttcygttttgaaagtttctgtcaaaggccccaagtgtgaatgaggaagattgcctttagtcctaaacctaccaacttgtttccgttgtgcgaaaagctgacatggagaaagttcagcaaggatgtcaggtctgccctaacataactgtgatggtttgcaaagcatgtgagcaggctcctggcaaaaccctgaggagaggaacttctccagctatagctctgggctgccatccctttcttgaacttggcacttaatgagctggcccttagcttctttgcatctcagaatcagcttggaataagctttattcttgatgtcgagccttttcagttttgtctctagtatttcctttgcagcagaaatttttattaacattcataaataacattttccacatactatcatttatctctcttccacctaacttatcccagattttgtggggattgtctgaaagtgattcacgttgttagtgaacaatttctacattgttcttgctggttgctaaatagagccttgcccctggttaagtcaatgagaaagatacaaatttgtcctcttttcaacagtttgtttcctgttaaacaaactgaagaagatataaaacaattcttgccatcagtagtcagatccctcttttaaaaagacatcatggctaggaaatggctctgaactttctgagatgaaatgactacctttcttctagaagtactgaaagaatttacaccaagtggctagagatgttttggggggattggatagaccagtatcacttggtgacctgctcagctgtagtcactttggcttgaagagcagacacatttgtgcagctatcccctttgttttatgatgtaaatcttgtttttaggatgagtgcttatggggcattgttgaggggtattacaattgccatctgcacccaaatagcccagatactgaattgccttaagatgccttagactttcaccattttaatcatttatttcattaatgttatctacctaaacccttatttttwtttatttatttatttatttatttatttatttatttatttatttattttgagacagggtctctgctgctcatgctggagtgcagtggtgcgatcatggctcactgcagctttgactccctgggctcaagcgatcctcccacctcagactcctgcatagctgggaccacaggcacgtgccaccatgcctggctaatttttgtattttttgtagagatgaggttttgccatgttgcccaggctggtctcgagctcatgggctcaagtgatctgcctgcctcggcctcccaaagtgttgggattacagacatgagtctgcgcccagcccaaacccttattaaaatacaaacatgtttcttggagaatttaatattcaatccctagaaatatattgtaattttaatgtgagttctttttcaggatgtgataacgtaatggcaatgatcataactacaatagcaaatattactgagagctacaaaggctttttttcagacaggtacaattattagtattccattaagacagaattttttagtgttggcactactgacattttgggttaagaataatcgttatgggggctgtcttgtgcactataggatgtttatcagtttccctgtcctctactcactagatgccggtaggaaccccttcactctagtttgtgacaatcagaatgtctccagacttatcagatgtccctggaggagggaacttcatggagttaagaaccattatgttaaggagatgatgaaactgaggtctggagaggttgagtagcttttctaaggtcctaaatggcagagttagttctacaaggcttttctgattagaaaatgcttgtctacttactactgtataccaccaacccatcctacagttcttttcccgtttctgtctaatagcatatgtctagtggacatctgccatgtatactgtgtgtgcacacctgtatgcacccatgtccagcaactatctgttaatatttcaaagcactcttaaactgattttacattaatcctcagtcacccatcagtcacgaattgtagaaaaggaaactgatacctgtgccgttatcctagccatttctgagccaggagatgccttttaatggaggtctgaggtcagaggcttggcataaaagtccagattaggagaccctactgcaagcaaactttcatttcctaatggagctgtgcagcctgcaactccagtcatcactacccaggccccatcttatgtttggggtgagtagactatgccagtctccaagggataaataaataatatgaagaagctccaaaatgcttctcacccctgtgctgtcatgaaatggaaatgacacccaaagccaaaactagccaaatttatatctttgttttcctgcccatcctgtagtcattatcagaacctccaaactccaagtttcagcctcttccatccgaagcagttgagccactaggaatgtttgagaatgttagtagattttaactctgtgtctctttctctcctgactgttgacatcaactctttcatgctcagcgacattttcttcattacttcataaatacatgaatatttattactatgaggggaaagcacactacagtttacaatgactgcagctggaaaaaataataattaacacgagagatttccaggactcaggagagtaagcagcctagggaaggcaaactagggtctgtggaatatgaaaacagctgtcacccagaaacaaccaaaatggtaaagacctgccaaaggacattgtgttggcagaaaataaccaagagaagttttagattatagtgtgtaattagtgtgtaattaacatttgcataaatatttgcactgcggtactttgtgcatagtatggtagtagcggatagcaattgcacacacacacactcacacgtaacacacacacacagcaaaaaggctcaaaaaagtgtgtattcatatacttattcaaaatcttacttgaaactcaactccctgtttaaatcttccccatcttgcctacaaaaagtacttggcattttattccgatctctatgactcttttctgtttataagtctattatttctttagactctagactcttgacttacctggtttattgctttcacagtgcccagtgaaatgaaggtatgtagtagatgctcaataattgatggctgggccaggtgcagtggctcatgcctgtaatcccagcactttgggaggctgaagtgggtggatcacttgaggtcaggagttcgagaccagcctggccaacgtggtgaaaccccatctctactaaaaaaataacaaaaattagccaattgttgtggcaggagcctgtaattccagctactcaggaggctgaggcaggagactcacttgaacccgggaggcggaggttgcagtgagccaaggtcatgccactgcactccagcctgggtgacagaatgagactccatctcaaaaaagttgatggctgaatgaataaagatggtcaagatgagaattgtgtgattcagtttcatttaactacctggtaacatgccccaagcaggcagtgtgttagctactggagaacagggacatctcaaagatttgtggcctttccttcaccgtggtctgagatgatggctcatactacaccttattgctcaatcattcagctagtcagacagccaacaagccttttccccctcagtgctcgcaatgtgccagccacgtgcaggacctttgagaatacccagcagagaagttaacagacattccaatttgatgtgatacatgctgtgcttgatatgtgctcaagatttttcgaaaacagagaggaagacattctgacaggtagagtcagtcaaggctttccaggttaatgagctgaatcttgaaggatgagtgggatgctcagatgggcactgcaggcaaagtatagcacaagcaagtcctggagatggaggagagatggtaagatggcagcctgcaagtggctggcatggccaggtgacagcaatgtgaaggcctttggagaggtaaaggtggtatctatgtaatctgcataatgcaggtgaatgtctcaggtggcctcaatccaggctcttagaggggttagggagggtgaggccagaagaggtaggcagggccagacttagtggcccaaagtgtaactcaaaaagacggaggctgctagggacagggggcttgccctgacttgcaggactcttcaagggtggaatgcagaatcctcaccctgtgtaactggagtgcaggctcagggcagagagcaagttcaggatgctgtctcccttagggttagacatcctcttgtggtcagcatccaagaggaagaagcgaccacaccctgtcatttgctgtggagactacactgatgcctcaacttacacatatcaggctatcaacacagtctattgaaatagcttacttttttcttttggtcatttgctttgatttcaaagtcagccttgtctaattggttgctaagattgggcttcgtatccagttagggttgaagcattacattttactatccacataattcgtgagttaaaaatacttccaacagtttatgactcatacttttcaactcatagatgagaagtgaggtgggtgactgtggatgcctgcgattttggtataggctcaagggccagtgggttctaaatgtgatttctggtctgctgaaaaggccctgacattcccagatcattccaagactttcgggctataccagaaattagagccacatccatttagattcaagtttattacctactgtgatgagtaacawtttaagtttctatcaatcacacagtcttttatgtgtttgaaagatctgggagtaggttttgataggtgggagtcagggttgggaacaagaggttacagggtgggggaggcacagaattcacctggttttcgatttcatatgagattaatgcagtttggttcaatgtgccaaatatttatggagcacatactgcattcaagatatggcaacatgtcctcaggctatcaaagatggggctcctgtgatgcttgccctcagtgaggtttctagcctttggggacactgagaaatatatcaataactgggatgcagctcacagtatgttgaaacaagctgctaaggggcacagaggtggagagcgagtaggtttgtgtgtgcagatgggacaaggtggggacgtgagaagaaagggagctcaggccacatggcagtggacactgagtgagaatgctgccaggttatacagacccaccctagagttggcttgctcatttgtaaactaagggtgatgagtctccccgtgtcctgcagaggtatgttgtaaaggttgaatgaattgcataatgctaatgaatttgaaatatataaagggtgtttaaatgctgttaaggcccctcacagtggcttacgcctgtaatcccagcactttgggaggctgaggtgggcggatcgcttgaggccaggagttcaagaccagcctggtcaayayggtgaaacctcatctctactaaaaatacaaaaatgagccgagcctggtggtgcacatctgtaatcccagctactcaggaggctgaggcacgaggattgcttgaacccgggaggtggaggctgcagtgagccactacactccagcctgggtgacagagcgagactccatctcaaaaaaataaaataaagtataaaataagttaaaaaataaataaatgccattaattatttcattgttggcagcatcagaatcagaacccaggctatttggtttaacccttaatctctgtgagccttcctgaaacttttttccccttttagtagaatttgctttattggagaaatcttttggttgctgtaggcagctgcatgtgtctcttgatttacagaggagggtggaacaaggacaaggaggaagatgacattgataagtgtgggtggagaattctaaatttcatgagtcaaatacaatttctgggactcttaagatgcttggaacctctttgaaaaactgccttacaccctgtgttttaaattgtgcagtggagcatacattaactgagtgggcctgcctttacatctccagtcccatcttaggactggagatccctcaagcattcaggagaacttagcttcttcctaagacatgggtctgtccaggccttgcttgcatgaaatcttacattgtaagatttaagtgatcatgaaatgagaaatctaagcattgaatttattcatggactctgtagtgggaaacctccccaatatactcttgtttgagtgacttggaaaccagaaagaaatagggcaacaacgctgtttattttgaacaatatttcatttgctctgctttcaaatcaattatttgtatttttgttgtgactgaaaattgacaaatgtcagaggaaatgctgcatgacttttccctgtcctggaaaatgaagaaacatatttattgaccatgtcggtggttttatatctaagtatcagctgctgttcaaacctgttcttttcctaatttccaacagcatgagttcaggtggcaagggatactttctgagcaggtagtgtattttgttagaggccagtaggcggtgtgtggtgcaaaaagcagccactgattcttgtttgacttcttaaatgtatctatattgtgggagtaagaggagactagatgcgacccacagtcactcactgaggagagaagagccaccgcagaaccaaaaccaaacctcccctctcttgtaagtagcttcctgtagccaatccattctgaaaattacaagcaagggttggagttgagaggggatcttctttcctctgctctttgttttgcttggtagtggtcctgctgaaaccctggctccttttatcattctttccttttatagtttcttcaggaaagccccaggcctctgaggctggcttcctccccctccagagattttaaatgtgaagacaggaaacgtttgttgggcttcgtcattttatgacactgatgcccactccccctcccacacactctcatttgatgcctcctaaaaagttctgccaacattaagcaaccatcttttaatgtggctttggctgaacttgtcctctaggaagtgtgtgtggcagggcactcctatctcagccacggcagccacttcagagagctgagctcatccgccattccagtgttcagaggccctgtgggcgtcagcttcgctcctacagcactgggaggcctgaggaccaaagctacctcttcagggccatctggctgcttccaggaccagccctctcctttcagaggtagctgctaggtgtcccaacaaacgatgatatgctgggtrtatgcatagtattttccaggcgatcccatgggaaatgacagagtttatgtgggaactagagaaatacatagtagttaaaggaattgttcatccacagccattcgggcactgatagaaggtgaatttccaattctcctttctaccaaattttgtttaattagctagtgtattttcactsttgaatctctagagcagttctaaaattgtaacatgctctgccatccccaattgctaaacttcactggaaagctctgtgaagtaggtacgtgggggcttcctcctactttcarctaaggaaactgagttggggaagaagttcttatgtggcctagagccagacagtgagtgaaggagagatatgctctaaaaacttagcctcagattaggagaccctggtttgctccaaggccatggttctgtccctttgctgtcacacatatgtcaaaggaaagctgtagaaatgcataagaaactcacagattactgcgcaatccacctgggttacatcatcacaggattcaactctcactttgtcattagccttttctgtaagccccgccaaagattaccttcctaaaataaccctcaaagccaccaaaaacctgaactctgcctgaggcagggtgtttgaaggcagccagaccttcctcagattatctaagtggtgatagagagatagttaccaatgatcaaacttcttccaaatctcacaatttgtactggatgggcaggccagctgctagaacaagtttaaaagaaatttaaaatctagtttctaacctctcactgtgtcaaaggatttctcctaatgtgaaagaaacttggcactgttccaggtgagggaaataatagagtgaaaaatacacattttcatgtgactttttctgtaaaaaataccaaagtcaagaaaaccaagttaaatcattattcattacctctaacagccacaaattaccttctctgcttcttggactatgggcatccatctgccttttcctccttcgtgtgctcagcaatgatgttttgagcatatggtattggtatgttagatttatgtgcattttaaaagcattgagtccacttcactttaagcttctctgctttaggggtcgacctactgtaaagctactttcagtttcatagtgatccatcaatatgagtcggctccatgttttgggggttgagagaactatgtaacaaggtgttcttttaatgtcctgcaagtgtcagtgcaggatttccagctcaatgaaagatcactgaaatgcatttcctgggctagtttctcatcccatgggcccctcacctataaccacagctaaacatggaattcttttatagcccaaaactacgtaactctcaaatcagcccacaaagcgtgcaagaatatttgggttctgtttttatatgtgacagaactgttataccagtcctgcctcacctttgttattccaaggaaaagcatctaaatgctatctacatggactgttataacaggagaaatttgccttctgtgtctgtgtgtgtttcagcctagcttttttttttttttttttttgagacrgagtctcactcttgttgcccaggctggagtgccagggcgcgatctcagctcactgcaaactccgcctctcgggttcaagtgattctcctgcctcagcctcccgagtagctgggatcacaggcgtgtgccaccatgcccggctaattttgtatttttagtaaagatggggtttctccatgttggtcaggctggtctcgacagcctgtcctctttataggtggtggtcggggtccttgccagggtccgattgaccatggttcttttgaacagatttttcctggagatctcagcacaggtgaagctctgaattgacccacagcatccccacagaatgtgattcttgagtcctttgtgaaggtcacctcctctaacctctctatatatacatactcaaacttctttggagactggaagattggaggtactatcttttagagtagttttgctgaaaagtgataaactcctttcacagtgtgggaaaagagatccagtaaagcttaatcacttgcccacattcacagtgaatagtgatttttaagagctagcaataaatcaaatacatttcctgatattgatactcaagtttctatacttataatcccagatggtcaaagatgggcatatatacaagaccttctcaaacagaaacatgggctatctctgccttcttcatgcagtgcttcaagtttgggggccaaggattagaaagtacagaccactgtgttaattgttgtgagtggataccaaataatagcaacatgtggtccccatgttctatgagcctccagtccattcgaagagaaggagctctaaagccactaaaggtctgacaaaagcaatgtgtgctcatgcctagygtggtctaactataggagcagctgacctgaccggaggagacttgtacggtggatcctcctttctggaacactgacgagaatcaagaagagaaaagtaaaacttgtcctgacaacaaggtgtccaaaagctccctctagagccctagagattcttattgtgaatctcttagtttagatgatgcccataatatgggagtttcccatcactctggaaacttgcagccttggcttttaattcagaaaaattggctttgagaataggaactaytacttgctggctgtgtgatcttgggaaagtcactgactttactgagttcacttctcttcatctgtaagtggggatatctacccacaaggattttgtgaggattatcagcagtaatctgtgggagtatgcagatgacaacaccagatgctgtcacaagggggctcttacaagcacgccattacctaaccaagtggacaataagacccatattagaagggaggtgggggtgagtagtcagggaggtaggggtattggaaagagcaaggagttccagctaacaggtgaccacaggggtagaggtcacatagcataacatggattatcagctgtcagggtcaatggccagacctgacccagcatgagggtatcattatgttacagcttggcacagggcaatctgtccaaggatgagttttccccagccagcttccacatacctgagagcctgatgttagggaaggttttgtcgtttttgtattgaattataataagaataacaacgatgacaacaactaacccaactaacactgtgttccagatactcttctaagggctttacgttacatcatattaacttatttacccacagaacaattcattgaagaaggtactgctatcctcgtttcacagacggtaaagctgaaactcagtgaggaaactttctcaaagccgtgtagctatgaagtagtggagtcatggtttttggccaagctgtctgttcacactttcaaccactatgtaaatgacatattaagacttctgactcctcatttgtcagatatgctgaaaaatcttaatatttgccttttaattttatatttttgtacattcagaaattttcaatttttatagtcgtttatcarttcttttttaaaaaaggattcttccttgcccacaccaagttcagctgttttttacttcattctatttcttttatgcttttatttaaaatttattttgagtttttatttttgagataattataggtttgcaggaagttgcaaaaatcatgtggagaagtcctgtgtacccaatggtaatgtcttacataattatagtgcaatatcaaaaccagaaattgacattggtataatgtatatgtattatgtcatgccatttcatcccaggtagatttagataatgaacaccacaatcaagaggtaaaactgttccattaccacaaagatctttatgctttgatttttattcacaattttttggttcatctggaatttattttggtgttattgagaagcagtgattctattttctaatttccaattttctcagcaccatttgttttacaaatcccatttttgacactgactagaaatttcacccttttatcccagcataacactattacaaatcctatatctttcagaccccagagccattgctccttctgatccactacatttcatcctaaaatttgggtcatgccagaagtaatatttaatttttatgccatcagaagctatagagcttgaagcaaggtctcggaccacttaactgtgctgctggtgccaaattattgcctttttccttgacatttatccctggattttactgggacaacagggaaaacagcaccatcttctgcaccctggcggctcctttccatggtggcatatctcagaaactcagaggggactggtgtggtacaaagggcatgagttcagagccataaaaccgggttccctcacttttcttaatttccttaatttttctttggccttagtgtccatcatctataaaatgagaaaaactctatctgcttcagaggcatgtgatttttatgaagactacatgagatcatacctttaaatatatggcctaggaagggctcagcattgtctagtatttatatgatcattaatatttctaataatacagcatttcctttattctatggtacatatattttaatttatatttraagacatttatatcagtatgtgtcttcaatcatgatagtgattcttatccttctggaaaagtcattatggagtggctgggcgcagtggctcatgcctgtaatcccaatactttgggaggccgaggcaggtggatcacttgaggccaggagttcgagaccagcctggccaacatggcaaaaccctgtctctactaaaaatacaaaaattagccgggagtggtggtgcacacctgtagtcccatctactcgggtggctaggcaggagaatcgtttgaacccaggaggcagaggttgcagtgagccaagattgtggcactgcactccaacctgagcgacagagcgagactctgtctcaaaaaaaagaagagaaaagtcagcatgataagagtcttcgaatttgggaaatgtggtcattgtgaggttagagcatggacttgattataataagtggaaacatcttcctctctgggtgatgtttctcatggcagtggcttctttggtgggcagtaacatccattcagcaactttctagaggctgctctggtgtggggacagccagccttgttcccagcaccacttccagcgagcagctatctctagagaccttgctgagtctggatctagaagaaaccatagcattgacaaaaaattttgagatagctttgtgtgctggctttgcatttagaaggctaggttatataatctggctgcctccttttttcttttcttctgagcatagttcccagactctcactttgctcaggatgagcagtcctgctccttaaaagagtcttcacaaagattgtggtcatgacacagttcggctaagtagagaactacccaccctcattgtccaccctcactcttggaacaagagcatctctgtgttagcatgtcctagcagcttcctcggatacctggatatcctataattgcccaaggtagaactgtttggactgaactcgaatagtgactcagattacatgaatttacacctaacactaaaagaagaacctgcctttaaatgaggggtatagatttgaattttcagtgtaagctaagaaaatgctgcaaaatctacttttttttttttttttwaaaaaggcagaactgtttgggcaaagagaacgttttcttcgtctcctttctttgcttcatcctcatttgtttcggaaggtgttttgaatgaatgtatatgcgtgtttttcttctaagttgtcatcatataacacaagaatgatgctgtgattatcatttcctaaagaggcactcctacaggaaattgggctgcaagagaggaaaagtgtgtgtttccctgaaggaagtgcttgtagaaagctaaatctgggaaacaaatcatggagaatgtataaatagacttctggctctttgcattttagtggtgagatagtacctttggtcctatggaacacaaatgttttttggatatgatccttaaggcatgtgaaagattcaggtttaattttaaaaccagcacctacaatcttccaataacccactttccctaaaccacttgaccacaggcacatataccacaaccatcaacatcaggaaacttacaaatgggaaaattgaatttcatttaaaaaaggaatctccatggatgtaagccttaaatattgtttctaagtagatctggtggatttttgtttcttaccaaagaattgacttcttttgttaaaacttggttgtaatataaatcataatggaaatatctttttctgtgcatttagaaaatacaataaaattttagcaatgaataggagctttgggagaagaaatgaattacagatttttagctgttagcagaaatgatatacaatctttctttgtggtattatttaataatatttatatactttgaataaaatgaaatagagataagtcattcctcacctttcagcttcaggaatagaatgtggtctcaaggatacttgccatgtctccacagcaccatttaaagtgacaggaagcagagagatatattagtactattgaagtatttcagtactaacgtcaacattgggtaccaggactgaaacacttcctgggtactctgtgctttaatggtgtcctatacttacctcagtctggatgtctgagacttgatgcccttcattccaggttgtgataaagcaaaaaggaaaggagaattgcattgagtatgtagagtgtgtacatcctgcagggcctgtcagagctcttagtggatgaaggaagtaaaggaataggtcaataaacttttctggaagccgttagtgtttgtttcattctcacctagcctactgctctctccttttatctgtggtccctgcttctcttgccctatctacattagctcaatcatgccaccacctgctcagagcccttggaggccttccgatcacatcatgttcttcttgtgaatatgggacctgcaagcacctatgtgatcaggggcctggctacatcctgaactcatctcctgccactgactcccttgctgagcaaacccctgcctcaggtctttatacttgctgttgcttccgcctgagcactctagatatcctcatagctttccttactgcagtcactgcttgctcaaatatcacctcttcaatgcactccccaacccccacccccagttatcatgctctattcccttccgcttctttcttctggtccatagtatttctcacctctctatatcagattacatgtattcatctgtttattgccagtctctgtcatcaagatggaagttccttgagggtagaggctttgcctgtagagtttaccatagaggtcccagtgcctagaacatagaggagcagtaaacatttgttcaatgaattattttgttagtaaacatgagtacttgcctctcttggaacttcctrtcacaaaattgtacaataagtatctcttattcactgtcaggaattatgatgacataaattttagaagagtcactagggatcatgtgatccaccagttttcaacctttattttagcagtgcaagagcacacaatgttgtttgatgcccttttgataagactcctatgggtattcccacatgtgttaactcttccccaccaaacaataactagccccatccattatcacgctaagaaaagtttcgtaagtaattacacaacaattagtcatgtcttagcctatttccctagaaagtggattcatgtgcacaggatttaatgagggagcagtctttaggaaaatcctgtaagagagtgaggagagcaagatagaaaaggaggaggatctacaaggatatggtcttaggcaaagtctagccttggtctggtccccaggctcacagggctgtattgccctgcaaggagttcaggcttaagaaccttatgtcattgccaacccagggttgtgggtaggtggcttcccaggcatctctccttgttctgcctagcatggagaagtaactggagaaggacacaggtgtaaacgtttcctcagctgtattcctccaagcagccagagtacaagtgcattggctggtcaggaagatctgaatgggtggcaccaacagcctctactacagatggtttctccgtagtggttactcactataggtgataaccgcagttctcaaacttcagtttcagaatcacttggagggtgacttaaactacatacatattgtggggcttcactgccggaatttctgacagatctggggtgaagctcaaagattaatttcaataaattcccaggtgctgctgctgctagtcaggggttaggaaccaacttcaagaaccactggttatagcatactgaagattgccttgaagacattctcagacaaaagaaacacaaattttaccctaaacagcattggaagcaacatagatctttactgaaattttcttgaggaaaggacagggctgtacataaactagggacagcacccagctaacttcctaaaaaagaattcctagatattgctcctcttttcaaaattcccagtcttcactgtactgactgcatctatctctgggttatgaaacattctctgcatgttaactatacggcggaccacctctttctctctcattctagaaaatgctgtagaacgcaacacagaggagatacatttctacagacacaaccttgaagttgcttttacttactgagaagccatttgtaaatttttattctacaagtattaggaacaaattatttgtgatccatctcagtttgtggaaataatatagatacaaccccagcctctgttttatagatggtgagtaaggggcactgagggtggtaaggctgttaatgttttaccccagagaacttatctttggagtttttcatccacttcctcctccttcattctcactcctctagatcttcataaaaagggtagttttaaagatgtgtgtgtctgtgtgtgtgcaagcaggagagagagagatttctaaaatcatacctaaagaaaaacaaatgagaaaaactttataatcacattaataactagtctaggaaaaaaagagatgctacaactagataattttatttgagtggagagcccagcaaataattatccacttactgaaagatcaaccccagggctcatcagaggttttattattggttaatttattttttcccatgggatcttaatttaagaaaattaccttgaggagtttttatttgaaaagatgccatctaaaataaactcaaggtttgcctgtatgttctctgtgtttagagtgtgaaatgcagccgttaaggtgttacaggataagctgctgccagtggactggggtaaaggaaggaattgggagtacagtgtcgttgcctgagttggttgatatacacttaggtctggagcactgtttaacaaggttaatgaaacttctaaatcagagatgagcaatctcaaatgcctaccagggctgggcagggaacagcagtaagtgaaggccaacgggtgtgagaaactcaggagaagtgaccactgcgctgcccaagagaggacaacttttcttcagagagcaactccgacccagcccctggtgttaaaagaaaagctggaggctgggcgcggtggcccatgcctgtaatcccagcactttgggacgctgaggtgggtggatcacaaggtcaggaattcgagacctgcctggccaatatggtgaaaccctgtctgtactaaaaatacaaaaattaggtgggcatggtggcgcacacctgtagtcccagctgcttgggaggctgaagcaggagaatcacttgaggcagaggttgcagtgagccgagatcccaccactgtactccagcctgtgtgacagagcaagactctatctaaaaaaaaagaaagaaaaagaaaagctggaaatcaggattttgttgtgaaatttgataatggagacgttagtttgcaacttctgtattaaaaactgccatacccatttctctttcctatccagtcctccccatagacctccattcctccatcttttgaaacttcagcgctgctgcccgcagagttcgctgctccctatggaaccttatcactaactgttggagtcactcattgaatttatactgttttgtgaattctgtttatatttgaagtcattgataaaatgtttctgtgtatcytcaactagattttaggtttgtaaactctgagcacagtatccagtctcatgggtctttgagttccctggagtggctcatgccttgacatgtacagaacaggatgactggatgactggcctgcgcttaggtagcacttaacagcgtggcagaggtgttcacatcctcactctcattcagttcttcccatggctctggaagtgaggtccgcatcaaagatgaggaaactgcggctccgcaagcctagctgacttagaaggcggcccagccataacagctggcacttgaaactgactttgactttgttgccttctatagtatgtagactgcagcttctttgcttggtaaataggggttatgaatgatagatccatgtctgaatattcaaattatttgtatggattactaaacattcatcttgtaacttttaggaatggtgtttgttaaaggagcaacgctaacagagaagttgataggtgagatctgatagaaaaatataacctacctcctcttaaccacaagtaattctataagaacagattcagctgtattttctagccaaataaagcatattgtgttgttgcatcaggcagaactggaaagcagcatatatctcacattatatgtttcacatgaaagttgatttttcaccataatttgttatgggatgttgtgcaaacctcctggaacataatgcagtatggaaggaaaactactgattgcctctgtagagaaaaagagtttaggattatataaaatttgtcttgagtatgcagcttttacttgaaatgctggccaaataaaatggaaatatatttgtttcttttaaagtatttcttagaactaccagttaattgctatctttccagaaagggatgtcgaatccaacatttcaacattcagcctctgaatatacctcagaagaggatggagtctcttacctgaggccacagggggccctttggcacatgsaggcctcacatctccatagagttaaacttagggagcagacttcagagtgcgctgccattattttattcttttgaaacctttagattttactgcctctggaccttgggcccatcccagaactttttcagtgacttgatagtaaaacgtcttccacatccctttcagtcacaagacttgtctaaaatgtatttcttacattcacatggtggaatagcaaaatctctgaactactttagaatgaaagcctctatttttttccatcaatggcccacttcaattcagaggtctttaatgaagggaggaggagggggtgcggttggcttctgttccgtttcctcacttgtcctgcacccctggccccagttacctgtcaggaaagggacacagcagagtagatgcaaggacaggagaagcctcccctgactggcactgtgtagtctggtgtagaccttctctggggtggagactgctgcaggctgaccctctcccagaaagggcagttttgttcttcttccactcagaaagtcctcctgcagggctctgggctcagacagtgcctctcctgtgcctggcctccgagcatttccttagccccttctaagtcctgtaggtatgataaccctcccatcttttcttggttatcttctgcaggcctctttgattaagcttgagggcaggaagaagcagttcctttgtacatccatggtcagggtgttatcacaagaaatgccactgtattccaataattttatacctattaggtagatgttgaattaagggttaaaaaccagttttcaccactgccttgcaagtcctaccaaggcattctagaatcacagccacctgtaaatttgtgtttaacctttgggccttaaccacaacagaggtggatgtaattccatcttcatattctgtagcatgtgcaaatccttctctgcacttacacatctagctgtggtcaatttgagtgtttgtctgggaattatcagttgtgtagaaaattgtttggattattccttctgtttctctccagtccctaccctctcctgtccctctcccaatgcyccccatcacatcatgcataaacttttctccatattctcttaacccttttggaaaagaggcattttaaccacattaggggacatcatttggtatctaacttccatttcccatgtagaaaaccatctgaagttattaaattaagaaacattttaaactttatgtcagtttccatgagaacattaattagctaatatyaatcattgaaaacaaaacaaggccgggtgcagtggctcatgcctgtaatcccagcactttgggaggccaaggcaggaggatcacttgaggttaggagcctgagaccagcctgcccaacatgatgaaaccctgtctctactaaaaatacaaaaattagccaggtgtgttggtgagcgcctgtaatctcagctacttgggaggctgaggcaggagaattgcttgaactcaggaggcgggttgcatttagcagagattgtgcctctgcgttctagcctgggggacagagccagactctctcaaaaaaacaaacaaaaaaagaaaacaaatcaaaaaaatagaaacaaaaggaacataactactcatcccccacccaaattcaaaagattctytgagatttgtcatatacttatttaagtgtccctaaaaagagagctatggttctgctgtagtttctgtttaaatctcctagttttgcctgaagccatgaagttaacctcagagcagagcctctctccagcccttactccccaaatgaaaaccatgtgcttgtgtgggttttatttgtttttcttttttaagatcttctccattatttaaggaaattattacataactgcataggtcttcaataatagagttcacactggcttttatcaattaagtcacaaatagtttttctcagaagcaaatttaactctagacatttttaaagctgattgtaataccctggaaaagctagaaacttcttgcatgctagccaagtcaaactgtacaagagaatacatggaaataatatgtggatgaaacaataatacttgcacagttcctagccatacttttctccttccgtgaaggcaattaatcagtctaaactcccacactgggtagtgccacttctgaccctgtttaaatgtagaaatatgtaattcatactgaagttctatcatgttcctaaaactcagcggcaaatcacaggtcagtacacagagtgaatgtggcttctctgccttccacttgccaggagttaaggttgtgtatggaaaaaaaaaattgtaagggtgtgacttggattataaaaatcacacttttaattccactgaaacataaaaaaaaataaactctctcctttgttcttaaaatagaccaaatttgtacagatagggcattcttgaacgatctattcatttcagttacacaacagggaatgagcagttatggtcagtgcagcaaacacagcaaaggtattgatgcggggtgggatgggaagttttgctgctgtgacctcatctatacaattgcagaagaacatctagcctgcctcygctgtcttcttaaagtcccatctcctgttccctggcatccaatcccatctccctcccttcaggaacccagtgtcttccactacaggatggaaggaatgtcacccaaagcatgctccatccatcagttgccctcattttccataaaacaaacaaacaaaagagctcaatgtgtctaaaactgagcttacctttgccccycctcatgtgttttctatctcagtggatgggcacgagcatctaccaaacataaaagctacaaaaggaagaatcatcccagacttctccctgtctttacctgcatattcaatcagttgctgagtccggattccacctcctcttcctatcttctgattccttttctgttttcccagacttgtcttttgacatcctccctcacatctcctgccatatgcttgttaagctgttcccagtccctgtacccccaactctgtatcagccaagtgattcttcacataccactttcctgtggtttttcgccctcccctgtttcctcttggaccatagttttcttctttgttctcctgttgcaccctcctctccatcaggaaagtaaggattgcattttgtagcgcttgttattgacttatctttcttcctcactagctggcgttctgaagtcagagacattttcctatttctctcctgtctttagtgctaagcacagacaagccgcttattaagtggtaggtgagtgtattgctggatttgggcattataagaggaacttgtgaactcaattgatgagcygggtggggarcatgttcctgactttaacatattgcttgaccctggtgagctgccagtaaattcctgtggaattctgttgaatactgaagcagggaggttttcctgccctgcacaatcctccttcctccctgattccatcaggtcagaagagtggtcatcagcagtgaagaaatactaggtttcaatttgctggatcctattacatataatgtgactgagcagtaataagtcagggagcccaaatggctgattgatgtttaasctgtacaactgtcatctctgcagaaggtccaaacagttacttcaaaactttaactcattccaaagtctacttctgtttaacaaatttaattaatgaatcaatggttatctattaaatgcttgttgtgtttaaagggattagtaatatttaaatagaataagctttaaatatgtgagcacaaaagaactattcaataaatatcactagggtaattggctaatcatttgtgaaaagagtaatttttgagattacttttattaaatatttcaatttaatatataataatagaaaactaaggtaagcgtttatcacagaaaatcagagaaatcatggacatgaagccaatgaagaaagcagctcactatgtaaatactaaaacttctctgtatctactaaacacaaccacagtatataaacgcagataatatattttatagatttcagatatggattgaatgatgcaacattataagtatcaatgagaaagaaaaaatgccactagtctaactgtgatatrccatgaattgtaatatataactagattttaaagatgttaaaatgcgaaagaaaaatgtgccttttgggatcaacaaagtatagtagaaaactagaaaaaaaaaccaatatgatagaaaaatgtcatctgctcacctctactgggaatgtaattttatacaatattttagcagttatataccagaaagtttaaaatatgcacccttttgacacaaaatttatttcttgaatgtatgctgaggaaataatcaagaatacatagaaagattaagctacatatttgttcactgcgataatattgttgcagaactttctccttagttcagctaaaagcaggctcttgtcacacgaccaggaaagattaggctcgcggacacatagaagggtgaggaaaatggaatttawtgggcgaaggggaaaaaggaaaaygaaccaaagcaagagagagccctgctagcagcttttctgactcacagattgaatcccaggtcaccacaggagmtgaagacagcaagctcctcccgtgcacaaggcgtgaactccccgtggccccacccatttcccccagggcacatgtcgggctccagtccactgtgggcatgcccagacaagccctgggcaggttccctcatttgcacaaaagcttctgatgtaaacacttgtggggaaggttggagattctctggggacccctttttatctgtgtaggcatttggctgtctcaatatttataaaactgaaatattgggaacaatttaaacgcacagaaatcagtgattagttgaataaattatagcatatctatgtcagggcactgcccttgatatttacaaataacgctgtagatgaatagtaattggcatgggaagatcttcactgcatcgtttggttccaggattttttctaagaaaatatccatagacatagttatagatatatagatataaatacatagaaaaaaatatttggaactaaatttatattagaggtagttactgraaatggtacataatgagaagtatattctcctcttcttctttattcacatattttagtttttaaaaattatctataatagcacaataatgaaaagttattttctattttaaatgaaagatatgtctttaataaactgataagattgacacagtaaagggagaatacaaatgaaartgcttttggaataaaaatagaaactrtgctcttgattttggtcatttgtatcaaatcatatttcatgcaaagcaataagcattctgatataaaaactagcatctcccattttattgctgtgttgattaataacaaatcagttttctatttgtgtctcatatgtgtattaagactctaacctctgcaaccaaatccaacaaaatcttgtgaaaaatttcagaaayaatgtttgagaagaaacccgggacttaaaaatgaacaagtatgcagtgtaagctgaccctgagtgtcacattttaacatctgtttttcatgttgtgatacttatttgagatttggtattattaagtaacgaggaaaatatcttactgtttccataggtaacagggcagtaacttgaggctgatggattggcatgctttgtctatataatgtaattcaaataaagtcataacattttggctatggcttatktgtcaaacatttatacattttttttgtctgataaatgaactgctaggctttctgactgkttaataatagtccaataaaaagggagcaaaatagcttttgaccttccatttaatattactaccagcagtttggagatttaggtgtatatgtaaacatttaaaaatgattttgcattgactttttttcagaaaaagcacttttaatattttaaataatacttattgaaatggattccacatacttgtgtctgagccagtgtccacactattgccacaaactctgggaacaaattcttatatatcagatactatacaaatatttatttataatcttttcccacagactatatgatataaaaatttaaaagccagtatgaaagtagaccacttaaaaaaggtaactgaatatggttccctaaggaattaaggccaatttggaaatttcttatgtaacattcctaaaatacaaatttcatcatgttattctatgtctaaactttttcatatctcttcattgtccttaagataaagcccgatgccccgacatagcttatggagccatatgtgatctggcacctgccattctccctgggctcatcttttctatgaaacccctttgatccttcagggcattgactgtgtcctgctttctggtatataggcctttgcacatgctgttctttctgaaactgtctggccattcttttcctttccctgttcctcagtcctctgtatcctaatctttttcacattctgttccaggctctaatcatctctaatgtattgtgattattctttaaatctcctgctttcctagctgctggtgtatgcatcacatcagctttccacccctgaccatggtctccctcagggactttcagttgagcttgttgttcccacattggattctttggcattatacctagctggagccagccccggagagccacatgccaggggaccttaaaacctgtgggacttctgcaagccaccaacttaggaagagcaaaactgaaaaccaggaaaaagattttcagaactgaaaaccaggcaaaagcccacaacagaaaaatggaaagcagaatgaggttgagaagtggttccacacagagggagaactggggtgaagatgagaatctgttgggcgagatgaggtgagaagcaatgaagctgctgaaataaaggtgcataagggaaaagacaggagtgcggagagcttaggtgagacgtcacttagtaggcagagcacacacaattctgttttgttttgtttttgagacagagtctcactgtcaccaggctggcatgcagtggcacgatctcggttcactgcaacctccacttcctgggttcaagcaattctcctgcctcagcctcctgagtagctgggattacaggtgtctgccactacgcccggctaatttttgtatttttagtagagatcatgttggccaggctggtctcgatctcctaacctcaagtgatccacctgcctcggcctcccaaagtgctgggattacaggcgtgagscagcacaccaggctgggagcacatgcaattctggtacaagtcataaacctagattctagwccccccactgccagaccttgggtaagtcacttaacctcatgtgattttagagtcacatgaccttggttaagtcacaaactccttggtcctgagtattcttatctattaaccaaggaatttgtgttagatctgtatttgtcaaaaggcacgtaaatgttaagaggtacaaggggacatggaggggttcacaaagatatggcataaaaatgccgcatcttggattacttttacataatggaacaattttaaacattttaatccagagaagaatggagatgctgtatatcaaatgcaaaatttgaacagttttagaatgaagcatgagaatacaaagacattttattcatggtgaggcctctgtagactcttccccaaaatgtatatggaatctctgttcactcctctctactatttggggcccttcagtggacatgtatgagaaagaatgactacagtattagtcagactctttccagctgaaacaagaagtttttaagaataagattagtgtaatgtgttaaatatgaagtttactaataacagtgttctgtctcttagaaataagtaaaataatagcctttagatggccagatgccactctgtgtcatgtttttgctccttgaatgtatatattttgtaataaaatgcatcccttaygtatcatctttgaatgagactaaaagatgcacggtgttttgacaacatgaagaaagctttacagcatgttacatggaagattttaaaacactgagctgtattttttctttrtatttctaggttctacctggatttgtaagagtcaggttatttttcctggttttatgaaacttatcttccaaaagcacataaggttaattttttgaaatactcaaacattgaggaaacagagtctggtcatggtaattggaacttttgatgtgcccactccagtgacctgttcatgcaaaagccttaagtaagcaggttctggagccagtctgtagcagctctcttcactttgagaatgtgttgatggattaaagcagaacccaaacagtccactatctgcctgttgctgtgtaaatgagaacccccttgatttttcttttttttaaaggaggggaaggtgtaaatatcaatgctgggaggtaaccagattagcatraaacagagctgccattttatactatgcctcattcaagtgacagtcattcaagttgcattttttttcatctcctgagagttattatgaactttctttactgagtgttatatttaagccttttgaatagtttgctgtctgcaacagtggcggcagataaggaatgctctcagaggatctcactgtgagacataatggtgaaatgctgcaatgcatggaattttatttgggactgcaatttaataaatgatggactatctctaggtcaaatctagtccagatcagtcactaccatctgtcaccaagctacagccaactggcagctggttggtggccattatgaaatccattagtaatttcagttcatttcttaattaatggacatacttatgcacagaacattccataattgaccattttcttaagtggcttcattctgttcctgttttaggatggacattctttgcctctgaggaatatgtcttctagtttgcagttgctacagtggagataaagtttcttctatctctgtttatgcatatgtgtacaatctgtgaagggatggtagctttgaaacttcattttacatagcttgaagttgaaaatatgattcccaatgagacttttagagttggacacatttcaagaatgtcctttcataggagattttcgtattgcatccatatattctggtcccagatgaaagaagttcttatagaaaccttcaaccaaaggaagaaaacctatccatttaaatatgaggaaagctggcctgtgtttggaccattctcccagtaattttttttttttaacgtctttgaatgatttcgtccaccacaaattgacagggtagaggacctcctcttttggagttgccaacaagcacattttgctaccagtcaactctcctaaataataagtatgatgaataacaaccaattggggaaaatttttcagcataaaaaaaggctgacagctgtgaaaacaaagcaagcatacagctcttcaatttaaagaaatccttgctcacgcttatactataatgtaggggagtctcttggcagagtcatattttgctctatttttacataataaatacacatataatcaagtgaaaatagaccttggtgcagtgctcagccattcccatgctgtgacgatatagttcatttaaatgctccttgggaatgttggctcattcaatgagaaaacagtcagttttagaccaaatatagtcaattccaaaaagcagtcaagccagttgcatgaaaatggacttttttgcttctccactggctgttttcaaatcacatttggctcagacagaaaatggagtgagccttctaaaacctcatggtttgtccactatagctttattttattattttttactgatacataatagttatacatattttgggaaatacattttaatataatgttcaatacctatctgtttcttctctaagctgaattaccatattgctacttctgttgtcttatcatatcttttcaaattgcccctttgcggtgaagtatttctattttcttggtcaataaaatgtctgtgtgacacattgaagcgatatccttcaatctgataacattatttataaaccctataaatcataaacaacatctgtactctcaagttatgtttgccatctgaaatgaatctaccaatagtgctgtgtaagtaatttgcttccgagatcagctagcttggagtccaaatacagaaagcaaactggcagagttttcatgaacattttttacaggactattgaaacttctacttaactaaaatgacaaagtgcttccaaagctttgtgctttgtgaaactggaggtcatactatttcataagcacacgagatgcatttatgtgaggctggaccttaggcactcagctggctctgtatacacaatctccaattttagcaggaggtaaaggaactagaatcttggtcccaccatttccttgtgacctttgaaactgacttgacttctccgatttgagtttcctcagcagttgacacgggtttgaaagcagatgatggctgtgggagtggctgcttctgtgcccactctagtggtgtttagcagtgttcttctctttctccgtatctttcccctttccagcgggtgtaggggctgcggctttttctttcttttttgcgtckatttccagaaatatacaaaatgcacgaattcctcaaccgataatgcagcagatgactgcttagcctctggaatattctgtctccttgaagtcccagttctctaaagaagaatgaggtttactttgacttaactggaacagcttctgctactaattccttctaatggactcctacttgtgattctgactttgaattaaatcacgaaaccacaggaaatctctaatttgtttttaagactttttggtgaaaaaaacaaaagtatgactttccaggaaacactagagttacttgtttttcatactatatcccattaattcagacacatattgaagatattcagcccttaaccactatacatcataattgtctgcttactgtctgcatcttcataatatgggatctcgttcacctctatcaccagttcctaccacctagcaggcccttggaaactgctggttgaatcaacaaatggatcaatatttgtgtatttcctgtctgtttctcaaaaggattcaaggcagtttataagaaacacatgtgaaacagagcaatacaattaagatcagaaaaaatgagaccagacatcatgtgaagaaaatgaaaagatatttatgctaaggaccaaggcctggtatgagatcatttgagaactggacttaactctaaattaaggcaaaaaaaatgagcacatgattgcctatactgttcccttaatcggagaaaataaaacatacaagaggaatttcttcacatgggggaactatcaagtaggagaatattgcaaatgaccattgccacatctgaccctatttgtgtctatgtggcattcttggtcatttctgtctcttattaagaaagtctggggctttgggaggccaaggcgggcagatgacaaggtcaggagattgagaccatcctggctaacgtggtgaaaccccttctgtactaaaaatacaaaaaattaacrgcgtggcagcgtgcgcctgtagtcccagctgctggggaggctgaggcaggagaatgacrtgaacctgggaggcggagcttgcagtgagccaagattgcatcactgcactccagcctggtgacagagtgagactccatctcaaaaaaaaaaagstctgggggtctggggttaaatgtaatgtcctggaacctgagatctaagcacagctagtggtttactgttctttttctgaaatcagtacagtgcaatttgaatatgtattatatgtaagtttttatacataatatatattttaaatatatgtatatataaatatacacatataagttacatatgtatatttatgtcatgcatgaaagctaaatttctgtgggaaccaactctatatcctttattttttaaaaggtcaaattagaaacagataaaactttaacaaacattgctatttaaggtttgaggaaacaaaaagtaaattccttttaaacatctattctgctgctgtagaaggggactttgatgcatttgccagtagcccatttttatagccatgtaaaaagctctagaagtactcaaaacagttgagagttagaaatgctggacaggaggagtgcttgctgagacaggagctgtcgtggggctcttttcagatcctgttccccacttctcattgaggcctggccttgctttctcttcccaggacttaacacatatggtagtgttctcaagcggttatagaatgtagaattttgctactgaagatgagttcaggaagcatcagcatcacctgtagtctcaggaatgcagaactcctaagccaattctctagaggatttttatacattgctagtgtgccaagcagtaatatagaggactctttattttgaatgaataaatgaaaaatgcgagaccttctttctttagagtatacttttatggtatgcattatctgaaactatcttctttgaatcctaatayccaaatgacacaatgcgttttccgtgaacccttgcccacttttaatcttttgagtttctgcatgctcatatttccttttaaagtttctccttctagttgaaactctacctattacgtaggtggccaacataacacattgagggtcataacagacattgagcagtagggacctctattttctttttttttttttcttttcactctcttttaactattcaaattcactagtacatttgtcccctatgaggaagctgatatgcttcctcctaatggtaatctcttgaaaccctatagttaattgtttatacctaccttaaaatcccgtttctcagcagagttaatacaaatctgtagttcccagaatcactgtgttcttgatgaaaatcctagactcttttcatggagaaatcggattttgcctatttatcttgcctcaaacccttttatagccttgatttttaaggatttttttttagacaagggacccaccagaaagagtaagtgagtaaagaactttatagagagggatggcaaagagctcctagcgaagtattagagaatcttgcaatcaggaaggcagtcattagaagataatataaaatgagtgtcaagagttttggccctggcaccaggctgccccaagtcgggaaatgatccatataaaatctcaacacgtaataaatactcacttaatattagcaattacagttaactcttgaacaatgcagggattaggttcctacgcaggaacggtgtcaggacaaccacrttgtattacttggagtccccaaatactgtattactagcctaccattgactggaagccttaccaataacaaacaatcactaacatatattttatatattatatgtattatatactgtattcttactgttaatataaagtaagctagaggaaaaaaatgttattaagaaaatcctaaggaagataaaatatatttactattcattaagtagaagtggattatcataaaggttttcattttcagtatcttcacattgaataggctgaggggggagcagaaagaaggggttggtcttgctgtctcaggggtggcagaggcgggagaaaacccatgcataagtggatccgtgcagttcaaacctgtgttgtccaagggtcakctgtattacccaatatgtactaacctgcatacttaagacacttaacagtttcttaggtgtttataaaggccaatatcttatatttcagtgtaatcacacatgaagagatattacattcagagtagggtgaaaggaaagctgaggcgccgcaaccgaattgccaggtctgttttgggagggcaccgacaatgggttggcttaccgccaccgtgaggacacacactgtacctgactgcacaggtgctgcttggaataagaattttcgtgggaggaacaagtgtgatcatcagggaaggggttagtacccrtagccaaaggactgtgcactaagacaacaaagaatgatatataaacaaagcacaacatttgcatggcaggagaaggatgaatggggtacttaagcaaagctctcgagacagagtagtgtgtgattgaaaaggctaaaatgactatgtatattgtgtttggagaaayaggtgaggcccccatgggctgtcaaataatgactaatatattagtagtcatgctatcgtgttattattagtgactcctttgctcactgttagctaaggcagttactttttctctatacaaggatttcttgacctgtgagatttcctttttttgcctttcacggtacacttttcaatgctatgtacaaaggtgtcatgatttgtttagcaggaaatctattattattgtcccctggaagttattcttcagcttatccaaggtatacaaattcacttttgcatttctaagtcgcagttgttgattccctagtctcagttgatataaagctgtagcattttggaaactgtttgccaagcatctttcttcatcttcagcagtggaatctagcccattggaccattctcctctcttgtaagcaatttttatttagtcaagttccaaggccctgatagtttttttatgatataccttcatttattgacaaatggaagactattccacctaaaacattgttgtgtacttcatgtctgatatctgtgctgaagctcagcaagaaataactatatctcactatacagccatccagttcagattagaactgagtttttcaaactttgatctttgataaacaatgtacctgtcaatttaatgtaactttttgtctaattctgaatgcataggtcataaagttgaaatgtttagtaactatgtgcagaaagagaattttgtaaacctaggaaaatgctgtagttctagtgcctattaagaaagaagtgttaatttcctttcagtttttccctcttaatattggggattagtttattcatataaaattacattatgcatttttacttaataactttctcatgttgttaaacaactttgtgaacataattttactatttcctcactgttctagcatatatctgtgttattatttatttattattctagttttagacaggttcttaccaattagatactacaagtattctgagatgagcatttttatgcataaaggtttttttctttgttaaaattatctccttaaaaaagatgaagaatattaggattgtttagtcaaagagtatttataaagttctttgtatatatattgactaaacccattatataaatttatacctttaccttcaaggtaaaaattatatgtctcctttcacccttgaaagttatgtccttattaaggatatacatatttaggccaggtacagtggctcatgcctgtaatcctagcattttgggaggctgaagcgggtggatcagctgaggtcaggagttcgagaccagcctggccaacatggcgaaacactgtctctactaaaaatacaaaaattagccgggcatagtggtgggtgcctgtaattccagctacttgggaggctgaggcaggagaatcacttgaactgggaaggcggaggttgcagtgagtcgagattgcacctttcactccagcctgggcaacagagggagactcagtctcaaaaaaagaaaaaataaaagaatatacatatttatatgttataggtagatggtattttattgttgttttagaatagcctttcttccattacatgtatttatataggactaaattggaactgaatgaaaggaggactttcttcaaatacctatctgtgggaaatgaaggctttatgacttgtctgaaaaaatatattttttaccttatgtaagtgatatagaagacctgggaatatagctgtctcactgcagtgctcttctataggtccagtctgtggagtggctacataagggagacatcttgatgaagaagactttatataacaaaacaataaccataacggtaattgcaataacaataatctcagctaaatttgtttaatgctgtgtgccaaatgctcctcagtgttttgtaagtcatataatcatctcaatatccttgaaagcaggttaaaattcctatttacagataattaaaccattttgacaagtagctgggctagaattttaatcagtaaagtctgactctagagcctacagtcagacactacactatgatgctattactttctcttttgattggatccaaaatgaaattcattaatatttaattctagtctgtgatacctaatattatttactccaagtcaaaccaaatttattagtgcttgctgcgtgccaagtagtggataagtactccaacatttttgtttgtttgttttagccatcacatattaacacttgtatgtatcaggtactgtgctagaggctagggatataaaggtcagtgagcatgtccccttttctcagggactatatgtccacagattattggaaaccaacatcataaattctataatgtgtgtagcattagaagaggaagcacaatagatgttctgagctgaccaaataaagcttcgctaaaatagtgccatttaagtagagtcttgcaggacacatgtttgcaaagaagataacattggagatgtggtagaggtggtggtgagtggaagcatattaaaaatcaaggagattttttgaaagagtgtgctgttcaggaatctacaagtgtttgatgttgcatttgggtgagatgagatgagaaaagtagtccagggtgggaatctgagggcctttggtccatgctaaattttggactttatcttgtasaccaacagttacaattcagataccatcagatgctaggcaaatgaaatcagtgagtgaatcatactgggtaaccagcagagagagtggtgggtactatggaaagcaggaaaacacacgccactgctaaagagaagagctgcctctcagctcatgtaggttgtatccaagggtctggttgcatccatacccttttatttttcatggaaattcataaatccgggtttgtatgtgaaatctccaaattttcaatcttggcaattaagatggaaaatgattataaaacactgtgcaagccagggaaaatataaacggtgcccttgggctgcttggctcggtcctgctaatacagagggtccagggaagaacatgaagcaggggaatgacgtggttggatytgaacacaggagagtccattcagatagtattttgttttgtttttgagacggagtcttgctgtgttgcccaggctggagtgcaatcgcatgatcttggctcattgcaagctccgcctctcaggttcaagtgatcctcctgcctcagcctcctgagtacctgagattacaggcatgcaccacaggcccagataatttttgtatttttagtagagatggggtttcaccatgttgaccagactggtctcaaactcctgacctcaagtgatccacctgcctcagcttcccaaagtgttgggattacaggtgtgagccaccatgcccagtctatttttattttttaatgwcaaataataatgatatatatttctcacatatgctgtgatattttggaatatgcataaattgtgtaatggctcagttgagctaattaatatctgcaatacctcacatacttatttttttgtgggtgagaacacttaaaatctactctccagtgagtttcaaaatgcaatacgttattattaactataatcaccacttggtacaatagatctcttgaatttattcctcctaactgaaattttgtgtcctttcaccaatatctctctaccaccctctcccttgggtcctggcaaccaccattctactctatatttctgtgagttcaacttttttagatctcacatataagtgtaatcatgtgatacttgtctttctatgcctggcttattttacttaggataatgtcctccagattcatccatgttgttgcaaatgacagaatcaccttctcttttaaggctgaatagtattcaattgtatacacacataccaatggacacctaatattgattccatatcttggtattgtgaataatgcttcaatgaatggacaagtaatagacttggtaaggaatttaacttgactgaaggacaaaagtggcaagttgttagaaagggcaaagtcaaggagacttcccaggtgtgagacatgggagactgagtgaatgggagtgctagtggttggtagggaatttgggaggagcaggtgtgagaaagggtgagaatgagttttgggtggccctattgactttgacagtttctcaagggtgtttaggtgaaagtatttcaattcatctaattatcttaacgaggctacatggtcgaacataatagtccagtttttaaaagtgcagagacagaagtccagagaagttaaaagaattttactcagtccctctcatctgattagtggcagaaccaaaattggtaggtgttccctctactagtccacaattattttagataagatcaggatcctttgaaatacctgttcctcatctccttatttaggttttggaatattcttatttataggaaaaaacagcattatcaattatgcctttatacttgaaagaaaaacccaagaaagtcaatttcaggaatcctcagaaaataattacatcttagaaatgaattgaaagagtgaggatagcatgaatctgcatttacatggtgcatacccaccccaccctaggaatcaccaacctgcgcctgagttcaggtcatttgcctaaacaaatcgttaaagtggaagaaatgtaaatttggtgtgaaaacagtatttggttttaagtttttcctaagttattgagagtggcaaagctagttccaaaagagtgaaacataggatgaaaacaataatatttctttatgaaaatagctgcaatagaataccatctagttgacttcatcatgattatgtgctgctcaaaatattcctttctccattatgtagcaagtcagtctcttttggaccagaagattgattccggtctttgttttttaaatggaggggttatttgtttagataggggtacatgaattaaacagaattctagctcctgataatctrtgaggatatatcttgggagctaggatacagtttgttttagggctgctgtaacaaattactacaaaccggactgcttaagacaacaggtattctctcacagttctggaggccagaaattcaaaatgaaggtgttggcagcattgcactctctatgaaggctttaggggagaatctttccttgcctcttccagcttctgaggctataggcattccttggcttgtggcagcatcactccattctctgtctggctggtgacattgctgcttccccttctgtgtatctgtgacatcttcccttgcctctcttatgagaacacttggtgatggcatttggggctcactcccttaatccaggctaattgcaccattttaaaatccttcatttaatcccatctgaaaagactctttttctaaataaggtaacataatccaggagtgggacttgagatctttggatgaccattattcaacctgttataggcagtgtaaggttggattcaaggactaggcaaagtaaggtgggcatcggacatagggttcaacttcaaggaaagtctttattgtgagcaaaagcaaaatgtccaaaccagagtggcagtgtcaagtgtcaggcccaaaagataaagcatggatctgaataagaagacacaccacacagctggaactcagaaggcagcactctccctgatacttaagcagggcagaggcaggaaccacttttctggttgggtgttgagatgtgatagtgtgatatccatgtgactatccatgctgaaacagtgtgtctgtaaggcaggttgatgacacctgattgaaattgtgagccaacacgcctgtaatcccagcgctttgggaggycaagatgggtggatcacttgaggtcaggagttcgagacccacctggccagcatggtgcaaccccaactctactaaaaatacatagtggcgcatgtctgtaatcccagctatttgggaggctgaggcaggagaatcacttgaacccaggaggcagaggtgagctgaaattgtgctgctgcactccagcctgggcgacagagcaagacttcatctcaaacaaacaaacaaacaaaaaagaaattgtgagccaagtcagctgggaacacagatgtgtctgagagaagctcaggcttgactcctgactggactcatgtcactccattttagtttctatgtatttccatctctacccctctgccccacactccagctagagtaagccagaattatatatacatgactcagccctttctccctgataacatctcttggcatatccaaagggtcacttgcccacaaagttatcagtgaccctgctctacttatcagtattatctccctcaggcctggtcacacaggctccttcctaaaatagttctccttaatctcctggcctagagcaaacatgcatctatctgcctgcaacaagcaaagtatttccccatccacacaaattcccaggaaaagcaaaccaaaatgtaaaatgaaaacactgagtttattgaattttaggaccaccaccttagtgtttttaagtcttagaaacgtgttaattatcataatggttctggcctttttgagcctgagcaaatttttggcataatgaatcaggcacaaggaggatgtcatgtgcagtgtccgtgtctttctgtagccacaggactgtcacttgattgttccctgtgtggttatggttctctagaatggttgacataaagcaaacaaatgatattgcttcctcatggcagaggactaagtaatcggcacatttatcaaccgctgcttggccttgtggctgttcagatattgtatgtgccacgacatcgtttcctttgtggcttcctgatgctgaaaacctttcctggttaaacttctatcatactatatcaagagtgataatgagtcttaaacatatttggcatgtatgactttattaagaaaatttgttaaggaagcagatgttaatgttttgttacawccttcatattctygtggacttactaagggaaagctttgctacatcaaataaggagatgccttgttgcaattcgatcccaaaggagatttaatttcagtagagtttacaacacattaccctcaaggagacagagagaaaggtctccataaaagattacttgcatcttactatacctaattttctcagacagcacttgcaccagcagaagaaatgacaaactgctaatggcaataatttggaatagtctgtgtccccaatgactcttttttcttatgtctgtgttgcactcagatcagcaatactagaatcttattatagtggaaagtcgtactgaacactttagagacagacacaagtgtggcagaaagatcataggctctgctgtcagatagacaccttttaccttaacttacattattactcaagtcattttacctcctcagatctgtgtcttcatatataaaatagagataataatgaaaaatctgtttcactgtgtcttggcacatacaaattgccacctagatattaggcaagtgtcaagtatggtcctctcacactcactctgtccttgctttacattcatgctggttggactgtccacccctgacaagtcacacagaaaactctgccaactcagagaatccatgtgcattttttttttgttatgctgtatttttgtccaattgactatttttcctccttacacttttwtgttactttggtccctgcaaaaaaatagaatggttggcagacatttaagtgatgagttcttgatcaacaaatgaagagtaataagaaaaatgtttgcctcaatggcttctgaagaggatgaagcatcacttcattaataaagtagatagcttctgcctcttagactggactcccaaattcttgcctagaatcttcagtctctggggaagagaggactaaatccagtcagaaatatagtatatatacaacctcctgacctgttcttaggactaatcaaaactcacaggtgtcccactgggcaactagaaaattcctaagaatgaaggagttatttggttcttgctaagtgaagacagcacacacaaaattactctgctgaccaccactcggaatggttcctttcacagggctttgtggactcctgtgctggaggggaaagaatgctttcttaacttgaaagtttgtagtttggttctgggataacttaattaaaggccccactgccaagaaggatagaattaaagatgtaagtcgggacttcgaatatcctgactttaaagttcataaatcacctttgtatttcactggattctgttgtatttcctcttttatttaatagttgttatttttcgtattttctggactacttagtcttgggaaaggttggaacaccaaattaagacttcaaatgtagcttaaagaggatacagtgacatctggagaacctctgtttctgacaatatgggggactatatgaccagagaaatcctgccagtagaaaaatgattagaaaacatgcatgcagagaagcaagcactagaaccagcatttgctaatactctttagcttagaacctgaactttatgggccataagaaatgaggatattacaagaatcctgaagtccacagtaggtgggagatagaatagaaacttcaaaataaaggtcggacatccaaaagtcagcaatgtcagtgggtgaactaggtaaaaaacaaaacaaaacaaaaaagaaagcaaacaaattttaaaacctgtcattgaagactgaagaaaaaaacagtagatattctaacctgttttgaccatggttcttgaaaatctctcatttttctggggctaggagatgagctatctacaaatctactgtcctatatataggacagtaattaattctacttggcccaaaaaccaccaaacagaaaattaagtttaatgtggttctatttcagaggtgcccttaagcacttagaaaaacagaatgcaaatcatctctggattaagaacaactgcacagcaaattaaatggtagattagatagaagagagaattcatgattggatacatagatctgaataaattaattacaactcaacccagagagacacacacacacataggaaatacaagagaggcagagacatacagtgtgatcacatctaatatatagctaaaatttgcattaattttatatatgtaatttatcaatatataatatatcaatatataatatattataatatatcaatatataatatattataatatttatataatctattatatcttataatacattatatatacatttatgtgtatatataaatgtatatataactgcagttccaggggaagctagagaaaatargcagaggcaatattttaccatgcttaggaattttccaaaacttttgaagacataatttttcagactcaggaagtcctaaagactacatggattcagtaaaaattaaatacattaaataaaaaggtatttaggtttagactgatggtggttaaactgtagaaaacagaagacatagagatctttaaatcactcagaggaaaaaaatacagattacctacaaagcaaagacaattagaatcatggctgacttcttgaaaacaatagtgaaactcagaagacaatggaataatatcatcagtataccaacagaaggttaactgtcagcttagaaatgtacaaccaatacaaatcttttagaagaaagaaaaaaaataaagaaaaaaatatctttatttggaagcaaagtaactttggggaaaataaaaccaacttactakgagaacttactatgaacagatgagtaaggaaattctaaagaactattctacaggaagagagaatatagccactaaaggaaagcctaagataaaaaaatggggatcaaaaattagcataagcatacagtaagctaaaaatcattgattttgaaaaacggtattgatactaatgatttccagattaaaaaaatagaaaaccaaaatgctgaacccaattgcaggtaactgtggttctcaaactatgtactgaggcactcatgacatcctagtgaatgcgcaggggcactgcaggatgtttatattttctagggaaacagggcaatgtatattggacacagcacagagtgtcctcaagttcacagcttcgacattgaatcacactacattcctttgataaacacatttgatcaaacttggtttttggatggatgttgctatgaaaaaaatgcaagtaccaagagaaaatcaatataaaacaagaaatatggatggagatatctgattcaattccaagatttaagaagttttactgtgcctaacagatgtacatatactgttagaaagtaatagtggctaagaatcaaataaagattttttttcttttattataatttatgtctattattttttcaaatgaccactcagttattaggatatgaatacatattgtttttacttaattaataaacaaaacaatactacttaatacacaaaacagtattcctttttgcctaagggcattatgaaaaatttacagagacagaaaaaatgtggggaaccaagaaagtttgaaaacatctggcatataaattggtagggggataactggatcctggcatataattgatacggggataactggtattgattacatttttattttgttaagttaaatatgcatgttaagacttctggaggaaaaaaaatttcgtcttgatataaaaattagccaggggtggtggcgggcgcctgtaatcccagctacttgggaggctgaggcaggagaatcgctataacccaggaggtggaggttgcagtgagccaagatggtgccactgcactctggcctgggcaacaagagtaaaactccgtctcaaaaaaaacaaaaaaaaaggccgggcgcagaggctcatgcctataatcgcgcagatcacgaggtcaggagatcaagaccatcctggccaacatggtaaaaccccgtttctactaaaaatacaaaaagctgggtgtggtggtgtgcacctgtaatcccagctactcaggaggctgaggcaggagaatcgcttgaactagggaggcagaggttgcagtgagccaagatcacagcactgcactccagcctgggtgagagagcgagactccatcttaaaaaaaaaaaaaaaaaaaaaaagattatccttttgatagagtatatatcttcaaactagtaaatgtgaggaaacaatctcaatcaatctcaaacacagcaagatgggaatttttttatagggggccaaaaataggcactaagtaagattctaagatgaattaaaacatgtcaataatgtcaattcatgtaaatgcagtaaacttttcagttaaaaggcaaagatagaataaatcctgctattttctattttcaagagatacacataaaactaaaaacttagaaaggttgcatatatataggttaaaaatgatgtttgaagaacatacaaaccaaaatgaagccagtgtagctttagtaatgttagatgctaccgactttaaaacaaaatgcattactgttcaagtcacctcatgtcaataaaaatttgaattcacctgaaacagataattattctaaaattgtacaagtaacaaacaattttaagacaatacatttgatcacttactgcagttgtaagtgatcagattaatggagaaaaattatatgatcctcccagtagatggattaaaagccatttgctgtaagtaaacatctataataaaatttctcatcaaactaggaatagattctataacttgataaagtatgccattattccttgtcacaaacatactcagtgatgaggcattaagtgcatttcctttaaaattaggaacaagataaaaatgttttctactaaaactctattcatcaatatatttctagctgagaaaataaaattgagtcccctctcacattatacccacaggagaccataattaaaaaaaagctttttgttttgagagaattatagattaacatgcagtgataagaaataatacagagagatcccatgtagccctgttccccaatggtaacttcttgcaaaactataccacaatatcacattgagggcattgacattgatatagtcaagatagagaagagttccatcaccacgaaaatctctcctgctgcccttttatagccacatgmacctcccttccctccactcccatttctcctctaacttctggagacccccaatctgttctctgcttctagaatgttgtcatttcaagaatgctatgttcaatgaaatcatatactatgtaatcttttggattggtgtttttcactcagcacaattcccttaagattgacgcaggttgttgtgtgaatcaatagtttgttccttttcattgctaaggagtattccataatatggatgtaccatagtttttcctgtttattttcttatttaaatatttttcctgtttattttcctaaattttatagttaccattttccatttaaatctatgatccgttttgaattaattttttacaatgtgagctttatgttgagtttcttttttccccccagctccagtacacatgtttcagtgccatttgtcaaaaaggctgtattacttcctctattgcatttgtacctttgtcaaaaattatttggacatatttgtgtggatctatttctgagttctctgttgttctattgatttatgtgtctgtctctctgccaatatgatattctcctagtacctgcttggtgtttagcagttatatagtatatcttaatatcagatagagtaattatctctttattatttttatgattgtgtaagccattctgaggctgttatctttccatataaattttaaaatgaactttttaaaaagtttacaaaaaagctttcctgggactttggtaagaattgcattaaacttatacattttgggagaattgggatctttactatgttgaatcatccagtccatgaacatagtatgcttctccacttgtttaggtcttgattgatttctttcatcaacattttataatttccagcatacacagtctatacatttttttgttgtttatatctaagtatttcattttatttttagtgactattaatggtgttgtttttaattttggtttgcacatgtttattgtcggtatacaaaaatatgattgatctctgtacattggtcttgtatcctaagaccttgaagaagtcatttattagtcctaagagtatttttgtatattttcttgacaatgtggacaattgtgttatctgtatgatttcttcctttttaaatttttcttttaattttttatatttgttccttttatttttattttatttatttttccaatctgtgtgccttttatgtttttcttttcttgattattgcagtgtctagaacttctagtaataagtcaaataagagtggtgggagcagacatccttgcctcattttattttatttttatttyatttttaatttttattattttatttttattattatttttttccttgcctcattttcaatcttagaggaaaagcattcagtatttcaccattaagtatgatgttatctttagattttttgtaggtgctctttaaaaagttgagattattcccttcaatccctaacttgtgaccttttattatgaataaatgcatcaaggtttaaacattttataagaaaatttaggataatatctttaacacttaagaataggaaataatttttaaaatatgtcataaaaagcgaagaacaaaaggaaaatttcagtaagtttgaaaatgctgaaattaagaacttttggtcatcaaaacataatacaaaataaatgagaaataaagccataatttcaattccagtattttcatgtaccaatgaagaattcatatccagaatatgtaaaaaactcatacatgatagcatcctggcatggtggctcacacctgtaatcccagcactttgggagatgaggcaggcagatcacttgaggccaggagttcaagactgtcagataacatggagaaaccctgtctctactaaaaatacaaataattagccgagtgtggtggcacaggcctgtaatcccagctagtcaggaggctgaggcacgagaattgcctgaacccaggagggttcagtgagccgagatcacgccactgcactccagcctgggtgataaagtgagactctgtctcaaaaaaaaaaagaaagaaaaataaaaatataattaagccagtagaaaagcttcttgaataagcatttcatttaagaggaaatgcaaattactattaagcagggaaaatatactcaacctgattagtaattaaggaaatgcaagttaaagctttaataagataccatttcacagtgatcagattggcaaaacctaaaaactctgataatattaagttttgctgagatataaagcaactggtgggagtgattggtaagtgattaaggaaaattatttgtcattacccaacaagtgaagatatatttaacactatgccatagcaaatctagctctaggtttataccctagaaaaattgttgcatgaagagatgggttaatggcagcattgtttgccatggtaaaataactggaagctacctaaaagcagagtcagttaaattatggagtatttatacaatggcatacttcatattaatggccatgattagcctatggcctcatgcctcagaatgggtgaatctcagaaacaatgttatgagaaaaagcaagtcagagaagcatatgcttgatttcattgaattaaatgttataaatgggtgaaatccagaactaaatatttggagtatatacacactgatacaagtagaaaaaaagaaaggaaaagattaacaaaattcaggagaattatatttggggatagaagagggagggactgggtacacctgggactttaaacattttggtagttctgtttctcaggctgggtgtttggtgcatgggtgttcattttattagtctacattaagctatatatacgtgtgtgtatattatgtacattatatgtatacacactatatatatgcacacacattatatatgtgtttgtgtaaattatgtgtgtgtgtatattgcatgaccaattttcatagtttttttaaattagagaaaataggaaaaaggctatgtcaggtgcattcacagcagaatgaaatttagtaacagtgaattgtttcaaagaagtaagataacaaaaaaagtcagcttttacatgtgatcttcattatctaagtcagctgtccccaatctttttggcaccagggccagttttgtagaagacagtttttccatggacggggatgggggatggtttcaggrtgattcaagggtattacatttatcattagattctcataaacagcgtccaaccgagatccctcacatgtgcagttcacaataggcttcccgctcctatgagaatctaatgctgccgctcatctgacaggaggcggagctcaagctgtaatgctccttgcccactgctcacctcctgctgttcaggtcacttcctaacaggccaaggaccggtactggtttgtggacccccataccatggaccatggtaccggtttgcggacccctgatgtaagtaaagttaggaaatttcatgtcaatttgttgtcaggaatttatgttatttttgcattttttgagggcacagttttcagaaatagttgaattaactttttaatatattcactgtaagttttgccttcagttatgtaacctttcaaatattattccaaggttgttttcctattatgctaaaggaatgactaaattgctaaaatgggaaataaaataaagaatattactccagtgttttttgcttagtaagatattgtgtgttttaaaaatggttttctgagtattcttaatgaagaagaactctgtaattgttttcttcaagtttagtagattaatttcacatgtataaatgtgcatgcccatgttttttggctttcctttatcgataatgaccattgtccatgcagagcttctcggcatggcctctggagtgtcttaaaatatgtacagtgtatatggcagattcaagatcagctggaagctgctttagaaaactgaagaaattgcaaggcaacactagaacttgatatctaagttcctaaaaatgactgtattttggaaattcagtaaaacagttttgtgtctagagaactctaggcattcattaaaagcttaaaataagagcactctcccccaacttctataaaataaagaaaccaaaaggaagtacctgcaatttactcagttaattcaatttaatttaaaaaaattcagtaaatgttaattgagcatctaccagatagtgccagataacattcatggcactgggcatatagcaggggacaaaacagataatattatgtaacaataacagaccagtggtttctgcttaattggaaagtttcccttaaaaggcagtaagcttcttgagggcatgacctkgagttttctgtgacccagtttttcctcagcacttaacaatgcctggcacattagtatgtatttaatgcttattattaattattgttctttactgttagtacatttaatatgtgttcaatgaatgtaccccaaagccacacatcttgtacctgatgaagccagagtttgaacccagtctattggtaacaggaaaaacagttgccgcttcttgtgagcacactctgcaccagggcctatgctcagggctttatactcatcattgcacttcgtcccttagaaagagatattattatcccctttttactaataaagattctttttttaaattttctatttttaaaattttttgaatatatwtttttgaaacggagtcttgctctgtcgcccaggctggagtgcagtagcacaatcttgactcactgcaacctccgtctcctgggttcaagcrattctcctgtctcagcctcccgagtagctgagattacaggcacacaccaccacacctggctaaattttttttttttttttttagtagacgcggggtttcgccatgtcggccaggctggtcttgaactcctgaactcaggtgatccacctgcctcggcctcccaaagtgctgggattacagatrtgggccaccacgcctggccactgatgagggttttaagccttagactacttaaatgccttgcccaagatcaccctctgggtccatccccttcaaatactyccaattttcacagcctttgtatctgtggtgccagagtatccttggctacctgcaatggtgcagctcagtgtattaactaataggaccacatggtgtcatgtaatctgtttggctgattttctttccccactaaagtgactaattttttttacagaattgaccacatcagctagttattttaatggtaaatcaaataaagcttttccatttttttttgtctccaactgccagaacctggctaaattagacacacctaaattataatccaagatcagccatttagtaattgtgaaatcttggacaaatacttagcccctctaggtttctaacaccttatcagtagaggtgaagataataattcctacctagtctggttaatgagaggattaaatgaataaagctttatgtcctaacccaatgcctgacccttaaggagttttgctgagcagcacctgctgttactacatttatcattgttatttttaaccttaacatctaatttcaacattatctttgttctctggtctttactaacctccctgacctaagtcatattatcttaatctaacaaatcaccaacttctttcaagataggcagagttacttacttgctcctctttggatttgctcctttgttatggagcttaaactgtgttataacaatttatatgactgtgttatgaaaaagatctcttattctgtaccctctcttctaattacatacatttttaatgcaggttcattcatcttttcactgccagcttcttcattttgcctagcatataagtgctatcgtgtttgttgaatgaataggtcatatcattatccacagtgaatagataggtcagttctcttttgtacattattgctaataccattgatggtattactttgattttgatatgtgtaaggacactgtagtgtttacaaatatcatttgtatatgtaatttcatgtcttttcattagaatattcctctctcactttccataaatattttcactgtctatggatttttattttttgcattttttgtcttgctagtgctatattacaaatttttttcttctgccatttctgccataggactttataaaaagactttcttactttcacttaaacttttatttcccacgttactttaaggtatacattttactctttccccccatcattaatacattaccacttgactctgtcattaggctgtcaatctgtaaaacgcttgagaaagaaagagagaccttattttaaataggcctgatactttgctaaagaggttggcgcactgactacaattctattcttgtcaagaataggcttttgaaatttcaaggagaagaaatggaatttagaagagctactaaaccatgaaagacctaggaaggataaaataagtaaaatgaaggagaaaacagtaaaatccaaagacattgctaaatggacaaaattcactacaaaattctggagaaattccctgccttatattgaaataactcaatatgcaacaaagaatgccctgaatggccagacctagcaccaaggcatgaaactctctttaagccatgaatatcttaagggaaattatagcagttaattgttagtggtcagaaaaacaaaacattttttaattgaatttctaggttaaggtgatagaggttggggtgttggggccagatgagaaaagaacaaggaaacatttagtaaccattcaccaaaaaatgttatacaaatggtgataacaggtagttccttcatttccaatgaagtttagaggggacaaatttaatcatgtggcaaagttaagtgtcaaacatgaaagggagttgaagtgtcaaacgtgaaagggtaatgaagcaggagagatttatgttagaattcagacagacttcctgggttctgaaatcctctaatatgttactaagcagagcaggattcgccccacaaacaaggctggagagttttccaagattccaagtcattaggcagggtttccagggacagcactgccacagcctccattgttctgtgggatattctgacctgattcaagaagaaagcctatggaattgtatggacttcacactttatatgaaaaggttggcggcaaccaagcaggggaatacatcagttccttctgaacacggggctcacaccagcccatttgcctcataattgtatgcatgctacagcaaatgagaaactgcaacttcctctgccgaatgtaagaagaatttatatttttgcttaaaacggaatggttttcaatgcaaaggcattgataaggttaaagtgtcatactgaaaatatcctatatagacagcaatcggcataggggtggagaaagtacgctctttaaactgcttccgtggaaaatttcaatcaactgctagcttttgcttcacaaaactttgacgtatgtcccttgacctttaccaactaccctttcacgtttgacacttaacgtttgctacatgattaaaattcagcgttaattaatttcaacactatcagttaagttatatttagctaagaacactcacttttgtctttcgtgagtagcactgcagtgttattacaaagaggtagtcaggagggcaacagagatacgaggagagaagaatgattcagtgtgcagataattgttttgagtgaaatttagctcggtatttttgttcctgtcctcagtagaactgagatttagcacctcccgttggcatttagcccccacccccacataggaggaagctgtgcggggcgggtgctgagaacgagccacaccagaattaaattatagcacaattctaacactggcgagaattttatctggccagctcttgagtacaaacctggtgatcccaaaagaaagcatctctgtgtggtgtgttatcatcctcaatgagggaggttgacatcgttgtttaaagagcatcacccgaaaagtggtaaccattcccaaagaaaccagtggcagccagaatatttagccatagcaaaactgtagttctaaacttaaaaggtcaccygtgaagttgtcttattgatgatttattttatgatgtgactcactagaaatgaataaaacccaagaaatttgagctctctctccgagtttaacaaagtgagaaaacattttattactttctttattccatgctcttttgctctgtgaatggattatggtaagaaggtagatatgcaaatcttgcttttacctgaagctcaaaatgctgtagaaccattatagctgccactctttgggatgctggcatgaaatcgtggtctgtaagattactgtgccactgaaatacttctgtcatttagatgcacgtacaagacaggaagagaggttctgtgcttggtagatagtgtaggtgaaacacaatttatatgtaagatgcccataaatgtcttactaaggttccagtaatagatgttggattctttgggacagtatacccaggtagcctccaattgtttttttttaaataaaaaaatgtgttgcatttttatttgcgtatcacaaaacattttgcctccaataattcaacacttatgtatcagaatttggttccatgccctcagcccatccaccacctttagttggagggcactggggattttgtctttttgcttacccccagggaaaattccagccttcgtttgccagggatttaagttgcttcatttcagtactcaagtgattcagcatcaagtcacatttctcttgtcaggcactggtagaatgtccctgcactagtaactggccttagattttaaatccaagccaaagctaccttgtgttcttggtgggacactagatacctatctcggtcccattgttgtgggattaggaggattagagagagactttggggtgtatgtaggagggtatttttattactgagtgtatttagatttagtagatttaatgtttaaagattgggtttagaataaagatagtatttgatttttatgtatattttataaaagggggtgggttagtttgaagtaagtttatagtggcgtgaaagtagggatctagaagcaggataaagatagttaattaaattgtaataggtttataatttatgattgtatatgattgtttttaactaatttagatgtttattatttaggttttgttttaaagagttttgtattggtttattttataatttttattatggtgtttaatagttgtagttttaggtttgtttagtttttttatgatttttgttgtatttttagagaaaatagaatatttgaagttattagttatagagaataagaatttataaaaatatacttattgttgtctttgaaataaattaatttaatatagaaaaatttattttattttattattattttttaaatttcctgcctcaccattgcatgagaacctaatcagccctctgggatgaagtctctggcttttttactccagtatcctggaatcctgtttctgaactctagtcttatgcttaaggtcttggccaccattgaaaatgttcctggttcagcttccctgtgcttgcttctgacctgggtctcctctggatttgctgtcagctgcttatttgcttgtcacagcagccctgaatccttccacctccagcagtcaccgagccttctggatactctgatttattcttcaaactggactgactccccataccttctgctgaacagatttccaggagcatgtgtaccaccccagtgtgctgctctgtttgaggtcctatttcttgaccttggccgagtcctgccataaggttatgcaggaaaaggctgagctttaatattaggggagcatccataaatgaaagagaggaaaycatctgctatatttaggagcaaataaaaattttaagagtgggaaggtcttattgaaatgttttctagtccgtgaatcctctagtcttttttggcttcatttggtgtattataggatgaaacgttatttttatgtcaaatgtttactttcaaatgaaaatgttaaacacttctgtgttttgccatatctttctttgatgtcgactgaatagatggctgtccatgccttgcaattgaagatggttttattttgtaaattatttttctctctgtttttgccttttcaggtattacacaatggcctcgttatggagatggagcatccaactgtggggaagatttccgtcccaggtctgaaaagttttggtattttctctagcacctttctttattaattgtcccatatgctgtttactacaggtagcttatgagctcccaaacaactttccaagacattatccaaatttataacattgggtaaaaggggaatcctaggactgcactcacaaaaatgtatgctgagactatggcattgtgtcttagctctaaggagtgtcggattgccacgatgacaaaaaaatgctcgcatttcttaattccattttgtgtaatcacgtgctcacaaaagtacatcatgtaattatcaacaggttgatagtaataggtatggccaataacaagaaatagagtgtcgttcatatgagaattggaaagaaagccaggcaagatgtaactggagtccgaggaaggctactgactgctcaggctcgggcattttctttcagaaccgtggtttaaggtgtggatcttggctttacagaacaagaaactaaatgttttcagtacacccagaatagattgaatttttggaagttgattcatactaaaccagctcaccagagactgctgcctaagccgaaatgccagcttctttacttgcagagggagctcttatttcagcagccagtagcctcatgcctactctcaaagcatcctcttaagtggtgcatttaaactgcagtgagagcttgtgaccaatacatttccctcccacagcctccatttctctgataatcacaatattacctttatcagatatgttttttctctattccaggcatcgctggaaaatccacattccagcaatgragttccaaattatttgttcattgtgtccatattttctagactaaacacaaaccaagcacttatttttttttcttttcttctgatggaggtcagtgaaattagctaggatataatttttgttattgttttttcctaaaaccgtttcctggccatcttacttggaatttaggtatctgccaaactcttcagtcacctcagtcaggtggcatagagtatttacttctacaggcatctgatctcatttattgaaggactattcttgttaattttatcctaaatagaatctaagatttgggatcagctttataataatctcccataacctaccagatagtgaccactcgcgcatgaaaagagtaagaagagggaagtatgatgaataaagaaagttgaagagaaaattctaatgttcaagaacataaggaatattatgcatggattaaggaaggtaactaagagagcaggtataagcaaatgaaaaactgagatcacatgttctagggaaatgttatatggtatagaaaagtggtagaaaaaaatgttgacaaaagctaagaagttcatcagttcatccactcatctgtattactgagtatatactatgtgccaggtactgctttgggtcctaaaaatacaaaaataaaccagacaacttcacccctggccacctggaactgatacttaatagaaagttgaatgatataacaaccaacaaatgtttctataactgtaagtcataagtgcaaagaaagaaagaagaatgtgctgtcatagagaatgatggggtcagatggggccttctgtagtttaggtgatcgaagaaagtctctctgagaggcagacttataacatgacactgaggggcaaaacgaatagaggatgagcatttccagcagagggaacagcatgggagaaaaccccgaggtgatgaagtgtggggtgtgttctaagccaggatgaaaggtggggaagtggggcaggaaatgagactggagaggtagggagagcctgggggccctgttaaagttgtgttttctctcgttttaagtaggggaataaaatcacacaatttacagcttaaagccggcggtcaggttaggaagtgatacaggagtttaggtgatagtgtcttaaattagggtcatgggaatagaaataaaaagaaggggtggttaaaataaaaaatgtaatcataagtctttgagtattagatctttagaaaacatctggtctagtagtttttgatatttatacagtaaaactgattttccacatgaagaatccgtagctaacacagatggaagcagagttaggctgattgataggttagcactcctattgtttagctttcctcctctgcccaccatgctgtggtcttccacacatctctccttggaagtctgggccctgaagaaccagtgatcacttaaccccacaagtttacagatgaggtcatacaggggttggtatccccaacacattagagaaagggtaagcatttgaaagtcaatatgattgtcagcatgataatgaggaaaaaagtaagtcagtggccaaccaagaatgaactcattggaggtaacactctttcagtcaggcgtaatttgctgactttcactgtaagtgaacgaaagctaaatctcagcaggagggaagtattatttacagattactagaagggaagaatatttcttttgcccactttaatttatcaatgtatcaggtagccattgtcacaagaatgctgtgtaagaaataacctcaagctcttaatggttttcaaacataagcatttgtttatcccatgcatgtggattagctgggatgtttcatatagtttgggctcagctgggtagctttgcttctagttccaggtctggccaggtttagctcctgcctgtgcttggagtcatttctaatccgtgtgtctctcctactcttctgacggtcatggctgcagaacactggggcaagcagaaaccacagtgctatgtaagatgttggtgtacagctggcaaacccttatgcctgcatcttattagtccaagcaaattttattttttaaattaatttattttgagacagagtctcactctgtcgcccaggctggagtgcagtgacgcaatctcagctcactgcaacctccacctcccaggtttaagcaattcccctgcctcagcctcctgagtagctgggattacagggacgtaccaccacacccaactaatttctgtatatttagtagagacgggatttcaccatgttggccaggctggtctcaaactcctgacctcgggtgatccacctgcctcggcctcccaaagtgctgggattacagatgtcagccactgtgcccgggcaaaagcaagttttaggctgtatccaaaagggtggggaaatacatgtgaccctttctgagagaaatttcaaagttatatggtgaggagcatgggcacagggagaagtaaataattggagtaaaaaattcacttgactacaacagagttctcagatccacagcaatttctttctcctttttttgttttaatctccctttggaaaattctatttttgtttagtgtttatagggcttagtcatctttttggtatgtctatcttgttatcttgtattctttctatagaattatcaatatgggaattcccagatttgagatgaaatgcatgagtctagttaatgtttggaattagaatctgagtgtgttttgagtgcagcacatctgaattcctcaygagaggggaatgacaattctgcttacagatgtcagataaaaagaggctattgtatctcctaattcagtatatcccaataagaggccacataaacaggacaagagttgttaaatgcaaagggaatgtatcagtaatataatttacaatttgtctgtggattctacctgtccttgattttatttacctatgatagttctgcctttctttgttggggatgttcccattggagaactcataaatgctatagacataactcagtttcctcagaatgtctcaatatggtaagtctgccaaaacaagaaacacaagctacagttaaaggtgacttttgctacactgttttctggttaactagtggagacacattttgaatttgctagacatagttctatagatttacacatacatatccacatcttcacgtttacagtaacaatccttattaggattgttattagcattattagcattaccagcttattaccattccaaattattctacttatttatatttcctgccttatttatgaacttcttgcaaccagtactgaattttctgtatgtcacactaatttgcctgaagcactttcttagtcattaccagaaacttgtctcttaaaaacagcagtaaatcatgtgatatttatagagccttctttagagttgtataaatccacatagcattccttcagatgagagcttattgattaatacattaaagatactggtcaactcgtgtttaatatactttggacaaggataggaaattatttacctcttaaaaatcccttttggctacttaaagaaaataattatttcagccatttagtacattgtttcaatctttgtaatcattaccattattaaaatacaataagtagtatcatctaaactatttcctttattatatctrttgcaaatactccctttcatatgagtctctatcatcttcaaactataataaagagttaggaaagaaatgtaatttgtgtttacagatgatctggttaaaacatgcaaactagttaagcccatgaattatctctaagtrtgagttttagttatgctaatgctattgttctttatttagtatattattcattaaagtactccctcatctgaactttaaagcctattatacagttaaaagtgaagagagacaaagaaaaatgaactatcaatgggtgtataagtgagaacaggtattatgtgactctttgccagactctaacattctggtgttctaagaggcctcagtgagggaagtggttgttagtttgaggtcaccattagcttaatgatagaagtgtcagcatgataggcacaatgtactaatttgctcttaattaatataacctgtattgagtgctaaaacctcaaacattccctcccctgcccccgacaactaacctaactaaacttactgtgtctggtacactatttaagctctggggagaaaactggataggaccagtccctcgtggagcttatgcttggccagggaaacaggcatgaacaatgaacatggaaaagtaggttgagtgtttccttggagaatcaggggctacagctcaaggctctgggtgcacataccagggagacctcacttagtgtgtaggctgaggaaaggtttctctgagaagtgaaatgtatgcttcactttcagtgtgtaactaagtacaaaaacagtatcaatgttgaatctgtgagtggttttccacctactgtgatgtgctactgtaaatatacctctttaattacttcaggtatctttgatgacctatttaaatttgtgtacatcattgtacataggataaaatgttttcacgtttttatgataaaatttgaacaaatagctttttaatagatgtaatgatccagtgattcatcaacaatgccaatgattcttcaatgaaattatataatgtaaaaaaatgcaatcagatacatgaacaatgtgagtgcctggcaccctggaggagcagagaaagcactccagtggagaaacagggagggggcaggctcacagtgaccccgaagagggatccagaggccagaggaataagttctaaaatagagctaataatcacattaaatacaaatcaaaaaaaattcaaagatatctatgctggggtccctgagattcctactgtctgaggagtgaaggtaggacttgcgagtggagcttggatagaaaccaccggtttagcagatgttctcatggattgattttaggggtaatttctatctctgttgaagacttttgtaaaacttacagtgtcctaaattttaaactgtgaaattgatagaaatttgtatttgttaattacagaaatttaaaaagcacattaaagtttacatcacagcatttctgcgacaggagatgggccattatgtaaatttcaccttatttgtgactttagtgggaagatcttgcataagttatcacattccaaaggttggccaatttccaccaagccattcactatttgcatcttcttgcaatcacaccggtctttggcctttgagccagagtggagcatgctgtccttgcatgtactgtggaggtgccaagttagcattggtgctgagtgccaaacttcaaaggatgtcattggaatagagtttgatgtgtagctctgcagtttctcaccataacctttttcagatacttcctgtgaatgtgcattgcagtcatttgattctagttgcacttctgggaagtgtttcagtggtgagtgtgtctgtgctgtgaaggggaagcagtcttctatacatgcaaaaggattcgaaattgaattgcttctgcctgctggtcccctgatctgtgtttttcagaaagcagctccaggttcttcaatatactttatccatagtattttaatactcacatttggaacttgcagcagtttttaactagtgggtgttggatgcagagacagtagtcaccaccatgcattagtgtagtttgaatcaaattattagaatattgatgtttggattttaaggtgaatttgtataaagttgaatgtactcctctattttattatcggacacattatatttctgaatgttttgcaagatgttttgtaagtaatgatctaaaacacttctctgggtttgagacagtataccttcataagctcccagagggcaaaaatgtcataatttgaagtctaaccagcaccctgtatgccaactaggaacttaagaacattttctggatgatgattacaatggaaaactattagataatcaaaaacttgatttatgatccatttattcagtatgcattttttattaatggactggctacctgcagaagctctctgataacaatttattttacttatttagttagttttcaatttgaagcctatacattaaatggagtaactgccttgtattttccatgcattacaactctgccttttctatgctacacaagactttgccttcccctgttacttttagcttttttcttctctttaggtagaaaattagatcatgtttctgaaatcacatgtcctcaaagtgcagttaaatttctataatggataacagcagtggggaaagctgtcacaaatctcactggggaaaaagaaaaattaagaggaaccaaagtttcagcatatatctctccataaagtttaagtatgttggtgctcataaggaattctgtgtaaaaccaatgtgaaaatgaaaggtgagataagttatttcttccaggtagaaaggcctttcagatgacaacaggaaaagtgtgtaaagttttcatgttgtgcgtagtgcataatctatcttctagaaagagcatactccttwagggaccaggttaagctgcaaaaagaggaaagagatgaaaggaagtttctagagtctgtcaacaaaatgagagaaagttggcaggaaagtgaattttcaaatagactagctagggtacttcccaaagtcctcaattatttttttaccrttattaaatccttaacccatggcagggtactgagtgaaatcaatcagtgtattctcaggtgacttgccattgagtgcctggagtcttctctggaagtccctataacaataaggtgggrtagtagacattgttactgttctgtgagaaatgaatagcacagtgattttccttcctaggagagcagggaggaaacaaaggaggcgtgaattgcatccccaggaatgtctttccatcaggcaccagagaagcatcaggagccaagttactgtcgctgatacaactcagggatctccatcaactatgcttatctgtggcatgaggaagaaatattttgtgagacctgggctttcatactctgggaattcttatttctgttagttgggacttggaaagctgccaagagctcagttgttcttttgcaacatatcctcatcaacgtagaccctagtgggcttcccgataagtgaatgtgtctaacagacaagaaactcttattgcaaatcagccctaagttatcaatgaattcctggggtgcagagtaagttttcactactaggaagtgatatttatgctcaagaattttcctgggggaatatttaaytggactcatacattctttgggattttttccagtatctctatgcagaatgatccttgagattagaggtatgttttaaataatccgagtggaccattgaatgttaacctgaatatagaaatcaaaagaaaaataaaaagccacaggaagagtaaaaggctaaatgatggtataccgtttttgctattgtgtcagaagatgtatcagaaattttcatcagttcttgattgcgttcctggtatattagctgcagccaaccttcactgagtgcacaaaaaagtctttctggatcaactttaagtactgactttacgataagcatttagggaataaattaatcaaatttaattagacatgtaaactgattagagaagtaaaaacaaatatcttacaatagctaaatacaaaagttttaaaattatctaccagtttggacttcagtatcatggcgttaacttggagaatcaagaagtgacattatctttgcctccaagtggcttcagctaggagtgagttgcttggctttatggttgggtttattcatggttggacagggagtcattttaatcctttctcaaagaggagtggctttgctttccttcagcattaccaagaagggacttcttggtgcatgaagagataaattgggctgaatttcatggaattttttttttaatgatcagtctttaagatgtcaagaagtattctgattaagaagacttagataaaatatttatctttactaagccagatggagcaagccacctttttatttaaaatgattgtagtttaattttgactaagcatacaatgttatgataatattaaaaagatgttggtggagataaagaaatggtagtaaaggggttaaagaaaaaccttcagataccttactataatcaataggaaatgtatcatatcccatttttcatatcatccccaaaccttcaggatttgggggcactgagctaggtatgtgggccttattgcttctctcctcagctggagcgaatcttatttgtcctgtatgtatcagctttaatgaaaccayatcttcatgttgtcatatctttatctgggtatggcattaacagtcagcatgtctcagtgttcctcctttgagtaagatgttctaataccacataggaaggggggcccgagggaccttgaaatgcttccctaatttgccctttatctgaacattgtgtaagtcagaatgggctgtgtgcctcttggagtgggttgccaattagtctaatctgcttacaacccttgtgtctgtttgaaatgttcctaagagctctaaatcctgggttatttcaagaagccgtaagcatttcaaacagttaagcaaaaaccaaattttaatcaaattaaaaatgaaaaaaattaatagcaggacattttgggcatttgaggcgtggatgtggtcaaataaaagtaccaagaagatgctgcagccacaaaaactaaagaagcactaccctccgtagacttaaagaatatctgcaacagagactaattctgctttctctttgttgctgggccttcaagttcatgtgtgaccttaaataactgacctcagcttctagtgccttgttttcttgttctaatgggattagtcttttcatccttttaatttaatggaaaaatgcaattcactgtgctgcatttaactatattttgtgaataggttttaatggcataattgctgtggagcattcaaatttgagaggagggaatgtaagtaaataaacatctgcttaatacttgtctatatatggtatatatatgaatactttatatacaccatttgtttcttctctgggacaattcagtaaaccatattactatgtccattttacagataagaaaatagagatttgcttaatgttgctataccaaccaatgttagtgttgcaattcaaacccagctctgggtgtatctttaatctgtcctcttttctctatttactattatctcctaaagttgagccaaaaagggaagttgaaccaactattgagtttttttttttaccttacttacattagtctctaatttaaagactgctggatatattttaaatgttttatttgaagatcagttgacatttatttaaataatatttacattttaagaatttaaagttagattcagcctattttgggattacctgttttgggattacctattttgggattacgtgggtttttttgttgttgttgtttttgtttttttaacaaagtctgtaattgtgtttctattaaaaaaaaaagcagcagcagccatcagaaaatgtattgttaggccattttaatattctcaagagtatataagtgtaaatgcaccaaaacatgtggactacatttcccgctagttgtactgttttcacacattaacagaaatgctgtttggaaggggaataaaggagatatgtttgggatatatatgcagatttcaatcatcaaaagacccaagatattaagctgcctcctggaatcacccagaatttttgtctttccagtgatctctgtggccatggtgctgtgtgggcaaatttcctcttgctgacctggggctggttttatttcaaagttacagcctgattcctcagagcagcattaattaaactgcaaacaatgttgtgttggtataatagagttaagatgatttttcttccccaagcatgtggttgatactatggccagaaaagtttaaaagtaaattagtgacaaatactgcgtgattccatataaggtacttagagtagtcaaggtcatagacacagaaagtagaatagtgattgtcaggggctggagggagaggggtatggcvagttagtgtttacagaatacagagtttcactttgggaagatgacaaagttctggagatggatggcataatagttgcacaacaatgtgaatgtacttagtgccactaaagtgtacgcttaaaaatggtcaaaatggtaaatttcatgctatatacattttcagctacaacaaaaatatgattcataaaaatattaattaacttctatgatgttttcatgtgtacatgtagaatgcatgtgtggtgtgcatacaaaataggctagaatggagagcatgtaggcttagtcaccgagacctgagctcaaagcctggttttgcaatttatgtttggagatcattgacaggctgtctcacgtatttcagtggcagctttcttatctgtgacaggaagaccaaatactcactgcaacttataataattaaataataataaatgtccagtgctcagcacatagaaggattaagtggaaacacagtatagatagttaataaactcgtagcttcatctacagtaacaagtagtcttggggaaaaataaaactagccacatcattaatttttcaaccattaaaccttgaaacaatcacgcatgtttctctaagaaataacataaaacaaatcatcctttcgtttaacaaatgtttatccagtgtttactctgtgccaagtcctggctgacaagaagcactgtgtaatggggcatgtgacagtgaccagtcaaataagacacagtgaggactgggagatcctgaggctgccactgccagatggacgtgaggctaaactggcccctttgtttgttttccaagtaggagctcttggataaatattttgtgtataaagtcaatggagaccacgcagtgtgaaagcctcctccaaaatcattattttcagacagttcatgcaggtgaaaataatgcagaggtcatagataacactgtaacagcttarttatgggaaattagagaggggcccatgatagagcacagcatttcctaaatgttccttgcctagaggaccctagttttctgaaatagtaatagttgtcccaccacaaaatgacccttttgtcaaacaactttgggaaacctgcattaggcaaaggtcagtgaattttctttactttgacatttctcagaagcattgatagtctgaaatgtgtttgcctaagagggagatatcgaagaccatctttcctgcagttatttgacagcagagccctttttccctcagagcgcttattaacatcctgtggaaaagtgatttttgggtcaccccactaggaacatgtgtcccttggagccacatgagacaagttgtaatggtcatttactggagaaattggctggattgtgctaacaaagggagaggaaaccaartaagaaaactgaccgtcctccgagggtcaggattttcttttgtttytttagctcaagggtccaatgttcccggggagcgtcaaagtgggttctttctgctatgacagcggaatacccatgaacactgggcgggagagggttggccaggagcacgccccggggaacctgtgtggtaagagacctccagtggggggcggtgatttcactcctagtgggctcagcccccaccagaagagcttcatttgacaaggaaaggcattaataatggaaatggattgaaggtaacactgacgtgcagatcaggaatagctcacacggtgatgctcttgcactagaagcagaaactatcctgggatctaaagaaatcacttaagaagaaaacatttcctcttcattgagcctcagtaaagctgcatgaggagaattctgcacaattgttcgtactctagcttagaaaatggagttgattaagtggaaggaaactttaaaaatgtgacaaagatgatgaggtgattaaggggtaggttttaagtagcaagatgtggggaatttaagatgtatgactagtagcggtgacagtgaggtttatgatagctgcctataaatacccaattaattgcctaatgtggcaaatgagaagaaacaggcttttaccaccaaaagggaaacttgaagtatattagggaaacagtatttaacagtaggggtgatttggctgccatgatacggagaaatcagttgtgttatttggataaagacttggaaaggtacttttcttcctgataacatcctggtgtcaacagattatttttctttaaaaaggatgcatacattttcatatttcttaggagcagagattgaaaaatagagaaaactatttaatttgctataattcaggttgcctgaagcctccaaacatgttttcccccaagctgaattatagtaatatctttgacggtaagaagcataaaacaactctctttttttttttttgagacggaatctcactctgttgcccaggctggagtgcagtgcactggcatgatctcagctcactgcaacctatccctcccaggttcaagttattctcctgcctcagcctcctgagtagctgggattacaggtgcccaccgtcatgcccagctaatttttgtatttttttttagtagagatggggtttcaccatgttggcgaggctggtcatgaactcctgacctcaggtgatcctcccacctctgcctcccaaagtgctgggattacaggcatgagccacccctcccagccagcataaaaaattttatgcattgtattatactgtatgtggagctacacctgatagtgtaagccacaataaggctagttgtagggcacacctgataacactcgctaacacttagtgagcctgaatatgaattaggtgctttatacaggagtatttaatcagcacatggactctcggggtgtggcattagaatcctcatttcacaggtgagcaaactgagcctcagataaattaaatagcccgaggaaggtcacataactagaaagtcacagagtcagaatttgcattcacttctgagttactcagaaatccatgcccttttattgcgatgctctactgcctcctgaaggcattttttgattatcacttttataaactttaggcttagtttatatgaagcactcctgagagtgaaatggttcgctcatgtttgagagtgggtggtcaccaggggtgttactcaggcttgacacagataatcctgtggcatggcttcagcaagcagcttgcccaaggttgcacagagaatgagattggccaggctagaaggaagggcggttggctccagctcaccgggcattcatatggtatatggaggagaactgccagatctcagaaacagcatccagatttgattataacttctctttgtggtctttgaagctttgtgttatttcttcccttcactcgtggagttaggatctattttcacataaacagaaacgattcctcctttctgagcacttcattgttggtggcattgtggaatgtcccaggaaggggggaatggggccaattagaaaggagaaattcttcttcggcttgcgtgtttatatgaaaatgccaaagccaccagctgttgcaacagcaggcctagggtaaagctcttccccaactgtcctgcagcatatatacagcagagggaggtcttttcaataggctcaattagaaagtggaaaacagaaagcacccccaccaaaaaaaagtgtggtcctgtgttcttgagttgcacagcaaactttggaaataagcacttaagtatactttttatttctgcaagaagttcccaaatatgagcatggaaatgacaactcaaattccaaccattccctgttaaatgccttacctcagctcaccactgaggagtttgttccttgagtagagagaatgtagattgaaaaaaattaatttcacatttctatttatgggacatttgagacaaacagcccatcagtgttactgttacctcattcaccttttttagccatcaggactgactgcttatgtcttttacattcatgggacacatttcaaatatgaggaattcagttccatagcaggatttaagcagagatgatatatatcatcttatttggctatctttataaggctttcttcttttcttcaaaaaaaatataaatggtatattagtactgatggaaaaaacagacctgacaggaaggttaaaaaaaaataagtgacttaaacaattattctggaatcaattcaagagagtagggtggagtagagtctgaaaccaaacaatataatcccaaagattatatttgttaaatgaagcttaattggggctgttttactgcattgaactggctaaggagttttccctgtcaaccttcctgatagaggtagttccaatcctatttcatccctctgctaccttstgtacaaggtgagctgtcaatttcttggagaggagtaagatcacagctgggactcacacacagttcttccaagcatgccacaggttggggctkcagtgttctttctgtggtgtggaggctcctctttctctagtattccaatcctagaggttctttgtgcttatggtatctcaagttataatcagaatggtatagtggggtttcataatctcctttgccagcttatagcagtagagtccctacattctcagaatgtgtaagtgacagcttatttcatatttggcattttagattcaatgagatttaacaatagtttttattagttaatttctcttcatttgtagtgaattacagataattttctttctgatccttttttctaaatctttagttgtgaaattttccagtaagacaaatacaaacaactgtcatgtaaatacatttggtcttaaatcagattagaactgtggactctccaaaccagaggttctcattccagttgaaataccaaggtattttctatggaattggattctcttcatttcaaaaaaagtaaactaaataaacaaaaaaaatggcttgaaaatgcttcttggtctctttacattcaaactccttcctggaatctgaagagcctgatacaaatgctttcagggacatgccattaaagaaaaaaaaaaaccctaaaaactgtgtttttctcctgaaataaaaaataaaaaataaaaaataacgaactattataaagtcatctactttaacgatttgggtattcatggagctgaaagaaaaatgagctatttagaaaaagaggtttctaaaccaatataaattgccaattatgttcttctttatcttttaagtttcctttgtccttatgtaaagggtttaggaggtaataataaagaccaagggaaggcccatacagggggaagaaactggaattcatgagttaaaaagaagtagaggagatactcatatttgagcagtttctgaagtagtctaaatctttcacccagtcaaccagggcgccttctctcagatgcagggaaaccctctgaccacaaggccccttcctgttcttttcttgaatatcaagcatcaccctctaagttttcagccatgtattttctttggactactcttttttacctttattaaatgcttcacatatatgaaaggaaatgtcaacattcaacctttcgtgtgaggtgggaaaaggcaaaagtttatttcggtgctctcctatttaaagacaacagaactctgttgtaatataattttttatacttgaattccaayataatatagttgaaaccatgaagccctcaaaagtgtagaaaaagtgatacatatcatctatatacaaatcctgttgtcagtcctggtataactaaattcaaccttaaatctttagttatttatctatttagagacagggtctcacactgttgtcccagctggagtgcagtggcgtgatctctgctcgctggaacctctgcctcccgggttcaagcaattctcccacctcagcctcctgagtagctgggattacagacacatgccaccacacccagctaattttgtatttttagtagagatgaggtttcaccatgttgaccasgctggtctcgaactcctgacctcaggtgatccacctgcctcggcctcccaaagtgctgggaaaatctttatttaatatatggatattcctgtcattttttctttgttcctgcaaatctaaattcctgcaaatcctgtcaatttagtatttttcctaatagaaattgtaaacttcaatatgttactaagaattaagctttgaagcaaataattttttcctgccatattctcttagggtatgtatagagaactgctggagtatttgaaaattaaccagtagtcagttgtagattttagcaaatacacatatttttcatataagcaatccaatcctatcctcctggcctatatatgcagtttgaggtggatatgtgttcacgtgacatattttgaaattccaagtcaaatactttaagtgttatacaaatgtaagttactggtattattactgtgtatgtgacatttaatttgcactatggggaatttaacaatattggatgaaagcgatagcctggatatagtagtaaaggcatgaaaactggtgcccacacttaaggaggccttatattgatgatgatgattacataacagcaatatctccacatctaacctaagaaatgtttagatatgtactgtctggattatttacttattacatgcttttgaaaatgttccagtgacttaagacttttgaatctatcttttgcaaaggaagagaaaagtctacttaaaccacaacactaaaaacaagttggcttacaggaattgaccccctgcattaaagaaaaacaaaaaacataggtggcgtcttcatagaatttttctcaaaagggtgtaatattaattcctgtaacttaaaaaagccatctgtatagagttttgtacccaaaatatatgcccatagaatgtaaatcacatgatataaaagaaaactatatggtattcctaagccctaacattcccaaacctatctgaatggggcatttttcaaaatgctattggtccaaagggtctctcatgggacccagatctgatatgaaaccacagaggagagtgacagggttagttgcctaattaggatggagcagcccatggatgtgagaacttggaactgggcaggccaactggtgtgggtcagagtggtggcagaggatggcctacctctgggcaatggaaagaatgctgacccatcaggtggggcacagtaactggtaaatatggtgtcagaagatttagcaagagatgaaaaggtgccctgataggcagtggacaaaacacacagagatcgtaggttcaagaaacatcacagaatcctagcaaataggtaagacagaggcttcaggtaaatccttctggatagcagggcctcagccacaaggccagtattcaaaagcagaattcaattcctgacatttaagaaagaaaaagccaagaacgagrtggartcattgattttcccatatcctggaaggacacagttaccagaatagttttaagggtggaactgagaccaagggaagaaggcagacttttcaaaacttgaacaaaaggtaggaattcatttcaggacacatttgagcaccatgactgcgtctgaagacatagtgaggactggccatgggtcatctgagcttggaccaagaatgccccatactccctcagggtcccaggctctgtagaaattggggaggagaattaaagggcagaaaaccaagcagcatattatccagataaggttttcagctcagtcttgggcttcttctcctccattcagcaggtaagattccatagtcaggggcctcagsstgcttcactacctatttcttagaactctgcacagctttagtggaagaggcagtggctgctcaaggagggttcacagcagcaatctgcaggaagcctcggctgcttcctgtgtccctggaaaagttcttgggagtttcctagagtcctcaatggcaccatggactcttgttctccataaaggatataagaatgatgtttcaactcgccttggccacttcgtgggaggcaccttttgaccaggaggcaaggtcacccaggaatctgttcagtgtgtttaatgccaacaacccctaaatgttttaaacagcaccgagacccactctatctttctatgaccatttctaggtagaattatgttcaacatgaccaatagcaaacgttgcttcataaaagaatacttgctgtgaagatcaggctggatgcttaaaaactgagccctataggccgttcattttctttcaaataatgttgtgtttgccatattgcaatccaaatgttttcgtatcatggttgatgcttggtgtcacatttataaaacacttaatttgtttatgccattcctttttcttgtaaatacctaaccagacctccaaacaccagtaccctgtattggaaggcaggtgcacacagaagtttgatggggaggcacatgtgagtgccacgttgttctttagggagagtgcagcctgcagggcgaggcagcttgaaatcgtgtcctgtgctgagtgtgtctattaggagaagtcttgactacagtggtgaatgtagagagggatattccttgagagggcagaactagggctaataattagatgttagagggaaaggattcaagctcaaggcatagacaagctttcttacatggggagcagtaaaaaaaaacaagggggagagtattgaccttcctggcaaggaatcgaacatagcagtaatagtagagttaaaagaagagagtggatgagcacttagcaggaattttatatttaagtgtagagtagggaattgacttaagtggcttttaaggtcagtgactgagttagaagcaaaattcaaatttctcatttcctaatccgggatttttacctgattccttgaggtggtggctgaacaatgccctctaaatatgtcatgtcttaatccctggaacttgtgaatgctatcatatatgacaaaaggaactttgcagatgcgattaattcaaggatgttaacttaattatccaggagggcctcgtgtaatcaccatcattttataagagggacacaggagtagtcagaatcagaggagaatatgatgtgataatggaagcagagagcagrgtgataagctttgaagatggagaaaggggccacaggccaagaaatgcaggccatcactagaaactgaaaaaggcaaggaaatggattgtgccctagatcttccaaaaggactgtagttctgtcagggctttagctttagcctaatgaaacgcatttcaaacttctgacctccagagctctacagaaacaaatgcacgttgttttaagccaccaactttgtgacgatttgtaacaatggccacaggaaatgaatacacctgcctttctctaaactctatcttaaattttatttgatccctaaacaaggtagccaaggccccaaatgtacacaccaatgcaggaagcatagctgtctgacttctttccctcaacacttagttgttgattcttggattgagcctgtatattaactcactcatttcttataacattatttctcctttatttaaatatgcatttgatttttatgcatttctaattaaatcgaattttctttgcatgacctgctagccccttcatgattaagcttgatacttttccatctacttcctccctgaacccctgtcatgctgaacttgtcaagtttcttgaaaacaccatgctgttttgtctctgttattttgcatgtattgtttcctctgtggtgagtggcttttatattatgttttgcctagataacttctattctgctgcatcaggattatctttagctataacagaaacccccaaatagcacagattaaagagaggttaatcctctctcccatgatagtctggaggcgggcagttcagcgctggtatgacatctctgccctgggatgtcttcaggaaatcaggctccttttagctcattgctccaccttccctggaaggtggtccttgtctttgcagtacaagatggcatttcgagcttgggtcatcatatctatgttccagacagagggttagaggaaagcacaaagaggaaaaaggaacaaagagcataccccaactatttcgggagaaggttcctggaagctgtcaaattatacctatactcacatatattaacaagtacttagtcacctgcacaggggctgggaaatgtagtttttatcctggtgatgaagagtggcatcttccctactggaaaacagatgccctatttctatggaagaagagaagggatattaatggacaacaaaccatatctgtcacatcatcatttaactcagtttatataattcctgctctaggaagactttttcctaatccccaatgcactggtgtccctcctgtatgctccccacatcctgtgaataccttcactcactgtgtcaaatgcctttataaccttggagacaaattgctcactggactatgagcaatttgaggcaggagctctgtgatcactttatggcctagcacagtagctattaaaatgtatttatagtgaatgaatgaactaattaaccctgaaaaatttccagatgccaatgtctctaaaattttgaaatatgagcagataatttaatttcatgtatacaatattttatgcttttaaaagttttctagaaattcccaggaagttaagattgtatatccaaaagtataacaaatgtagctgtgtgtgtatgttttgtttcaaaagttataattctacacatagcaaaacatacttagatttcccccccaacactcacccacatctttctctataaatacagtttagaaaggtgtagtttaatctattaaaatgcagcagattgtgtgtggatcacaatctgtatcgatgtaaccaaattatatcagtaactataacactatagttatcaagtagactgatagtcaaattgaattataaagtctatcaagtaacacaatatacaatttattttctagcattttttttctaatgtgcccctttcctgtaatgtatcttaacaatgccatgaggttgtcagtgctggaaaggtaaatactgtggttcagagcaatccaggatcgtatagcactaagttcaagtgactgattttatccttgtaagattaattcaagattcgatgggggaataaaagtgtaattattattcatattatttttcaatatgtaggtcttccatttttcttacggatactattttgattgttaacagatatttatcatctactgaagaagtgaaataaatgagacttgaaaggaaatataattttaaaagacattctggctcttaaaaacatgtaatctaataggaaagagagattatattggaaattgtaatgtattacagtagctattcactgagactaactgaatgaatgagcacataaattggggaagttatttcttcagggtattcgatggaatacttttgtgaattactcctttatattttcccactgtcctctacctcaagaattgttagaggatagttaattagcatagtatttttcatcttgctccttaaaactagggtgaccatatgttccatttgcctagaactgtcttggtgtatgcctgttgtccaagcataattattaatagtgccccctcaagctccctgaaggagtaagccagcttgcagcctgctcctccatcctcagcaggatgaactttcccttcctcctcccttcttcttcactttccacaccaaaagtctgtaggagtaggggagagagtaacattctcattgaaagctcagtttctggctttggttcccatattcctgttaccacctgctgaatatcagcccatacgtaagtcttgcagattgtttcaagttcctgtggttacagataaaagcctttattctttggaggagaacatgcttctggttaaaaaaaaataaaaagacagagttccatgtttgagctcacaagcaattctttaaataactatgagattttccagcattcatcgtgatagacgctagatctccagagcatatccttatgtgycaattcttttgaaatatctatctatctatctatctatctatctatctatctatctatctatctatctatctatctggtgttatctatctgctatctatctatctatctatctatctatctatctatctatctatctatctatctatctctatcatttacttttgagacagggtctcactctgttgcccaggctggagtgcagcagtgcaatcatggctcactgcagccgcaacctccctgggctcaagggatcctcccacctcagcccccttagtatctgggactacaggtgtacaccaccacaaccagctgattttttcagtagaggcagagtttcaccatgtagcccaggctggtctcgaactcctgggctcaagcaatctgcccgccacggcctcccacagkgctgagattacaggtgtaagccactgcaccagcttgaaatattttgtattccatgaaattctttataaaattactttataaaacaacttcctcactttcttaactaatgtagattgaataaaatgaaaacttttgtttttataatcattatgaatattaattttttatagtaagtgattccttatggactacaggggcacatggaatcatttgacctttttattaataatttttgaattagtatctttctttttttgagatggagttttgctcttgtcacccaggctggagtgcaatggtgtgatctcggctcactgcaacttccacctcctgggttcaagcgattctcctgcctcagcctcccaagtagctgggattacaggcacctgccaccacgcccacgtaatttttgtatgtttagtagagaaggggtttcaccatgttggccaggctggtctcaaactccttaccttaggtgaccagcccaccttggcctcccaaaatgctgtgattacaggcgtgagccactgtgcccggccgtatctttttatatcatattattttgagtgtattgcctctattagtctgtctttctcacatacgatttgtttcctctaatctgctctaggctcaaaaacaacatcagcatagtgatgggaattgtgaataaaatcaatgtacatttgcttcaaatgatgagcagctctccgatgggaaaatctatgtgatttgatgacatcactttgcctgcagagatactttttttgcttgctttttgtctgagttccaagtagttgagtttgtagaatagttgacctctagataagtaaagtgtttttgtcattccgtttgaaaattagtgtggaaaattaaggtgtgcacccccatggagaaagttgaggtcaagcaattcattcccgaagctgtgcagtcataaagattcacatgccgagctcagaactagtattaaccaatcaaattgctcccagaggggtgctcacttcctaggttaactcttaaaacactccacatagccattttaggcttctaaatacttgttgaatggacagagaaacaggaaatcagagtggaaatggatgctataaatctattttctacagaaatgtgttatgagggcaaatacactacatcaaattttagaatctcacaatacttccgaattcaacccaaagctttcctttgttacatttttttctttccctaatttaagattcaccaagattgtgtaaagcttatgattatttccaagttttggaaatcagccttctttcccttttagaagagattgaatagccatccctctgaaagtcacagggaagataggaaattctattaaatagatttaatgtatctcatgaaagcccagaagttattcttgccaaaagaatgccttcagaagcagcaggcaaaatgaaaactgaaatatttgctgtaatttacataaatgctctcttttatgtaattactgcaaataagtataatgagataaatgtgtctgttgctttctctttagaatagatgttattaattaatcttgaaaagttcccagtgtcccatgaaattgatctataatgttctcattactcattgtggagatgggagattgctgattgtgttaatttttgctacattttgatttttagatgctcaagtagaatctgtaggccaaaaacactgtcttgccgaaatgcagttataatttcctaacagagttatttctgttgttgatacttgtctacagattataaagccttgcaaagacttacagattttgattatatgttggctttttccataagtttcatattttcaatttaccccaaatactgtaactgtgaaatataacgactaaggcattttggcaaataaaaaaaaaaaaaaacccacaaatttggtgtgaacatcaagaaataatgggtcttgagttttcatggccatgtgtactgtcccattagtaacatttagttggtaataaaaagataaaaaagttaaataaaattattcacatctttttaattgtgaaacaacagtgaccaaaaaaacctctaaatgagactgcaattcttgttattggaaaatatatgtatttcacagtagcaatctatacttatttttggaactgcttaccatgctatggaatttcaactgtggtgttattggggtttctacacagaagagatgccacataacaaatgcaaaagcttttatttgagagtcattcagagttgcttgaacatctctgaaggttttgaaagataaatgtgctttaccatctgtaaacactaatgtggcttacatcagaaggaggtggcctgaagggcccatgcacactaatgagctgtgcccaaaatgagtgtgatatcctttttccaattacgtaccctgacttacaagtaaatatattttccttctgctctcaaccactagcttatacatacacaaggtctttggcaggacatagagtcccagtttctctactggaaaggcaaatacctacaagcattctcagttaacartgctaagaggtatatctgcaaactaataattaatatgcattgagtgctaactctgtcagataagatgcctaacatacactgttttagaaacattatttcatcttggcaggttgatactattttctgtgttttacagattagaaaattaaggttcaggtcaattaaagatgtggagctttgcttctccatgggagaaaatttggcctagttttagatggacataccttatgccttttagagcacaaacccaagatactaaactgtctctggatttaagtgtaaggtgagtggattatttctgcatcttatctccttccgtggaagtatatgtaagtcaatataggtgcaatctttgaaattcctattaagcagcagcaacataaaatcacgtcagcctagggtgtgagaaggaggagctccatataggttttgaacacagataaggctttcagaatggttctgcctctggaattgttactttagttcttttcctttttccaaagtttgtgttctaaagaatctattctgttaagacatattatctttcaatgtcagatgacctcctggccactcacctgagcccttccccattgtgcctgccacttttatacaccttggccaagttcctgctgagccatattgcagtttgcagtgaggtgcccagcggttgtccccatcctgccgctgtgaaagtcagccagggaatccacgtgtctgagaactaaaacaagtcaactccaaatcagctcttctatttctaaacccagaatctgctgttgattcacactggggcctttgaattagttttctctttcccacgctgcctcagtttctcaactatcaaaataggaaaaagaacacaaaagcacgtgtgttcagaagggagactccagccttatttagactgaaagactttttgagttttgtggggttttgttggtgtctttttttgtttgtattttaggacataaacccaaactgattacatcactatttgtattcattttaatggttgtttctctttgattgacatcaaatggtccttttgcatcatgagaaaaactctacttcttggatttgagttttcatattcttctggaagttccatagttattaattagttgctcttactttttctgaacctagaggctataagtttcatcaatgttactttctacgtattatttcagttttaaatgtcaacacctctatctcaaagagatatttgaagctgaatctctttgtgctctaggctcacaaatgcagtcctctaaatcactctcttgcacattaaaggtgtgagctaaagctggctggtacctagcattctggctcttttccctcccatgccagtgacagacattgctsatcaatcccaggctctttcctaccaagcttagagtgcacttggctytggagaacccttcctgggacagggcyctaccagtcatttggagtcagcaagtaggatgaaatccatttgccatctatagaacaatgccccatgtagtaaatatcaagccaaaggttggtttttctcctcaggaagctgtttgaaacattaatgcagtagagcggtgaagcatgagaagatgctgacaatcttagaagctctattatggtgtaacggggatctcctctatgaagttttgaactcaaaatcctactaccaggggtagagatgagagagaattttcttctcttctctagagagcctcttatctatcttcatagatagtggttgttcagattcatgttaaccaaacactaatgaaatgcatattcttcttcctagacccagatattagtttctaggttttgatcctacttgcttttttttctacttaacttgaatggaaagccacatgatggaggtatgcatcagactgggcactcttaccttttccatgggcatcgggatcaactagtggagaggccatgagtttctattgtagtagggtaaaaagacatcagagccacattctgatgtgaatggccacattcctatttatgtttccatggtgggtttttttttttaaaatcagttcacttttttgggtcatcttttaatctgaatgttgttagtattaaatttcagtgatacttcataatgattttggaagaagaatgtccaaattgcttgaagtactcacatgaaccaggagctacactaggagccagcctcttctgggagtcctggcattgctgtgggtctggggaaagctgggtctgcttgggactgggcagcgccatggttggactaccccagaagatctttaatctttcctttgggggccttttttttcttctcaaggcattcttggttaccagaaacagacatgtacttaagttgcctcctgtgaaggaggattgattgaaagtttgtgcctgggagaagccaaacgaccagctgcagcaagggcaggggctgcactgtaccaccctcacatccttgtttgaatcacagttcctctgcctgactcttccctttctttcccagctggcttcctctgtgtattcatagtcactcccctcctcagcatatgcttagcctagcccacagcggccaccccagcaacgcctcccaccacctttccactctagtggcccctgctgtctagctcagcgacttagtttgccagttctcaattccacagagaggactgggacacagcatctctgatcatagtgtcacatggactgaaagccagtggttaaccacttttgagtcaagaccctattgttttactcagctgtggccagaggttgtagaattgtactttataaatcatagctgccttctacagactctagtatacctgtgcttttagcacccttggggtgtgagaatataatgatgatggctagattagaatcgtgacaatctacttgatttacctggggaatatcataacagtgcggtagccatttccaaagctagcttcagagagctcacaataggattaaagttatgtttagaaattaaatatgatatttagctcatttaaaatttacatttgtctacccatttatttttttcctggcagaagtaaaattatttcagaagcactcattttttctgtaattgttgtcattgggttatttcataatttaattatctaagaatgccccacgtcacccagtggtgaggtgaggctacaaagaaaggaaccctgscatcctgccctgcactcataagtgatcagaaaataatcaaagtggatcacaggcctggaggccaaggaagctggtttgatatgagtgatctgcttggcgtaaaacttacacctttcttaccctgaccgtcccacttaatgttacttgggattagacctgagacccttggagtataatttttgtgtagaaacatatttctgtggtaggtgagatgaagctgagagtcttttgggtaaggagattttccaccccattattttctgtatggcttttaccaagtacaaatcaaaccaatattagagtccatttctccagccctttggctccctttcagccacctcaggaatgttagcatggacattgaccacaacaccccagccttttgtagaggatgcaggtagtgttctgagcagagaccctggggaaacagatcaggcagaatggctcaggagtctggggtctgatgttctacactgggtggtgctggttctgtctccgttgatgtctttgccccagaaaaattcacccaacttcttttcaggtctcagtttcctcatctgcaaaatgggaatcaactcccctcaatgacctctaaggaccattaaggagctgcttattaatgatgctaagaatgcttgggacttataaatatttcctaagcagagctgatatctttcctcttgctataagattggaggaggtatgcagcatctctctgttcatctgtaatttagtcagcttgtgtacatactgcattgcattaaacgctgaactctgatcctagtgtttaaacatattaaatacaaaatatgagtagtataaattgtatgaaacacttttgtctcctacttggaggcttaacaagattttgatgcggggtcagcacaaacattatacagacactgctaagagtaagtggacgtcttgtagacagtggttggaaaatagtcttacagcaaaagtagtcgaagcccatcactgggggatttataagtaggccaagggaaattgagggtgggcaaggatttgaggtatttgtttattttatttgaccattaacttttgtgatactatttctctaaagagcagaagagagcttcacagataacagacttcaagttttaaactcttcattcccacaatagctttgctggggtttgctgccataattaatcaaaaggaatgtcacctatgtctccctttagaaaaataaagcttcaggacaaggcagttttctattagtggcttggggatagacgacaccaccacatgtcttttatttctgagatctggcttctgggtgttcattaataaacacacaaagggttttacctgatggctctgtaaggtacagtgctgtcggcaaactgtgtggaagccattgacgatcatcatactctcctgttgtttaattgaaactctaatggttttatttacctaagcattctttaaattatggagttttctttcttcctctttctagaagtggtcatctgttgccctcctttgcttttgtcttcggctggtgatttgtagcctctgcatccctacaagtgtagttctctaaagccactctggatgggaatcaggtgctgggtgaaggtttgtgtcctaaaagaaatgtggagctctttaactatttcctttttataatcgtgctgttttctgtttttgccctgacttgtgtttttaaattttgctataataccctgaggtctttaatattttcctctggggcaaagtccaagaggaaaataaactctctaaagagtgatagaaattgttgacaagggaagtttgcaaatgaccatgttttatttcagttttcaaaaactgtaagcagacatacagaaatcccagcagttacccatatctgctgatccctctgtcctctgagaagaaggaagagatttatggaatccacaggggctagggccacataacccagtttgagcttagaaggcactagctccttaatgccaagtaaattttggaaatgattctcctttgctgacagtaccctcattactgattgtgtagagtaatttatcaggcatttcttaaaataaaccgttcatttatactaataggacttggcaggaagaaaaaattggcaggacttggagttcctagtgtgggttttttttttctttttctttcttcttcttcttctttttttttttttttaattttgttgcctttaacaaatttaaaaacaccagcattgaaaacttttaaatattttgaggaaacagttttcagaggccagcttgaagttcattaaggcataaagaatggcattataaatctgcaaaatggaagacaggaaatatttccaatgacaaagtttaccaaaagaaaaattaagtacaatgcatctgattttatctttcttcattcttcaggtattgggttcctcatgtggttaactttacctatttttgatgtcacatgggcttttgaagaatgctcattttcctttttcttctccatgtacagttacaatctccttctccttggagtctgtatcagctcgctgcttctccttagttatgcacgtaatgtatcagtgttgtttatgtatacccaagatagttattctcaaggctttcttattatctctgtattcttagccttgggcctctgacaataaatttccatcttacattcccttggaattaaaaggacatcaccaggattgataagcttttctcctgaataaaatgatagcgatggaaatcataataaaagataagtaacaatcgaatctgcagtctcaggaaaactgcattagccctctgccagcactgggaatgcggctggcctgagagccaaactcacaaaatgctgcagtgcagggaagatacacacacacatacacacacacacacttgtaaccacacayccctgtatattagatatatttttataataatgaagctatataagttacagcatgtgttgagattcagacttgctagtaggttgtgtagttcagaccaaaacagaaagaataaatgttttctgagaatgaatagagtttttaaaaagttcaggggtctactgatggttgagtcacactcaaaaggggtaacatgggctaagtgaaacttacaggaaaaaattggcaagtgttttcttatcactgaattagcagactctaccagcttctcaggcaacttctttaactgactttttaacatcaaatggttatccctgttttcatcttctttcctatctggaccttagagcttgttattcgtctaaaattcaactgttagattgttttgtaatattcaagcttttgcataattgatagtatgagacgtaagcctccccctaccaaaaaaaaagtctagaaggaaatatatcaaaatgttaaagacaatgttattatattaataataattcttcctgggtgataagattttgggtaatttttatcttctttatctttcttcagtatttttaaataatttactctaatatttagaaaaatctttacagaacaatgggaaaaaggcataaaccttatttttttagaagtacagtgttaattaatagaatatttttttctagaaagttaaaattgtgtccattatttctttctccatgtgcattgagaattaatgctctacacagtcatattatattctgtttatccttattattacatatctataatttttaaatatccctgaccaattcatcagtaacttttaattttctagttttcttacacttttcttgccaatataagtagttttcctttgttttctttcttttcatttttcaggctgtctattaatacaagcatatgccagtttatttctattattatctgtggtctatgatataaggaagttaggtagtaaacacttgggctttgtaagtttcttctgctcctaaccaaagattyctagcaaaatcattagcagaagtgttcttctagccaccacatttaggtcattgtctttaatttcagaccaaaagattgtctagaaaagtttgagggcagtgtgtatttggattggcacatgcatcctttgagcctaaatataagaagagaatccagagaaatatcatcattcctgtcaaggaaaaaagtggtrtgagggggcctcattccttaccccttttcagattgaattcatctcatgaaattgccatgttcttgtttagcaaaaacaacaggagcatagaggaacacggttatttcaataataaagattctttttatcacagtatcttgggatgtccaatagattctagtcttttcactatggtcctttaacccttctaaccactggttgccttttgctgagttactatgattttctgcaaaggggactcagttaacaggaatcagtgagagaaaaacttccatgtgactctgcctctgtgggtgctgtggttatgatctggtgggaagatattggagtccagttgattctgtgctgaggaaggctgactttgagcataagcttcttcctggcgtcagtcactagtgagacacccagccagaaatgcaatgaaatctgtgtcttttgtgacaaactctgggtagtcacaacatccaaaagcttgccctgtggagaccaactgatgccagccagaggacatcggactacyttttcctcttgctaggaattattttagtcctggagctaagagggtggccacctctttttcagggaatcccatacagaatgagatagaactttcaggccccacaggcaaattagctttgacaggttcagaaagcttttcttaattagtttgcctatgtgtgtagcattcttatttcccctttcttctcgtttaatatttagtaaaagaaactcttctgaaaatttcaaccaatttcagtgaaaactagtaagtaaaactaattttgttcctgtttattttagagcactaacaggagtggtggtaagaggcccataggagaaggcataagagtcagaggggagaaggagaaaaggtaggcaaagcccaggtggagagcctgggggttggttcagacacccctttccagccactgatttgctgtccaatgctaaattctgaagatccctatgttttattaaaggaaatagtcccattgatgaattactgagaaaatataccaatgtagatgtgcttacaacttcatgcaggtttatttaggctgggatcctagatttgctctcacctctaaactttagacatttctcagttatttgacctgaattactatggtttactcttccagtaggttgcaggccttgatgaaattggtttataccctttaaactcactcataaaactaatttccaccaaaaagccagttgaattctgacctcctaaagggcaatggtgtctctatcgttttagattcttcagtgctaagcatgagtgtatgactcaatcaatgacttgttgaattagtgtctattaaatttttttgtgggaaaagccttttacagcttctggatctttctatccctgagtatgataccttcttcttagtctaataagaacctaatgtggcacattgatactcacaagatggtttgagcatggcttccgggcaaagagaagcaggtagtttggagccattttgtgtgtgttgggggtgaggggggtagtgagtttcatagctttatcaaaacttagttctgctccactcatcagcatgcttttaccatcatctgaaacttaagctcctatgatggtgtctcccttggacagggctaagagcattcttttcattctcattttcagtgtttcaagtgggccactcagaactgcttaggtcatcctcttctcatagcgacttataacacttttatgtcattaaaattctacattactggggattacattctgaggacaagattcacttgcttgtgggaggaactcttgtagactaatcccttattaatacaygtgaattcttgacctcttgggccagagaatgtcccctttgatccctttccagttcatcttttctgtagcagggactggggaagaaataactttaaaacaattatgagtacaatgctaaaattaccctaacatgccttgagaatgttaaacaatgttatttgacatgattatagtagatgcaggtactacctggactgtggagaactggaaagagaaaatactgaaaaaagagttagaatctggcttttgtccttatatgttttgttacctgtagcaagtcacttaatcatgctgagcctccatgtcttcactttgaaataagtaactttacctactgtctaaaattaataatattaacatatacatctataggagcccataaatgcaaggtaatattgcatgtgattgatggacagcaaaaatatttttgaagaaaccccttaacaggggacatttaccttctaagcagcctcaataattagttttacctggtcaaaactgtcacagcctctgccaccatcatttcctcctacacccctccaacatttatacatttcatattttttacataaattttatcaatggaaaacagcctctcaaagtgaactaaaatatacacaaaattgatatcaaccatttcttctattagggagaataagctgctggattgtccactcctggagaagatggctgttctcagattaacttgatctgcctacctgtatttttactaattctttagggataagaaccaggactaaattagctcagtgaaatgaattttgacaatgtggcagtcttcaatcttcagtaacccaatccttacagtatcttcaaagataagtatgtctcataagtcctattaaagaaagcttagtcccagttggagaatatacatttgatactgagatttctttggaccaaattagtaaccaggaacttaaggtaaatccaggaaaagcctccaaggcttggtcacaatcactgggaaatatgaatacatctataagcactttttttctttttctgggggcagcaagacacagtggctcacagctggcattcttgcccctcactttttcttttatttgcagcacacggttccattttcaatgtagcatataaagaaaaaaagttaaggtattaaaaatgcatgtaacgtcttctaaattggtgggtttcagagtgaagaattgtaattgtattacagttaggcaaaatcattaattaggcttctgtttgtaatttggtttaaagaaaaataattttagggccaggtatggtagctcatgccagtaatcccagcactttggaaggccaaagtgggaggatcacttgagcccagcagttcaagaccggcctgggcaacatagtgagaccttgtcaccaaaaaacaaaaaattaaaaaaatttaattagctamtggtggtaatgcatgtctgcagtcctagctactcaggaaattgaggcaagaggattgcttgaacccagggatctgaggctgcagtgagctatgattgccctactgcactttagcctgggcaaccgaaggagaccctatctccaaataagaagaaaaaagaaagaaaaaatcttagcttgcataatgccttgaattttcctatggaaggtcagtaagtgaaatattgatgaaggcttgtgaaatttgagcatatgatttcagacatgtgtgttgacaataatacactgataccacagttcaagaagaaaatgattcaggaggtaatagaagaataaagatggccactattaactaatttgctaatgattattttctataagatatgtgttataggatgttcttagtgtcatatattcaatgtaacacttttgattagcaggaattacttattatctcagctgtgaggttggccttaccatagttayttggcttaaactggcaatcacgtctgatttcaattatgttaatgtaaggtaaagatattcatagactagaaattaagagtatactagcagaaacaattccaaatattcttgctaattatattgttgcatattattcaaataagtaaagagccatattaagcaattatctgtggaaataaccaaaagaaaaatataattaatttctataataaatgaaaaataagctgagrtaagtatacaggagtggtattcaaaataccttaacaataattaatcataccccctcactaaaaataatagaatgctggccaaggcattggaatggtgtcactgaggctgcatcctgwattggatgttagccttaatgttttggatcattaagaatttcagtgggatcccaggttgggcacaggtgatgcaggacagcagttatttactaattaatatgaaatagatcagattctagtaaccagtatgaatgtaccagtgcacacaagcttaatgtcagccctggtgaaaacctaataattcattagtaactgtttgattcattttttattaaatttcacaaatgcagtctgtyttgactctcagtcctccgctgtcagaattgaattgtaagtcctgggcagatatgaaagaagagaatactcattacaatattgtatgcaaatcctaaggaggtatctgagagtttcatttctaataaggaagaccagtktgtagcacactaacccttccagcaagaacagtaagaaaaactggataagttttcaaaaatctgttcaaaatcaccagggaactaccaagagagttagggcttcagggccaatatcccaaagagaaaggaaacacactggagtaagccctgtgtactctttccctttccccacttagggcattaccatttcttggtgcatggcataatgacctactagaaatggtgacttaaagctcgcaccagttttgctgggtctgggtttagggacactaaagcagtcagcacatacggggccaagatctcagagaaaagtaagatctcagagaaaagtagatattggagataaatgtaagactgaaagacagagagaagaaggcaaaccagctagcaatcttgggatctaaggatcaacatgacaataagattctgggatttctttttgcttcacatatttcaagctaggtattggagaaactggtaaccaagaaattttgaccaaaaaaaaaaaaaaaaaaaaaaaagcctcaagaaatgcctgctctctctagccaaagaaccaggaaaggggcaggctagcatgatagaaaatgtttagacagtaacctccctacttcagcgaaacaccacaggaaaaaacggcagccccacttccacctctgtcagcaaaggcaaagtgagaagcctagacttacatttctacctggcagtaatgatgcccatccccgcatcaaaagtggagacccatgggragaaggcacttcctcccctgcccggtggtaacaggcatgcctccccttctttgctggcgaggtgttagagaccaggggggaaagcctggactgttatcttccagcagtaataagccactcactctaccacctgctgtatmcatgaaagccacatgggtaggagcaagaaggtccctgataccaccagagacccagggggaccctgaagttccacccctgcccagtagtattgaggagtcattcyccctgcagcagggtatcgtggagaccaaatgggggcctgggcttccacctgcagcttgccataatgaggcaggaccccttccccggccagcatgcagtcaaaggaggcttcctaagacagaagattgaaatgagatccagagtctcataacactcaaaatgtccaggaatacaattgtaaatcagtcttcatatcaagaaaatctcmgcttgaatgggagaagaaaaatcaatggatgccaacgatgagactgcacagacgttggaattacctggcaaaagttttaaggcagccatcatataaaagcttcaaaagcagttacaaacacacataaaacaaaggtgaaagtaggaagttttaacaagaaaatagaacatctctgcaaagaaacagaagatataaagaaggaccaaatggaaatgatagaacatgttgagcctataaagttactgttctcttcagatggatctctgtgtgggttggggtctgcattcaaagtccagacatttctcaagtctgtctcagcctttgctttccacatgaccctgtcatggctcctactcatggtagttcaggcaggcctgctacagcctcccctgggcaatgagggaacatgaatctactgcatcctcctggccagagatttcagtccagggctaggcacataaccaagtacagaacctgagaaaattcttggattctatctgtaattattgggaaaactatctctttttcagtttgtcacttaattgtttgaataattattagaattattagagcacaggctcctggctgccatatttgtcactactcagttggagcctgcttcaagtgagccaggagacagggattaagacatgatcagtattaggatcctggtgacagggtttcatcactgggatccatctaggctttcttgagttaagcttttctttttaaaatattattttattttattgtaagaaaacttaccgtgagatttactctctcaaatttttgagtgtacaatacagtgttgttaactatagaacaatattgtacagcacatctctagaaagttttcatcttgcataattgaaactttatgcccattgattagcaatttcccattcccctccctcttaggtcctggtaaccaccattctactctctgattttgtgaatttgactattttagatacctcaagtaagtgaaatcaggcagtctttatcctgtgactggtttatttcacttagtataatgtcttaaaggttcatccatatggcatggattttcccatccatcaaaatagcaggtggtaggatgatcttcttttttaaggtcaataatattccattgtatatatatacattttattaatccattcatctattgatggacatttagtttgtttcttagttactatgcatagtgctgcagtgaacattggggtgctaatgtcttttgagatcttgatttcagttcttttggataaatacccaggagtgggatagctggattttgaattgggctcttgagagagaaaaagccttatgaaagagtcccaagaaatagagtcctaaagagtaaaagcctactttatattattctttggattaaaatgtagacttttattgtgtaccttttgtttataaagcactgcattaggttttgtactcatcagttyatctactcctcctaaaacccartgtggtgagtgtgatttccacagttaacaaatgtgtggaggrggagtctcagaagggttagaaaatgtgtccaagtcaccttgactagtaatgccccaggaaaaattcaaggccagaagtggctgctcccaaaagctgccttcaaaataagatttatctgtaaatatttgaggaagataagaatgtgttacaaataataacttctatatcaatgaattttcactgctatagtaaaacttcgacatggtttggctgtgtcaccacccaaatctcattttgaattaatcgtagttcccataatccccatgtgtcatgggagggacccagtgggaggtaattgaatcatgggggcagttacccccagctactgttctcatgctagtgagtgagttctcaccagatctgaatgttttataaggggctttcccccattttgcttggcacttctccttgctgctgccatgtgaagaaggacatgtttgcctccccttccaccatgattataagtttcctgaggcctcccaagccctgtggaactgtgactcaattaaacttttttccttattaaattatccagtctcgaatatttcttcatagcagtgtgagaatggactaatatagctttgagtgtattctaagtacttagtgagccatgatacagaggagagwtttcttaaaatgtcttttctctgaaggcctaactcagatcaaagaaataattccaacagataatagaataaataacagtatggactacagaaattatttgcagacaaataacattaatttaaatgcaatcttgaaataattcaaaaatattaagtcatcacgtttacttatatgcacataatttaaattctgataaccttgagaaaataaacatttgagatattatcaatgattttttagaaactctaacttatcaagtgatgaataaatatttgagtgttatctgttttagtaatgtactctgtctgtagacactgactggtgtgcattttcatctgtaagcaatgaactaaattacttttttgatgcagtccttttattttctagtcaaagaatattgcaaatgattgaaaggatttataaaatgaggtggctgagatttgttcttatttgcttgcagctgaaagcataatacacttaatacttccaggatatggaggagctaacagatgtcaaaagagcagagagagctattttgcaaagattgttcaaaaagcaaacaaaaatcctttcttttacaaaattcataaactttctctatcagacattaattatctttgacagaaaaagcatttgctgtttatatagaatgtatcttttcccttttcaattaaaaaaattaaagttgttatgataaaggtaagaccactggattaaaattagygtaacacaaatttgtcttcatcagatttcaaaagaaccattactgtaagctctatctttgtagcactttactgtcaatgcaatagagacaaataattttgcttaaagatagcaacaaaataatttaaaatcaaagaatgttttcagttgccattttgcctaaacagttttctaactgatttgcatttccaggaactgchaacgctagatattttattcagcaaattcagaggctgtggatgtattctagtgatcagaggtctgtaggcctacctaggtaggtcaacttggtatgcttgaaagaataaccataatgttgcacattagaattttaggagaaagatgatagtttgaggaacaaattgcttaatgctgtttccataggtcccatgtaaacaaatagtcgaatgctggcaagtttttacaatcaaggccaatgtttaataaagacaggaaggartaaaaaatggaaatattatttctggatttacattttgtcttatttcagtccaaattcctaatgctgaaataatccaaaaatgtactgaagctgtcacctgggctgccaccatgctcttataaacatgttacttaagtgaattggtttgtttgtgacacaagctccctttggaattaatcaggaatactacaaatacagtaactatttggccttacacatcttatttccctcttttgttggtctagcccctctttcttctggggtaactcctcccacacacatggagatcatgagcaaagattttaatcctgtcctctggccacacatgatttgtcaagggttggcctaagatgagtaaatatgaagcattgccacagaaaatttgcagttataatggaagaaacaattttttatgctctgatgggcaaagctgcattgatttaataaaaacaaagtcacattaaatctatatatctgtcttaagacatttctggactttagaaatatgaacatgcgcctgtgtcgtagaacaggaaggaagagtgtatatttttaaagtattactctaaagcagggtacagcagttaattaaggagttttatgggagcagtgtcatctgtgcacatcccaatcttgttcacatactcagagttccattatcaagaggatactaaggtagattacattgctcacagggttattgtcaaaagccctacattttctggtcttgtgttaaaaaccattcctttgatgagaaggatatttcaagggatctccaatttgtcttactcccttgttctgattccgtattgaccagcaacctattaattgccatgaagaaaatatgytgatgaaatatgctggacttgtagctatctggtccatgtgacaatggtttctgatgcaaacaaagtctcttcttgaaataatgcttccatgtagttgactgtaggtggagaatgggccaatcatgggaacacgaatagcagtgcttcatgtgacagcagtatacattaaggagtggtaatttggtacccatattagttttaaagacagtttgattttgagtatgtcagctttcatgggactgagaactaataagaatcaggtactgggcctttggagcacaaggttagatctagttggagttcccttagacaagttgttcccaaatttttccatgtatcagaattgcttaggaaggcttttaaaagtacaaattcctgtgctggagattctattcagtagatcaggcacagtccagctatttgtattatttaagaacactccttagatagttmtaatgcatatccatatttaggacgcattgtcttagactatctccatacaacattcatatatgccttgttttagctgatttttaaagccataattagatttcatgagttactggatttgcctgcattatacttataaatttgattctagatggaatttctggttgattttctaaggcacacatctctgggtttgcagaagaggtggaatggaggggtggcaacaaaaattggaatttgcgtctttgatgtggtaaatagtcagccaagctcactactcctgtccctagagactgcacttcagaaatgatgagtgattactcttaattttaatgacattctttctctagttagtcatttcattggtcagcttctgatactttttactttgttttcatagttataggatattatacaagactatttgcattgactagtaacatctatgcttgtggctgcattcttgctgttgagaagtcagcgttctaactgttgttacttcataggtaatcttttctctttctccttcgacttttaaatttaaatttttgtcttggactttattttttgctgttattgtttacttgttagttttgtttttgcagttttactaaaaatgtaagatgtatctaggtatggatttatttatatttttattatcttgtttataatttgtttgactttttgaatctgagaagtcatgtctgtcaacagttctggaagattcttcaaatgttgatagtctcttttctccttctagaactccagttagctgtatgttaaccctgattactttatctttcatgtcttttaactttcatatttttaaagtctgattattatcttcagttctgtttggcagttcacttaatgtctcttcagctgtatctaatctgctgtttgcagtttgctaaatgtctcttcatctgtatctatactgtttaacctttccattgagtttttaaattaatgatttacttatttctaaaagttatgttttcacatrttattcttatagagtgattttttttcttataactttgattcttcctttttaaaacgtttatatgttggatttgataatctaatagctgaactatttaaggatctgattctttcatttatttgttttgctttctctagttcatggtaatttatttccaggtatgtttaatatgttttgttccttggaactttacctgtcagaattctttgaggtccagctcaagagcatattccttcgtgtttgtttctgatagacacctatgatacttcaaactaacaacttttttagctacatttcaccttataatgtttgttactctcaaagtggtgtgaattcaggctataaatctgtatgaggtctgacttatggttaaattctcaaggaaattattttatcaccctccatgctgtgtcagggttcttgccattgttccatgagatgtattttatttatagttcaccatttcactgaggttataacattttgggaagcccagctttatggagggatcacaaatatgactcctcatcttgtacaacccttaagctaggttttctgttcttcctgtggtcatttataccacagctataagtcagaaagtattgacagatgctcctggggaagctgctagcttcggaactcatttaatattttaccatttgctgtgtgtactggatcctccccactctcctcctgccttccggaaagattttttatttattttttatcaatgtagccatacatttaaaatattttaaatctgtatcctaacatttttttaatgtcctgcgtcgagaagatattttcaggatagttagtccaccatatttccataaatagaagttttgtgttctttttaaaacttaagaaaaacaacttcattcttcaatttttatttcatgccacagacattttgagcaatcagataatacaagaatttatgggaattttaataaacatctttttcaatatgctaatatatttctggtgagtaaatatacacctggaatagcgcttcccaaagtaaatgttccatagaacactaattgtagttacatgataaaataagcttgggaaacactgggttaagcaaacttacagatttccttcttgaataaattgcatgatgtataatacaccagtgggctcaagcatctttgagagtaggataacttatacccctgtcttcccagaggtgcactgaaagaaagctggcttagacataaaatgacttccccaaagccatagaggtagttagcagagagccaagacaagaacccagttctcctcacactccctttctctttattaccacaatgaaacattttgtaaatagctacttgcaaaactatttccagtaggaccccatcctcaaattgaaatgtgtttaaagcccatcttctttcaccaaataaatgaaagttggcttctctcctaaaaacagctaaataggaatgttccagaagttcttcaaaataaaatcttcacgaaaaagaacttctagaagttcttcaagaaaaataaaatcttaagtagaaaagcaggggttccatatcttgaactgaagtcaaaaattgatgcttttgtggggcttcaatccgcatcgacacagagatataataatcctgtctgattgttaagagggcttgtattctcttgaaaatcatagtttctagttggcaaggagcaaactcccaagaacaagttgtgacagaaaactaaaaaaaaactacttttggatttcaaccagcagaatgtgcatagtttctgactgttagtgtattcttccccctattacggaaaatggactatgggaacttgggaaggtgaagtgcaatgttatttacatttttgtgccaaaacattatgaagtgaaatggtcaaacatgctgagagaatgcagcatatgaaaattaataggaacattttgaatatgtgatcttttacttgaaataatataaatgaaaagggttctgtggaggtactttcttgacctcttttaaatgtttctttttctttctttctttttaaacactctcaattgtttataataacccatttggatcctagacctcaaagttctttcctttcagaatttccttttctctgtttgtctgtgtacaacaaatacctttcaggaaaaaaaaaccacacagtgtgttgagcccactaaatagtcagtaaaagatgtctaatagcatctagaagtaggaaacgagatgagtattgggttggggatctgagtgttggtgtcccatttagtcatcaatccatgaaaacaagtgattatatgcaaaggtattcaaaagggatgagaacactgatatggtaaggagagaacttcygactgaaagctagagagtgacctggacatttctgagaagatgcttgggaggatggcaacttggtagacttcatactaacaagaagcatattagagaattaacgatgatgaggaaaaggagaaggaagagaagaaggaggaatattgagcttttattctctgttaggtaccaggttaagcactggccatatatgattgtattatcacatcgggaccccgaaagctaggaggcagcttccatcatcattcctgttttataagtgaggcttagagarctaaagtaacttgtttgagattttrtatcatacatagcagaccagagatttgaacccaactttttctgataycacaccctggtcttcatcactaagctatattgccttctatatcaggtgtggctacaggttgcatctttttatgtcttagatattgtggagaaaatatttgactttatgctgttaatctagaccagtgaaagtttggagccaactgatagctccagaaatttggccctgaggcagtgcccaaaagagtggatgacagttagtgaaggtcagcccgagatgagacaaggcasgtccctgaggagaagccaggcacaatctgaaagctgaatgtccaaagagcaaggcagggtaaggccagggttgactgggatatgaacaaagtataaagtgggtcagggcaattctgacaaaggattttctagtgctcatgaccaagtttcctcagtctacagcatgcattgcatactgaggggctcagtaagtcttgggataaatttttatttgttcaataggatagagaaaagatgagatgatgcagagtttctttccaggaatattaaactgaccttcaatatcagtatttaacttaaagtacccagcatttcatagttatagcaatagctccaagttgaaatacctgccttattttctcacaaaaactgcatattgggatgtccttataaaactgttttttttaatttggaaaatatgatcactctataagtcatttcaatttcttaactcaagacctccgaaactacactgtttttctatattctgaagtccgttccttctcttgtattcactgtctggattatcggtcacatcagtccccgtagttggaaatgacagtcatcctaggctgcttctgctcttattccccacatccatctggtcaacagaactctcagttccatgtcatatatctcttagatttatcccttcctctccattcctacattttctatcccatgtaccttacaggccaatgggctttctcatgtccaacctttggaccagccactgattctcagcccactttattgttatcaaacttacagggtcacctgatgaaaagcatgamccccccccaaataaatggtgggctgctttgcttagaagagctgatgcaagttgtaggtacttttaggatttagtgcttcacagtattaggtacatactctgtatgccctttgcttataggtcagaattcaaattctatagactggaatacaaggacttctttcccaggaccccattcaccttccctgcttgtcttgccctatggccaactcatgctgtattgattagccactcagatatattggcagctttatacagttgcatgacctatgttatttcctgtgcttcaaacgtgcatccccttatataatgcccaccaggagatctccaatccctcctttagaattcaagattcagcaactctgattgaatcctcagccacacacagattctccaaccttccttactcttctgcatatgtryatttcctagcatttatcaaactgtattatagtaataatttgatattatgtcttttcccttcccagtgatcttcttgactgtaggctcatatttatcttttatcctcagccccttgcaaaaacttggttcaataaatgtacttgttgaataaatgattgtgctaagattgattaattatgacaaaagaataactctggctcttttgatacaaattctgttggttctatggtgcactcctttttgtgagatcctttgagaactgtatagaatactttttaaaagggaaaatatgtgttttgaattgctgaggtagaacatcaatatattgagaaatttttataagaatttttttgttgacagcagtgaaagaaaaagtcagaagctttagtcaaaataagtgaattttaactcatgttagccaataatacatcctggtgctagtgagtaatatttcaaaacacattggtgtcttgggtttaaataaatcttgttttctttattgccataaggttcaaataccaccacttattttgtctgtttcctttatgctttgcgcatgctacttaactttctgagcattataatccctactgtaagtgcaggaagtgatatatttacctctcagaactatcataaggatccaaggaagcaaaatacctaagttactaaaataatagctgacttagcacttaacagtacatttttttctttcttttttatatttttaaaaatcatttttgttagatggactgtaccccaaagtgttaggttcacaaatgcattataacttgtcatttctcattacaagctaaactaccccagtgccattgcaaatccctgcggatttttgctttaggaagattgctgtagacttaacgggtgaatcactttgctccgctggatggtagcccacagcccccttgagcaaaggaactcttatgagacaggatggactctgggcccaaacacatttccagtcagatcaagaatgccccaaaagggcaccagagctacctcttccatgaagagatcctggagctgatgcctcctttttgtgcaccaagaggctcttcagttccctagaattggtgctcttatttacccaaacactcaaaccagacctttctttccttttctttttcttttttaactaacatcaaggttattggaaaattttgatagcttttatgtagcatattttgcttgggaatagcatactscttttgaaagcttctaaagaaagcatataaaaatatcctgtgcattttgtgtgaaagattgacaaaagtatgttttcctaaagaaagttacccaaacaaccagaagaaaagtgaggcagagtaaaaggatagacaagggttggttgatggttgacatgtgaaacgctttaccattcataaaatatttaggttatttgagctaaggaggaaattgctaaggattaggtttatagcacttgaccatgtctcagaagtgctactctgtaaaacttgtcaaagaggaaaaaagaaaaagaaaagaaagcaatcccattaggcaacctggactttgcatcctgtcgtttattaaatktgtcagttgaggcagttaggattatggcagtagatttattaatttttcagaaaacctggcatggaaaagccttatccttggcactagcctggaaaatgcagagaagaaagtttgtgaaacaagcagaatgctgaatacctacagtgaaaaagtcattagtatagcaaacctgtcccagatgaagccaggtaacaaattttggaagggctagattcctgaaaaactgcgagattttattcagaatctttttgtagaaaggaaaatcctttcttagcacaagtgctacagtggctccactcactgtgggcctggaaaatgacactgtgctccaagcagaygtttgttttcatttctgacattcaaaagtcattgtcatcaatgtgtaaagatttattcttgcctacccagccaaaaagcaggacttactcttttccctttacataacgttgggggctgcagcactctgaggtcatcttgctgatgctccatgccttggatgatgggtgtggccttgtttgagagtggctgtggtctgaggcaggagtgggggcagggttggggtgtcgtattcatgactttttttttttttttttttgagacaaagtttcagtcttgtcacccaggctggagtgcaatggcgcaatctcagctcactgcaacctccgcctcctgggttcaagtgattctcctgcctcagcctctcgagtagctgggattacaggcacccgccatcacgcctggctaattttttttgtatttttagtagagacggggttttaccgtgttggccaggctggtctcaaactcctgacctcaggtgatccacctgcctcagccttccaaagtgctgggattacaggcgtgagccaccgcgcctggccctcatggccttttaaggtctttgttattcattctggataccacagaaagaagattcctgttattttctgctaccacttactgtagactcaagttgctttatttctttgttttctacccaggaaggtgtacagggcatacagagggttctatattgtgtacagaagttgaagctatagtgttcttgatttaataataataatcataaagtgtctactatacttcaggcattattttaaacacttcacacatattaattaacttaatcacacaatttgtatcctagccctatgaggtagtagctattattgccaccatttcagagatatggaaacttgagacagacacagttaagtgccttggctgaggtcacagagccaggaagtgccactgccagggtttgtgttcccaggcacatcctgacactgatctcaagcagtcatgcaatggtggcagacaatgtgtttaatgtgaaccagatcaacttgttcacacagcaatagttccattgtgagtactaataggtagaaagaagaagattcctgccagcaagtggcttgatagtgaaagtgtgtgaacactctccagaatagagtgaaagggatgaagaccttcgttacttctacttcagcatacacatgagccatccggggtatttaacttttcccccacctgcagaaatgtctgattcagcaagtcttagtgggatttggaagctacatttatgtaagcaatcccaaacaattcagaacatcttgtgggggggaggtctgagatgtatyttgttagagatttgtgccttattctcataggcttgggttatttcaaaaaggatagagagaaaatgttaycctaacatcttgccaaccaggatgttgtggatgtatcttggtaagaaactttacagtattcaaagtacttcatcttgaggggtagatttcacgtggacaatgaagaaggggttgggagaagctggcaatagtgagccagtctagaatcttaaccataaaaatgaagactgagttttttcacaggaggatgccccttcttctgggaggtacagcagatggcagtgtgtattttctagaaataagttcagaattgaaatcttgtgggacatttcaaattgggctgaactttgaactcatgtttatataccttggacataggaatggggggaaaataacaaccctaaagatgtttatgtaatatatggtttatcacatgtgctcaggccctctgggtcaggatgtatacatctaaaaatgccctcataagtgcattggatgaggatctgaccccatagaccagcttatatagctcttgtgaacaagaaaaaaaatctgcatctagtcttacattctcttctagcaaatgttaagcrtggccaccgagaaacccagtcattaaaaatgaaaataaaacaaaaactatttcctatgatgtgaatttaaagaacagactcttttttttcctgaatggaaacagtgacttgaaatggagtacaattaagctaaataagaggaaacagtgaaattttgtagactatggaatagtctcactgggaacattatggaagcctcatcacttagtcattacaaactagaccagacaaatgaattgaagatatgctgcaagaaacaatgtcatagggaagggataaatgaattttttttctctatccccctgtggaaatttccccagtggtgtcagcactcagacacacacacacacgcacacaccacacacacacacacagtcaccttcaagttgtcttcttgctgactttrcaatgtgatcatcaccaaaatggcatttaaaaccccccaaagcctctttctatttctgggtctacatttactgtgtattctgatcccctgtcttgttcattatggataagattttctgttaagattataaaagccttacggtttccacttcgtcatctttaaagccwtgtaaacaccttccccagcaaagcctagtgattgcaagtagtgagcggtagaactgaaacccaatggagatggaagaggacaacccaattctgttcaaatggtggtttacagaagctgttcacttcagcaggctcatttaacttacscaacytaaaaaccactgagccttccttccatcccttgagtcacaygtgctttctatagatagctggtagaaatcacaatattgaaaagtcaattacttgcatatttggagctaaaagtggggatttgaagtatgaccatccccagtgtttcttattctatagagtgtagcctgcaccagaaaatatataaatgaccagattttattcaccgtttgttccattttctatcactagctacaataagaaattcaaatgaaatttaaagattactgtggctatccatttaaacacactatttttgattcccagattataggaaattagcaatcggttgcatgtttcttaaaaaaagctgtttacctattacaagtagttgatgataatggaaaataataacaccaatttttatcaactataattttatttggaagacaaggcttttctattatacttcattccttttcttgttgctcatgggcaagataaaactaaattttccctcttgtcttatgcaatgtaataaaaaataaaatactagtaatagtaataatgaaaagtagcaaccttttatagatctgtgatatatcctcacagatatgtcaggccttgcaccaagtccttcatggatattgttccattttatgctcacaacagctctctaagtaaaatattcttatcttaccgatgggcagcttgatcttaagagaggttcaactgtgcctaaaatcatgtgagcatgtggcagagccagattcaagcccatttttttctgactccaaagcctgtgcctttaattacctgccatgtgcctcaaattccttaagtcttaagggaattattgtatttcctatgccctctcttccctcatattgcatcttcttattccatcctcatgaaggaaacaagagttcaccacccaaaataatatttttgaacaattaaaaataatagacacaactactattaattttaccagtgattaaaatgatcacaaaagtaatatgatcatgcaactagacacaaattctttgagtaacctaaagaaatcaaaatttaaatttaaatttctttagggttcttaaaatcagataattgaaaaccatttccagcacatttgtgctgttgcatttgtcttttcaaatgctagttttattgaagactgtaaaatatattgttacaatctacagtgggaaggacagtgtgttgattacattacttttggaagaggaggaaacgatttatattacttttctacctggtcatctagaaagatcaacttcaaaacccaagaaaattcactttccacatgaaaagcagtctatggtagtatgttgactaaatggagcatggggttttgagatgatagtattttattattctttgtcgcaaaggggctaatcataatcatctaggaattgattatcgccttacaaagaaaagtgtgtgtaaacttcttcttgccttccaaaagcttacaagttttggcaactttgtacatcttgtgcataaatataacattgggcataaaactaagagaagaaatgcttacaaaagatttaaatcaatgcttacttgagcaatacagcattgatctagttcttttatttttccctcttcaggtataatagaatgcaagtttcatgagggcagatacttgggacttgttaattaactgcagtctctctaacatttagaaaagtacctgacacataatagatgcttaataaatatctcttagataatatgagctttaagaggaggaatcatggggatgccacacctcatcctgcatctgtttatatctacgagttgaagtagtgaggtcatctacctttgtctttgtaagaatatcactgtccgggccattacccttctcagaaaaaaaaaaaaatactttcaatgcaatcagcatttgtggatgatttaaagatggaatatcttaagtgaaagcatctgttggaaaacatgataaggtactcagagacaaagtccttgtcatttatatgttctgaatgatgcctagcttcccataggtaaacactgagacctaaattgccataataaaagatcagtgccattgccattaaaatgcactgtgtttctactatcttgagtgcagaaaaagaaaaaatgttggcatcatagggctgattctgcacccatgtggaatratttaattctgttaataatgctagaaatgttaagaaaacatttgggggagggaaaggcagaatatgggaacgtgcaaaaccagccttgtttcatctgaactccaggatcctgcgttttcccttgtttactgtacttattctggatctgttttcacttttatttgtggtcagcttcgatatgtctacacgaaagcacacttcagaagtaaaatgactctgtctttttacagtatgacttcagacagttggacagtttaggatgcactggttcctggatcaattttcccatgcctgcttaaggcatgctagttaatatactgcaaagagaaaaggcattgtctctaaaggcacatgaatccaaccattgagctgggttctgggtgtacgccatgccctttgagcctcatgcatagcaccccagccaaattctgcccaccctcagaagttgagccttatgcataccaccccagccaaattctgccccccggaagttctcatgcaattttcattgactatagtaggactcatctgggtgtgtccaagggcagaatctggctggctacatgtaacataatgtttgggttggggcatgaggccaaaaaagcattgtttactatttatatgggtcttcaccaatttctggactctaaaagagatgaactcactgcttctgaataattcattcatcaaagcagacatgaaaaattttgttccttgagtttagttagaaagcaaagcatttgctgtttcactgtctggaagccaaaatatgtttggggctctccacttcaacccaagctgacattcccaagctgacagcatcttaaagcaagatgacttgctttcttgcaaagaggcaggcaattgtggccatgagggtatgacaaagacattgagattgccttgaacctccctcaaggtttcctacaaatttcacgttcctgtaaaacatttggggctaaactatggtagtagcatagaatagggtgttgctctgacttggactaaaatcatttgtttgtgtgtatgtggaatgccatctatggcacgttagagacaaatgccaggaatatgaaacagtgaggaggaaaggctccttgaaatagtgcgtgcatcttagaaagccacctggggaatctgctgagaagggatggctagatatactttcaaatcctcaaatatcaagcatccaagtgaaacccattaagtttgatgagttactctgtttgtaaaagaaaactaaaagcttatagaaatttcaaattttcaagtacctagggctagatattctgtaataagttcctgcttttaaaaaggggcgatgtctaaactctgtaaygttggtggagttttgttctcaaaggttcccaggtggtcctgagtagcccatttcagggttttatcaaaccctgacatgggcaagacttacagatgttcaaccctaaatccaccctgctttaaatctcttttatcttgttcatatttatatgaatgtttagagtgaaatcctcattaggaattttttgaacattgagattcaagtcagccttagtgttcccttctcaaccattatcattgtaatcttccctgtcaacctgattttcctctctttgcttatcttttttacttttttccctacattttataacattagaggaattatggtggttctgaatgatcttgttgtcttatacccatccttggttttcctctcttcccccttttatttgttttgttaggaaaaacatcatcatgaatattgattctgaaatcaggttctaatttccacatatttgtattcagagtgactctaccattcaaccaaatttctttaactggtccttcacaatatattcaatgtaatagaatatattaaaatcaataatattggtacaaatgctgggatcggaaccttggaatgaacaaatggggtcagctgaggtagaggctgggggtttcaactaggctctacccagctgccctgaggatgagggaatctgtatctcagaggatgcagcatggtctccatgcagctccatgtgcacagcacttggcagtctctggcttcacctctttatatataagtttccagacctataaaattaaaataaggaggatattcactacccaccttctaaagttgtacgattgagtgagttcatgcatgtaaagcacttaacacaatgttcattactcaaaagatgctaattggtaatagcagtagtgttagtagtggtagtagtagcagtagcagttgcagtagctttatttctttacagtcccagaagttagagagaatcattaagaagttatagtccaatgttatttacatttttcagagaacatttatattatttttttatttttattttgagttctggggtgcatgtgcaggatgtacaggtttgtcacataggtaaacaggtgccatggtggtttgttgcacctgtcaaaccatcatgcttaatgttctagaacaagaaattttgacgtgaggtctcacaggataaaactgcaataaactaagacaagtgagaagggggatgggtagagaagaggtttccacagcccgtagagtctggaggcaattactcagtttctccgcagaaacaggtgaaagtgtccaaggcctaggctgtacaaataaagcagtcaaaaagctgagatttaggaaaggatgatggcccttgacaaagcatctacaggaagaagctggacaaacagaggctcagaaccatgatgaggctaacttggggacagtctgagttatgatggaagggctatctgactacactggacatgtcccatggtgtattagttagggttctctagaggcacagaactaagaggatagatgtatatataaaggggagtttataaggtgtactgactcacacgatcacaaggtgaggtcccacaataggtcatctgcaaactgaggggcaaggaagccagtccgattcccaaagctgaagaacttgggagtccaatgtttgagagcaagaagcatccagcacaggagaaagatgcaggccagaagactaaaccagtctagcctttttatgttcttttgcctgcttttattctggcctcacttgtgtgtctacccagattgagggtgggtgggtctgcctttcccaatctactgactcaaatattaatctcctttggcaacacccacatagacacaccgaggaacaatactttgcatcattaaatccaatcaagttgacactcagtattaactatcacacatggctactccacccttaccctgtttgtcaataaggaaagcacaagagcaggtgagggcagccaagagacttggcagtggatttcaggcctgagaaagctgcttaatttcaaggwtaacctgaaggactctgcccttgagactggcccctggcctcacctgaagacagaggccatcagacatcccagcagcrgaagcctggacagtctgaataaatgggaatagccttctgkaaaatgaagaatgcttggatttgcaagaactgtattcagccaaggctggattatctgcaaagaggtatgcatatgcttgggcactgtctcctccctcacagcccaactggtccacttccagccatgctccctggggacattgcctccattccccaagacttactcttctgcagtttcacaaagcccagttggtttaaattctttgtccttccattgtccaaacctaataaggaagtcagtcagctgtgggttgggayaaggaactggttggtggtaaggaagaacattcctccaagggccttttgatctttaagaggcaataagttgccccattccctgcttttatacaaaaatatctcttgtgtgtgtcattcagacagattgttttccttcccatgaatgtaattgttgtctcttggagattttatgagaaacagaattcaggccattccasagttaggcagaagaggaaagcatatgactttatcttgctcacttcccagacttgtccttttacttgttaatatttgtctccaggagtcatatatttcaatgacaaggcaaaatacccccagacaattcatgcctgttcctgactctgtrcctaacgaactgtggaccttggtcaaacattttatactgttgggcctcggttttctcatctggaaacttgggaagttggactggacaagataaatttggcaggtagtgggttattgctatcaaaaacatggattttgcaaattaacatacctgattttcaaccctagttctgttacttgcaaagatgactcaaatgcagcagagcctcagttttctcttataaacaaggttgttatgaagattacataaaataatgcttgtgaagtgcttaatactacctgaatattgtaagtgctaagtcagctttagctcatatttggtgtttccatctatgatttttccttctgaagtaaactttacaatatctgttattttttaccatatatgccaatgatattttctattagtgtgggcaaatcaaaatgggcaatggtaacactatattttattctatatatacaagtgtgtgtgtgtgctctctctttcacacacacgtacacacacccaaaaaagtaacttatttttctaccatcagcagaatctagaattaacttaaagaggttactttaacctagtatggttaaagaagtaccatactagrttttggttcctcaagctctttcacaaatccttccttttgagtcaacagctcatgaagatagtaggtcaatgtttttttcaacttgtattttagattcagggggtatatgtgcaggtttgttatctgggtatgttgtgtgatgctgaggtttgggatatgaatgatcccatcacccaggtactgagcatagtactcaacagttagttttttagcccttgtcaacctccctaccctctctagtagcccccagtttctattgttgccatatgttcctgagtacccaatgtttggctcccacttatttatatgtgagaacatatggtatttggtttttttgtcctgacattaatttgcctagcataatagcctccagctgcatccatgttgctgcgaagtacatgatttcattcttttttatgtctatgtagtattccatggtgtatatataccacattttcttgatctaatccatctttcataggcacctaggttgattccatgactttgctattgtgaatagttctgtgatgaacatatgagcacatctgtctttttggtagaatgatttcttttctttttttttttctttgagacagggtctggtttggtcacccaggctggagtgcaatggcacaatcatggctcactgtagcctcaacctcccaggcccaagcaatcctcccacctcagcctcccaagtagatttattttcttttggatacatacctagtaatgggattgctaggtcaaatggaagctctggttttaggtctttgagaaatctccaaactgctttccacagtggctgaactaatttacattcccgccaacaatgtataaatgttccttcttctctgcagcctcaccagcatctgttgttttttgactctaataatagccattctgactggtgtgagatagtatcttattgtggttttgatttgcctttcactgatgattagtgatgtggagcattttttcatatgtttgttggccacttgtatgtcttcaacagatgtgtctgttgctgtcttttgcccattttttaatggggttatttgtattttacttgctcaaatgtttatgttccttatagattctaggtattagacctttgttggatgtgtagtatgtgaatattttctcccattccataggtcatctgtttattctgttgatatttcttttgctgtgcagaagctcttattttaattaggtcccacttttcaatttttgtttgtgttgcaattgcttttgaggacttaattataaattatttcccaaatgcaatgtctagaatggcatttcctgttttcttgtaggattgttatagtatgaggtcttacatttaaatctttaatccatcttgagttaatttttgtatatcgtgaaaggtagggttccagtttcattcttctgtatatggctagacaactatcccagttccaggtattgaatagggaatcctttccccattgcttattttagttaactttgaggaagatcagatggctataggtatgcaactttatttctgcattctgtattctgttccattgttctatatttctgtttttgtaccaataccatgctgtttttgttagttactgtagccttataatatagtttgaagtcacgtaatgtgatgcctccagctttgttccttttgcttggcttactttggctatttgggctcttttttggttccatatgaactttagaatagttttttcttctcttctgtgaaaaatgatgttgatagtttgataggaatggcattgaatatgtagattgctttgggctctatggtcatttaaatgatactgattcttagaatccgtgagtatggaatattttttcatttgtttgtttaatgtatgatttcttttagcactgtttyatagttctccttgtagagctcttttttgtccttggttagatgtagtcttgggtattttgtttgtgtgtggtggtttttgtaaatgggattattttcttgatttggctctcagyttgaacattattggtgtatagaaatgctgctgatttttgtacatggattttgtgtcctgaaactttagtgaacttgtttatcagtttcaggagcctgtgatggagttttttgggttttctaggtgtagaatcataccgtccttaaagagagatagtttgactacttttcttatttggatatattttatttctttgtcttgcctgattgctctggctagcatttccagtactgtattgaataggagtggtgagagtagacatcctggtcttgttccagttctcaaggggaatgcttccagtttttgcttgttcagtatgaggttggctgtaggtttgtcatagatggctatgactattttgatgtatgttcattcaatgccaagtttcttgagggtttttgtcatgaagggatgttggatttttttgaaagctttttccatggagatcatatggtttttggttttgattttatgtttatgtggtgaagcacatttattgatttgtgtatgttgagtcaaccttgcatcctagcaatgaagcctacttgatcatggcaaattaactttttttgtgtcctgttggatctggtttgctaatattttgttgatgattggcctgtggtttcattttttgttgtgtctttgccaggttttggtatcagggtgatgttagattcatagaatgggaccacagtcattgattttttggggatagtttcagtagaattggtaccatctcttctttgtacatcaggtrgaattcagctgtgaattcatctggtctggggctttttctgattggtagtttttaaaattattgcttcaatttcagaacttgatattggtctgtttggggtttcaacttcttcctgattcgattttgggaggttatgtgtttccagaaatttattcattttctctagtttttttctagtttgcacgcatagaggtgtgcatattagtctctgaggatcttttgtatttctatgagatcagttgtaatgtcacctttgtcatttctgattgtacatatttggatcttctctcttttttttgttaatctagctagcagtctattgatcttgtttatcctttcaaagaaccaactttggattttactaattctttgtttggattttggggtctcagttttgtttggttctgccttgattttagttatttatctgctagattaggggttagtttgttcctgtttctctacttcctctaggtgtgagattagattgttaatttgagatctttctaaccttttgaggtaggtttttagtgctataaactttcctcttatcactgtttttgctatgtcccagagattttggtaggttgtgactctattttcatttatttcaaataattttttgatttctgccttaatttcattatttaatcagaagtcattcaggggcaagttctttcatttgcccttggctttgagaggtcttcttcrtactgatttctaattttgttccactgtagtcccagagtgtggttggtttgattttgattttttaaaaaaattattgagacttgctttatggacaagcatgtggtcaatcttaggtaagttccatgtatagatgagaagaatgtatcatctgtggtaatgaatggcatattttgtagatgtcttttgggtccatttggtcaactgtgaaatttaagtccagaatttctttgttagttttctgccttgattatttgtctaatgctgtcagtgagatgttgaagttccccactattattgtgtggctgtgtacatcttttcatatgtctaaaagtacttgttttatgaatctgggtggtccaatgttggatgtatatatatttaggatagttaaatcttcttatagaattgaactctttatcattatgtaatgcctgtctttgtccttttttactgttgttggtttaaagtatattgtggctgatataaagatgggaagcaacttgtgctctctttttgccttcttttgtgtggtggatcttcctccaagtctttactttgagcctatgggtgtgtaagatagccttatgtgtaagataggtctcttgatgacaatagatggatgggtattatttatccaacttgccactctttgccttttaagtgaagcatttagaccatttacattctaggttaatattgatagatgaggttttgatcctatcgagaaattgttagttggttgctttgtagtttctattgtgaggctgcttgatagggtctgtgggctatgtccttaagtgtgtttttgtggtagcagttttcattatttcatttctatgtttagaactctcttaaggaactgttgtaagrcttgtctagtggtaatgaattcctttagcatttgcttgcccggaaaagattttcccttcacttatgaagcttagtttggtgggatatgaaattcttggttggaactctttttccttaggaatgctgaaaataggcccccaatctctcctggcttataaggtttatgctgagaagtccactgttagcctgatggggctccctttgtaagtgagctgcttttaagatttttttctttagtgtcgacctcggatagcctagtgactgtatgccttgatgacagtcattttgtgtagtatctggcaggtgttctctggatttcttgtatctggatgtgtacctctctagcaagataagggaaattttcttgaatgatttcctcaaatttttttttccaggttatttactctttctccttctgtctcaggaatgccaatcatttgtaagtttggtcactttacataatatttcttgacaactttattcattttttaaaattatttttttctttatttttgtctgacttggttagtttgaaagaccagtcttcaggctctgaaattctttcttctgcttggtccagtctattgataaatctgtcaattatattttgaaattccttaagtgaggttttaaattccagaagctctgtttgattttttttttaaagatgtttacctcttccttcatttccttgattgctttagaagtttctttgtgttgatgttcaaccttgtcttggaggttgagcttccttgcaatccatgctttcaaatctgtcatttctgagtttccatttttgtcaggagccattgctggagagctagtgtgatcctttgatgctgtcaccacattcaaattcctcatggtgccagaattcttgcagtggttccttctcatctggagatgctagcacttctaatttttataattattttagtgtgggtaggatttttctttttctttcttgcctataatattatttttttctttaccattccctcccttcctaggtgatgtgactgtagagaatgctgggtagggtcttttggctttgtttctatagccccatgcacttctgatggcaggttttatattgggctctgcagtttgacctacaagcttgtagatggcgcttataggtaagagccagctgcagccaacatggttggatatatacttgatccttgcttactaggagaagccctctgtttcctcaggcaatgggctaagctgtggagtgcacagtggtctgagctccctcctcagccctgtggggttgggggccaagatgggcagggctagaccaggcaggtcctcctccaggggccccgatggcaggcatgagcaccagtgctgagggtgggtacagtgagcagccactgagcacccagaggtgtgcctaggcatggtgctgggaaacctccttggcctaagttctctatgtgggactgaggggtagtttaaactcctaggagaataggtactccagatgcctggaggtctgcctggttatggggtagagagggccccttgcacccaggatctctgcacaagaaggctggggaagtttaggccactgttccagttgggtgggtgatgtgaatgcctggagatgtgcctgagtgtggagcagagaaggtctccctacaccaagttctctgctcgggaggggcaggatgactaaggcaagcatcctggagatttgcctgggcatggagcagaaagggcctctctgcatctggatctctgcataggaagggtggggtagttcaggctgctgaactaaatgagtgggtgctctaaatgcctggagatttgcctgcatgtgaagcagagagggcctccctgtaccaggatctctgcacaggaaggatggggcatgtcaggctgctgatacaggtgagtgggtgctctgaatgcctggatgtctgcctgtgaatggagcggcaagagctctgctgtaccacagtctatgcccaggaagggtggtgcggctcaggctgcgaaaccacacaagtgggtgctccaaatgcctggatttctgcctgagggtgaaatggagagtgccctgctataccacaatctcagaggagcaagctggggcacccagcaatggtagatgcagaccagttccacgttgccaagctggcaagtctcactgcccaagagaaactacagctgtagcagctctccttctgcctgaggcttgcaatgtgrggagcacaattctagcacctactgctgaggtgccttctacagttcgggctgtggaggcccctaccccactccaaagcaagtcttgctccagcctctggtccaagactaaaataccaacacagtcatgctgctaggtcagcaaagaattcttgactttatgtggtcctgcattaaaaatggcaccctgctcttggtcctaggctagcctggggaaaatgtattgagctttttgtggtgtctttctcttacaacatcttcaatcctttccccaagttagyactagggcttgggagaaacaaagtgttcccccttggcctgggttgcttggatctccactggaaaggtgagcttcagagggaggctttctgcctctctcatgtactggggttttactcatttttatcagccagacaccatcacaggggctgtttgctggcatttttctccctggattctggtttgttcttcaagattccagtagattcctattttccttcttgaatgaaagttcacagagttgatctttatgcattgtcttgctatctccaagtggmtgaggcaaactaaaagcctctcatctgccatctgggatggggtggggtagttggtcaattttaaggctaaagaggttactaaggttattctttagcaagcccattgtatgcaaagtaaaggcctctgtacatatggaatgaacagaatcttaataggtgaagttatcacaactctgcaatattagctatggccattaactccagaacmagggcttggtttggtaggagtatacaagtgagaagtcaaataagagttgcatgaagatattgtaaagaaagagtataagaagatgatgagaatagagttaagttaaaagtgtttgtctgtagtgtctttggggagaagtttggagattacaaaccaacacttctattgtccaatatcacatttcccattcttagttgagttggttttgatataatttgaaggctggatcttcttcatttttgtgtatggtacaggcaattctgactttttacttatttatccactcaaaaaatagtagtaagtacctatagttggccagcattgtgttagattttaaaactggtcctctacccatggggaacttaaatttttggaggagacagatgagaaagtcaaccctctcagtacaataggtggttctttgaaagaggtattcagtagatactatgagaacacagagcaggaacacccaagtcactggggagtcgggggaaaaaaccctgaataagcagtgatagaggccgggagtagtgaagacatactggagagaagttaaatcatggagtaagtaagaatagtgactggacttagaatcaggttactcactgggggatttaggataacaattatatcaactactgatggaaggaatacaagacaaagagctattttatgcaaaataatgataatttttgtcttaaccatgtggaatttgaggatcttgtggtacatccaaaagaagataaggtatccagcaaacaactgtcattaggattcaaatggaggttggagccatgaacatatatatagttcttcagacagagtatatagactgaacaaaagtaggcaatgggatgcctgaggaagaaccatttttaagggttgaaatgagtaaatagagatggcaggaaggaagagaagaaatagcttcattagtagaaggaacatctggaagagttgtattacataagccgagagagagaacttctagaaggaggtagtgatctgcagagtcaaatattacacatgtaatataatggttgctaggtgggctttttgctagctaagaaatgttcattcaggttctcttgacaaagaaatcaagaaatcaatttgcttaattataactatacactcagaaaatgaagtagacagaaactctactcatgcaaccaggttctgagagaataggaaccaaggaatgccaggcctcataaagaatggactgcagttcagaaactaggagctcaggatataacgcaactcttgcaatcaggatattttgttacatcctcaataggaggtgcaccctggtctgtctacaggcagtctgccatcaacctaattctttgttactctatggaggtctacacaccttggatgcacttccatattaccatctctagaccagctctttcaagagagaatctgattggcctagtttatccccatgtttctaattagagagggacctcatagtccatagattggtagctattgaatcacttgtgttgcctcacccccctggggcccagtcagctgtagccagggaaacaaagtaatatggtacccagaacatgactacttcttcataaagaactggtaaggactgctttcctcaaaaaggggcagtggctgtggaagatgcttcatgttttaaagcctgtatcatggacattaataatgtagaagtatatgtgtacctgtgagagtatcttcaacactggagataaacactggaattgggatcttaatggattgaagagtaaatgggaagtgagccagtggaggcagggaatatagatgaatctttgcaggaaggagggtaagagatacagtaccacagcaaataggaaatttgtttccaaggtaacattatctttttttaaatatactttaagttctagggtacatgtgcacaacatgcaggtttgttacatatgcatacatgtgccatgttggtgtgccgcacctattaactcatcatttacattaggtatatctcctaatgctatccctcccccctccccccaccccacaacaggccccagtgtgtgatgttccccatcctgtgtccaagtgttctcattgttcaattcccacctatgagcgagaacatgtggtgtttggttttctgtccttgcaatagtttgccgagaatgatggtttccagcttcgtccatgtccctacaaaggacatgaaatccttttttatggctgcatagtattccatggtgtatatgtgccacattttcttaatccagtctattgttgatggacatttgggttggttccattggtctttgctattgtgaatagtgccgcaataaacatatatgtgcatgtgtctttatagcggcatgatttataatcctttgggtatatacccagtaatggtttggctgggtcaaatggtatttctagttctagatccttgagaaatcaccacactgtcttccacaatggttgaaccagtttacagtcccaccaacagtgtaaaggtgttcctatttctccacatcctctccagcacctgttgtttcctgattttttaatgatcgccattctgactggtgtgagatggtatctcattgtggttttgatttgcatttctctgatggccagtgatgctgagcattttttcatgtgtcttttggctgcataaatgtcttcttttgagaagtgtctgttcatatccttcacccactttttgatggggttgtttgattttttcttgtaaatttgtttaagttctttgtagattctggatattagccctttgtcagatgggtagattgtaaaaattttctcccattctttaggttgcctgttcactctgatggtagtttcttttgctgtgcagaagctctttagtttaattagatcccatttgtcaattttggcttttgttgctgttgcttttggtgttttagtcatgaagtccttgcacatgcctacagcctgaatggtattgcctaggttttcttctagggtttttatggttttaggtctaacatttaagtctttaatctatcttgaattaatttttgtataaggtgtaaggaagggatccagtttcagctttctacatatggctagccagttttcccagcaccatttattaaatagggaatccttcccccatttcttgtttttgtcaggtttgtcaaagaacatattgttgtagatgtgtggtattatttctgagggctctgttctgttctgttccattggcctatatctctgttttggtaccagtaccatgctgttttggttactgtagccttgtagtatagtttgaagtcaggtagcgtgatgcctccagctttgttcttttggcttaggatcgtcttgacaatgtgggctcttttttggttccatatgaactttaaagtagtttttttccaattctgtgaagaaagtcattggtagcttgatggggatggcactgaatctataaattaccttgggcagtatggccattttcacgatattgattcttcctatccatgagcatggaatgttcttccatttgtttgtgtcctcttttatttcgttgagcagtggtttgtagttctccttgaagaggtccttcacatcccttgtaagttggattcctaggtactttattctctttgaagcaatagtgaatgggagttcactcatgatttggctctctgtttgtctgttattggtgtataggaatgcttgtgatttttgcagattgattttgtatcctgagactttgctgaagttgcttatcagcttaaggagattttgggctgagacaatggggttttctaaatatacaatcatgtcatctgcaaacagggacaatttgacttcctcttttcctaactgaataccctttatttctttctcctgcctgacacccggccagaacttccaacactatgttgaataggagtggtgagaaagggcatccctgtcttgtgccagttttcaaagggaatgcttcccattttcgcccattcagtatgacattggctctgggtttgtcataaatagctcttattattttgagatacrtcccatcaatacctagtttattgagagtttttagcatgaagggctgttgatttttgtcaaaggccttttctgcatctattgagataatcatgtggtttttgtctttggttctgtttatatgctggattatgtttattgatttgcatatgttgagccaaccttgcatcccagggatgaagcccacttgatcatggttgataagctttttgatgtgctgctggattcagtttgccagtattttattgaggatttttgcatcaatgttcatcagggatgtttgtctaaaattawcttttttttgttgtgtctctgccaggctttggtatcaggatgatgctggcctcataaaatgagtagggaggattccctctttttctattgattggaatagtttcagaaggaatggtaccagctcctcctcgtacctctggtagaattcagctgtgaatccgtctggtcctggactttttttggttggtaggctattaattattgcctcaattttagagcctgttatttgtctattcagggattcaacttcttcctggtttwgtcttgggagggtgtatgtgtccaggaagttatccatttcttctagattttctagtttatttgcgtagaggtgtttataatattctttgatggtaatttgtatttctgtgggatcggtggtgatatcccctgtatcattttttattgcatctgtttgattcttctctcttttcttctttactagtcttgctagyggtctgtcaattttgttgatcttttcaaaaaaccagctcctggattcattgatttttttgaagggttttttgtgtctctatctccttcagttctgctctgattttagttacttcttgccttctgctagcttttgaatgtgtttgctcttgcttctctagttcttttgatgtgatgttagggtgtcaattttagatctttcctgctttgtcttgtgggcatttagtgctataaatttcctctacacactgctttaaatgtgtcccagagattctggtatgttgtgtctgtgttctcattggtttcaaagaacatctttatttctgccttcatttcattatgtacccagtagtcattcaggagcagattgttcagtttccatgtagttgagcggttttgagtgagtttcttcatcctgagttatagtttgattgcactgtggtctgagagacagtttgttataatttctgttcttttacatttgctgaggagtactttacttccgactatgtggtcaattttgtaataagtgcgatgtggtgctgagaagaatgtatattctgttgattttgggtggagagttctatagatgtctattaggtccgcttggtgcagagctgagttcaattcctggatatccttgttaactttctgtctcgttgatctgtctaatattgacagtggggtgttaaagtctcccattattattgtgtgggagtctaagtctctttgtaggtctctaaggacttgctttatgaatctgggtgctcctgtgttgggtgcatatatatttagtatagttagctcttcttgttgagttgatccctttaccattatgtaatggccttctttgtcccttttgatcttttgttggtttaaagtctgggtaacattgtcttttaagatagaagatacttcaccctagttatattgtaataggaaagagaaattgcatatgtaggggagaaaatgattgatagactgaggtccctgaggagctgcaagggaaccttgtagagcactgttttttaccttactcacacgtacactcatcagtggactctcctatctgaggtaatctcatattgttgaacgtggagaaatcctgaaagagatatggggaaggaataaattgaaaatgagagtgttaaggaaatggggaaatactrtgggagttggcagctagaaacacaagttaggaaaggaaagagtgggaaattcagagaaagtgaagaatcagtaagcaagagtttgactaaatattccgaagggataggttataagtcctcctgggtgttctgatgactccaagggctgcttatttattttgctgcaaggaaaaagccacaagcatgccttgattgtgatgtccctcataactcactaccatagcaggcaaaccctcaggtattctagagctttttgttttgcatcagtaaatatttgctgccattgtatcatcttagtaatgatttaccatacatccyatttgaatttcatggagcaacccccttaaataacttttaataccagagataatcccagtggctaagtcaattagatcttaaaaatagaacctttgttaaaaggtcactccgatttctcttctggtgttgggttctgacactgataaattgtccccagactcctctcttaacatcttaggttaagactgtctctactacatacatacaccagaagcactgagattttttttttcatttaaaaatagatccaaaggcaaacatatttaaagtggatttcctactatggcgatttcaaaacctaacactggagaatgaaggtggtaactgtcgtttcacatgtgtactcagcaaatgcaatttctactaccatagttttccttttcctccacctaactctactacactgcttattataaacagtagttggaaggggtagattttataagcatttgggatgtgcattttcatccttgagtagaaaatggacctcttaaaaattttcatttacttttctttcctttcctcttccttctccttttttgagaaggaaaaatgaaaaaaagtatttgaaaagaaattaagaggtggcatgtatacttaaatttttatttcccttaagtttcaaatctgggattcaaatagcgacagacttaagagaagggcctggcatcactcctagtcccacgaaattgtcctactgcctcttgacagagttaaggccatttgtctcctggttttaatcttattgctaaataatagctaacgtttaatgattacctagtaggttccaagtatcagggataaaaaatgaataagcactggttcttttcctaaaagaactcacactgtagtggtgatgactggggagtggctagattaatgcaacaatttagggaaagtggaagtcagaaggagagaaaatgacagtgagcagtggatgaaaaatttctccctttctctcattcaggttcatgacaagtagctagctaaatcctcaaattaattcactctatgacttcagagggcaaaccatattccttgctcaaaaaaaaaaacaaaaaacaaaactcattaaggaaagaaatttgtctatagcagtaaagctgatggatgttcttaaaatccaaagaatctttcctgttaggcccgcttgccatttcaaagctggaaaaggattatataaaggtaaatgggtatgtgtgtgtgttggggaggcaagaacagagggaggaggggaaaaacatcaggtagagagacagagcacttgtgcagataaaggagttttcttaattgttgtcttaaaatgatggctatggttgaggtaggaaataagcaacacagagaacatacatgatataatatggtatgcattcgttggggtacatgatgcaagctgctacaacaaccgctaaatctcaagtaatgatttcttgcttcttcctgtgtctttgtttcgtgctgctataacagaacaccaaagaatgagtaatatataataaacagagttttattggtttgtagcctagtggctgggaagtcccagatcaaggtgccagtatcttatgtgggacatcttgttctgtcatcccatagtggaaagcagaagggccaacaaaagtgagagcaagaaaaagagagagcagaagtgagtgagcctactcctgataactggcattagtccacttatgagggcagagccctcttaaggccccacctcccaataccatcacaatggcaattaaatatcagcatgagttttagaggggacaaaccttcaaaccattgcagcctgtcacagaccaagatagtcatggaaaaaaggggactgcttcatgcagtctttcaggaacccaagctcttcctgtcttgcaatgccaccatcttcactatgtggtcccagggttagtgtaaagggggaagagagatgttaaaggttgtgcaggaggtgggaggattctggcagacctggaagtagtatacacaaccttcacttgcatttctttggatagaattcagactcatagcccaaaattaattacaaaagaaactgggaaatgtagtctttctgtatgcccagagggaaaataaattgtttttttgatgaacatatggcattgtctgtgacacatggtagtactttcatcaagctaaaattgacagtgataagggtcctacataacaaacaagtgaggtcttgcccttgttggaacactagctgccttgtttttagcattacttaggagagtttgaatatttgtgtctctctgtggcttaaatgaagaacctttttagggtttcaaattttctgtggaagcttcatttgaagtacatggcataggttcgatacttctttctgttttttaacgtattccatgaaataaagaaaaagaaaaacctgacttcttcaaagtcctaacccctccacatgagtaagggaaaaaatggagggggaatcygatgtgtgctcactttgaagaagatgctttctcccagctctgactgtcagagtggactcagctcattaagtaggccaggcaggygacccattctcctcagccatccgacggtccaaacaggcaaccttcccagttagaggagccctctttttggattaaggttacatagatgcttacattcccagctagaacttctaaaaaagcccccatggcatagaaactcgtatttcaatgttagtattgctgtaggaatacctacatgcccgtatttataaaggaaaactaaatcaccaaaaagttccaacactttatttataatatgcatgttacatatatagtaaagctattttatttttccttaaaratctattttattaagtgcctacagacaatatattaagaaggagacttaagctcaaaatgtaaaacccacaataaacaactcaagtactgcatttttaaatcctcatattgcayggctagttgtctytaagttttaaatggtagttgctaaagcataccatcaaggatgacttttagcaaaaataacagctggctttgaaattaatttgaaaatgaatataatctgtaacaggtacatatacatgaggtgaagtaattcctggcatccttcaactgatacactatcttcaagtttagggcaaagcatttagtattcaggaaaattacacataagattatattttatgatttttttttccctgggagcatatgaacaagcattgcaaacatgctatacacctgtaagaccaagcattatggtaggtaactagggaatatccacaacactagaaagaaatctgcacaatgaatcaggcagagaacagctggtgaagaaatcagatggagaatgggagtaatctgtggaaggtatttgagtttgctataaacattttgcaagcattgggtgaagaagctaagcctctgggcctcacaaccaaagcccaggcttgccgcaggctacagaaacagttttcagaaagtacccagctccwgacaaasagtgaccatttaaacagtatgtggagaatgttgttaattctgactccagggttgtttttgagtcacccacagggcatcagtctttgtaagtattggccccaggtttctagagagtttgacctcttgggtgccctgtatttccactgttaaaacaagtgcattgctagagaaagaaagggtatttcttttaagtattaagtaagtgctgagcaggaaagagctttttgcctatcccttgaggcacaaaataagagcactgtggtgagtaactgagaacttggccaagaaaataaatctgtttaaggtttggaaaactgggtgcaagtttgctttctttcacctccaaatccactagatttttctatcttcattttcttttggtgctttgtgcttcaatttttttgtggtatgcatagttaamatcctgacgaatgaaaaggaatcctctgtcatacaaacaaaggaagaagctcagtgtacttaggccacagcataaaggaggggcagggagggaaagagaagcataggaaagaaaaacacaaaaacacaaatactggagcaaactcagaccgctgggtcaaatgaaaacccatagtgcaaatggcaaaggatcaaaggtgatagggtgtgttgctggggaaggtgctgcccctgctctgatacattccacagtggagagagtccactggaatcgggcacctgctgctttaagagcagagtctcagagaaggggagagaagccttctatggagtagggagaagagagggagcaaagaggctgctggggtcagaagcaagggacaaacagagctgctgcgttttagaggctgaagtgtcatttccctgctcaccagctccaatctgcttctgatttggggctccctgtctgttctcaagtcaactgaaatgtgaaaagctcttaattccagcgaaaggttagacaaaggaagcttggctctgttactaaccacgaggctcatttctcctccggggcgtgtccaggcctggagcttcgggcctgatcctctccttgtctttgtggccaggatacttgatctgcaactcgtttgcccattctcaggggagtctttaccatccagctctcctttggtcttaagcaaggctggcaaagggaaaaagccacaagaacttaaacttcacaaaagcaacaataacaaaactcccccacaccatggaaaccatccagccacagagaggccagcgtgtctcttggtggggttgctttgatactgccagcacagaagttgcccgtctgtcacagatgggtatcagagtcttgaaaaccaatcctgtcctctagcctaagctctgcaatgacagtggtcaagctgctacttcaaaatccatgcctggattcttatgtggaatgtgccctctgtctacctgcatttctttagagcttaaatccaaacattgcctgttcggtgaaggctctgaaataaaaataaaagakgtaattggaacatgagaggatagaacagtaacagtaaccagcaagcatagctcctatgttcagttttactttgcttgcagaagtgaatatgctcatcagttcatgagtcaagtggggctgccccagggtcagaacctctatccccaacccatgggagggctcctatcagggaaggggagcaagcatgttccagttgggggctatagggcacatggtctttcttgtcctgagggtctgtgaagctagcatttaatattgtcacaacattgaatgatcctctcctttctctccaatagctttgcagttaaggaatgaaaaagagcaggggatggagaaaaggcatctggagagctggcatattggggcttccaaagcaccttcatgttgctctctctgcaaagattttgtttcctcctcctattacygttatattctaaactgtgtctgacttgctacagtaaaaaaaaaaaaaaaaaactcaagaacacaatgttgaattaaaaaaagatacaaaagaatacaaaaatttaccctttacattaatttgaaaaacatacaaaattgtactgtgcattgttatggagatacctttatgcagtaagagctagaaaatgcatgggaaagactgacctcaatatcatcataatggtaaagaccacctccagcggcgccacagttcctgaccttcactgagaacttcccacacaccaggcastgttctcattgctcactaaagcctcctggagaaggaaaaagaagcggtttggaccgcatgactttagcggtttgggggcatgactttagttgtctttgaaatgaatatagtgagatgggagaccagcaggacttatattccgagcaccgatcatgaccctactaatcaaagcaggatgcagcaaagacaccagccgaaaccagcggatagcaacaaaagtgaccctcttgccctcactgctaataagcataaagacagtcccaccagtgccatgacagtttacaaatgccatggcaacaacccagaagtttccttatatggttccaggaactcccccaccccttttctagaaaattctgaataacctactccttaaatagcatataacgaagactgtgtataaatatagctagccagcaatccataaggactgmtgctgctgctgctgctgctgctctgggcagctctgcctatgaaagaaccctgctctggggagcagccactttgccatacactgttgctctaataaacttgccttctttcattgccagctcattcttcagttctttcctgagcaaagtcaagaaccctcctgggctgagccccaattttgggatttgcctgccatcaattgcaaagtggcaaaatgttcacaagttagaaatctgggtggagtgtcagttattttattttcagtattcagcatgttttgaaatatttcatawttattttaataaaaagaaaaacaaaagcagtaacaaaaaaaaggacacaaagaatttttgtaagaaagggcctcttttgtcatgtcactttccatgcatggagtggcatctccttcctcagacctctaaaatgctgtgcagtgtcatggtgggttctcctccctttcctccattcctactccacagatgaccatgtccggccctgtgctttcacccatatcactctgtggaggcctccccagtgtctctctctaggcctgcacccttccctagctccagggcctgcatcacatttccacacagacaccaaaagcatatagaaaactcaattcatrtagcatgtggcaaactcaatccaaaatagaatgctgactttccttcaaaaaccatttctcccccagtattctcccattgcagtaactagcatcatctttagagtaaaaaggacaacaatttgattctttctctgcttccttctttctcccacattccaccaccacgtcatgagcacacccaattggctctacttcaccacacacacattgagtcagaatacatctgtgtccccaactgccaccaccccaggcccagagcctcmtctcaggtctgctctgctgaccacagtcacctcccagtgcttgcctgccttcacccttgggctaccagtttcttctccatgtggcttttcacaatgtaaactccttcactcaagaccttccaagggcttgagtacctagaagttaggagaaagtccttccagcggtttgcagagcacatatcaacagaccattggtcctgccctcccctgtycatgccccgtgcccatactttttgctccctgcactagtcatgaagacccctgaggacctccttgcaatgtctcaatcaggccctagcagaccctgacagcctggcctttactctgattattccctcttcttagatgcctctttctggatatttctgtggctcactcccactcctcactgaggtctctgctcaaatctcatctattcagagaaacttccctgatcactccatctaacagaacaggcctgccttgattatttctccttggctggattcatgtttctaaggtggcgccaggcctatagtaggcactcaacacacatttgtcaaaacagtgaatgataattattgaccagctcattgcagccattcacacatatgttgattcattgctaccagcaaaagtcctcagaggacagcacagaagacagtaactcggagagtgtgcccagcccctccatggggttgattctgagactagaattcaaatccacttatttttactctaatctttcccctgtaccaccttgcatctctcaaaggaggaaagtaagaaaaagcaacattcaactgtctggtaaatgctgctgaagattgtaataatcacatttacacaatttgatcttcacaaacaccctgagaagtaatgtcgtctcaattttggagatgagaaagctgaaccttctaagaggttaagtatttagcttaagatcatcatttttaataagaaacagaatgtaccccaggcctgcctcatgccacggcctgtgctttcttaatgacattcatcctgcctaaaagttgcattttagattcccgtaaaaagcctgtgtcctatcaacagtgtaggctcacccaatgtttgctgtctggtgatgattccaactctgtcttcttccctctcctgcccccctccctctactgctgggactgttccccagcactttcaccttctcctcattgcttacrcctgctgtggcctcagaggagcaatagccttcatgggccacccagaagttggatataagaaaacaggttaggttggagagagtgagagggagaacagccagtgctggaagacaggcagtgcccaactttcaaatgggtttgtttgctagaatttctttggagggctgtcatacgaaacttcaaacacatttccccatagaaacaatattatcaatgatggatagggtcttgcagtcatccttgaagccctatataatgcagatgtttaaccaagatgctactaaatactcccagaattattgaatctcattagcaagtcagcatcagtcacatggattctgtgggaaaatataaccttgagttccgactgtgaacactaagaacacttctgtttacatgttacacctctagatcctatctctgtgtgatactcttcttactattcaccccaaccccagcctgaattcagcagggctggctataggcctgtagtgtgatgaaggctaccaggcatattaaggaggaagagagtacaggctcacacactggcaggacagcctagagggggctccagggactcccagaggaggagtcttctggcaggacaatagcctatgtttagaacacttatatagtagtaactccagtttcagggcaacagcacatgttggggggtcttgggtgttgtggtacagtaacttaagtgtgcaggggaatgaaagaaagtgagcagtatggagcctgtctccattcacaaggggccgtgcatgcaaatgtgtggctgtccctgtgtgcgtccgggtatctctggagagcactcatgagataggtggtgacacagagtcctgaaaagtaacccagagcaggcatccaacagttctggttcttgctccgcttccttatttgggggattctaggcaacrtgaaacctctcagggccttattttcctttaatgttaagtgggaaaaataattatcctccatcctacagggtcattgtgagtatcatctaatatcatattgttgtgaaaacactgtgtcccatttaatgttgtggtagtattaatattataccaagaattacgtaataggacacatgttctcccaaactttatattttttagtgttctgcaccaaacagttaagagaaggatagctataatggttcatacatccactctgggttttctgtttggttggttttttgttttccagggttttttttgttttttttttttttyccggatgtgagcactcctagccacaaagaattagctagagaggaagatttcaggccagatatacctattgcttcaggccttctttgtttcttccactcctactttttttttttttgagacagagtctcactctgtcacccaggctggagtgcagtggcccaatcttggctcactgcaagctccgcctcccaggttcacgccattctcttgcctcaccctcccaagtagctgggactacaggcacccgctacyatgcccggctaattttttgtgtttttagtagagacggggtgtcaccatgttaaccaggatggtctcgatctcctgaccttgtgaccagcctgcctcagcctcccaaagtgctgggattacaggcgtgagtcactgtgccgggcctcttccactcctacttctattctgcatgctgccatcccctcggtccatagacctctgctcgggccatcatcccttgacaggtctgcatattttacctctagattttttttttcagcagtccattttttcttggttgtcccactggaaaggaatctgatcagtactgtttttaaacattgcaataatagtcagatagatcccattgtagttgaagattactggaagaaaaaaagaatccaaactccacatgtaggaatgttgatctgagatgggttgttttccaagacccatcttaacaagaaacattaacaacccaaggaagtttccctgcttggaaagttttttyyctttttttctacctgctgaattatttctcccatttgtgatgtaaagttccttacgtggaaagtaaacattgacttaactgactcctgttaaatgactcttttctgtaggagaagccagcctatttagtgccttgccatttcaacatgtgttcatacacttattagttaatttgccagattccctgttttaaagtcccaggctgcattgtatcttttgaaaattgaagtcatgtacacaaaccactttcaagttaggaragacattaaaaataattaggtcctgcaatatttctctagaaccrttcctttcaggatcttggcacgtgctacatcattaatgcatagccacctgctttgggatcaggtgctgcaaattttcctctatttgtttctggactgaatgagtcagtgagagacttggttctaaaacatcccagctggacagtggtgaaggcagcatttagaacagagagttctcctctcccacagcaagttcaaagagttttgtacaagaagtgcatttggtgacggactgtggtaaataccaaactcattaggattcaattaagtaggaccctaccctttattattgtttgaaaatcaatagaaccattagaaattgttttcagcattgttttaacgtgaaatgctagagttgcccactgtggggtgccaatacttcaagtgcatcatcccttctccagggttggtgagttctcttctgtgctgtaaaaacctccctagtcatcttaaacaaaaaatctcagttctgcttttttaactttctgggaaaggtgaagcgtattgcaggagattcaataaaagctgggtgactaggtatgtctttgtgggcaaaatggagaagcatggactggacagctaaatagttgaactgacttgtgaatggttgggtccaaactgtgatgattcttaggctggggggtgggtggggagtagagtttcccaaagacatacgcttggaccccattattaacayttttaatagttacatggagaaagatgttggaggccacgcttttgcatctgatataaaatcagggttaatgatttttccaccagaagtattcaaaagtagactggttataaataggacacacaacgtttcaattagatggagcaatgggccacattaaccagattgcagggttttatttaactaaaaactaattgcaaataaatttattggtggggttactaaaagtcamcttgtgattttagtctgtaaaagtagatgcataatatctagactaaggaaaaagataaacctcctatattctgcgcacctggaacatggcacttaattttggcacaagttatttgactagagatatagataaattggaacccagactggaattcagcagtaagcagccagaatgatgaaagacttatagctatagaacagtttcaaataaaagaaatgtttcttttaacckgcaaaagaatgaagaaaataaaaattatttgccatggctgtttagacatcagtaacaagaaagattcaagcctgtaacaagtgttttgacaggatagtattcggggtcttctccaccctgctcttctaggaggctatggatatgaatccatcgatgtgtcatttgtaaaatggtgtcctttttaaattaaaaaaaaaaattgggactttttagtgttttcattcattatatagattggagctgtccaatgctttattgagatgatagaaatgtctttctttactgtccaatatgatagccgctagccacatgtggctgtcaagccttggaaatgtgctagtccaactgaggaactgaattttagttttatttaagtttaattcaaacacccacatgaggctggtggctctggaccaggacaatgcagttcaagacactgccttcctcttccatttcaccttactgacagcttggaatttggtcttttgtctctttgagattcacctgaaaacataaaagcataagaacaacagaattaaaatctaatttccaaagaactagatgtggactgttttttgtttgttttagattccttccaggtatatcctaaattttatgcccaaattcttcaaatttcttcttacctatgatggctcctacaagcactttcccctatttcttacatgttgaaatattgactacagaaattaagttctgctagtgctctccttctggcaatacctacattccattctatgccaatctccagaaactgttttctgtaaaggatctacataaaacctgatttgtatgacmcagcaggcaatctcccaaggcttacaaacaatttggaagaacgtatttgatggctttattgtatattcttactttgtttcaaagcttttaaaaacataaacatatttatggatttgaagtaaagtttagttttagtttaatgttaagcttcatgaacccattattaagtcctctggttcaggtaaatcacttaacttttctatcccccaattgccagatccatccaattggttaggaaaatatttagtactttccatttggaggaaatcattagtatcttccattttcttttttttctttttttttttttttttggkgagacagggtctcactctgtcacccaggctggaatgcagtggagtgatcatggctcactgcagccttgatttcccaagctcaagcaatcctcccatctcagcagctggagtagctgggactacaggtttatgtcactatgcctactaattttttaattttttttttttagtagagatgaagtctcactgtgttgtccagtctggtctcaaactcctgagctcaaacaatcctctcaactcagcctcctaaaactctggtattacagatgtgagccctgtgctcaggcatatttttcattttcttgaaatgggatgttagatacaaaatgaaaagcattaatcagatgtaaggttttgcttttgtttttgttgtcttttcatagcttttaaaacctttttattttgacatatttgtagatttacatggagttgtaagaaattatctgttcacttgatttgcttcagtggtaacaccttgcgtaactatatcagacaggaaactgtcagtgatacagttgactgaccatatgcagattttaccagttttatgygactcattgtgtggtgagcrtgtgtgtttagtactatggaattttatcatacaygtagatccttgtgaatatacccrtgatcaatgtatagaacrattccatcacaaggatccctcattctgcccttttagagggaccaccacttccctctctccctccttctataattcctgtcaaccactaattgttcttcatctctataattttcttatttcaagaatgttgtataaattgatttatactgcacgtaacttctttattttggcttttttcacttagcataatttccttgagattcatccaagttgttgcttgtgtcaatagttcattcctttcattgctggatagtattctttgatatagaatacaacacctttgtttaactgttcacctactgaaagatatttgtttccagattttgcattacatatgaacattcatgagcagatttctgagtaaattcaagtttttatttctcggggatacatgtttaggtgtacagttgctatatcgtatagtcaatgcctgtatatttttgaaaggaattgtcgtactcttttccagagtgactagaaaaattttatatccccaacagcaatgtatgagtgatccaatttctctgcatcatcatcagcatatggtgctatcaatattccttattttagtcattctgtagatgtgtttcaacagctaattgtgatttttattataattcctgaatggctratattgaacgtctttatatatgcttttagccacctccatattatctcagtgaaatgtctgttcatgttttttgctcattttctaactggcttttaaaaatttttactcgagttttgagaaatatataaattctaggtactagttctttgttagctatgtggtctgcaaatattttcttcaaatttgtagcttgtctcttcatctccttaacatgatctttcacagaacaaatagtttccattctgatgaggtccaatttatcaattttcattttagattttgcttttggtatcaagtctaagaattcttcacctagtcttagataaagatttttctcctatgtttttattctaagcattttacacttttaattctgtgaccattttgagttattttattattattattatttttgagacagagttttgctctttcacccaggctggagtgcaatggcacaatctcagcttactgcaacctctgcctcctggttgagcgattgaacccaggttgcctcctgggttcaagcgattctcatgcctcctcctcccgagtagctgaaattacaggcacccaccaccatgcctggctaatttttgtatttttagtaaaggtggggtttcaccatgttggccaggctggtcccgacctcctgacctcaggagatccacccgccttggcctcccraagtgctgggattacaagcgtgagccaccaggcctggcctattttgagttaattttttatgggatatgaaaattaggatgaggtctgttgcctatggatggtcagtcgctctagcaccatttgctgaaaaaactatctttcctctatttaatcgcctttgcacctctgctaaacatcaactggatatgttttgtgagtctatttctggactctctatttctgttccattgactgagatttctatcgctccactggtactacatggtcttgatgattgtaactgtataataatagttaaaatagaatagaatgaatcttcctactttaccccttttttcaaaattattttagctattacaaatcctatgtcttttcagataaaatttagaataggcttatctgtgtttacaggagaaaacaacagttctttcagggattttgataggcattacatccaacatgtgtatcaatttgaggagaattgacatctttaatatgttgtattttcaaatttatgaacacagtatgtctctccatttacttaggtcttctatgatttcttttatcagcattttgtaatgttcagcatacttaaaagctttgttaattttatacctatttcattttgtttggagtaattggaaggagtgttgtgtttttaatttcagtttccacattttccttattactacatagaaatgtgattgctttttgcgtcttttatcttgtatcctaaggccttcattacatctagcgttttgtttgtttgctttatagattactgaagatttcctacatagacaaccatgctatctgcaaataaggacaattttatttcttcctttccaaactatatgccctttatttctttttattgccttattactgggctagaacttacagtactttgttgaataagagcgatgaaaggggacatccttgccttgtttctaatcttaaagtatatagtcttttatcattaagtatgaaggtagctattgggttttgtaaatgctttttagttttttatgaagttgaagaagtgccctctattcttcctttggtgagagttttttttttttttttcacatgtaggtgttgtattacatctaataccttttctgcatcaattgatatgatcacatgatttttctcctttagcctgttcatatggtgaattgcattgattgattttcaaatattaaaccaacttggcattactggaataaattctacttgttcatggtgaatacttcttttttatacattactggattttatttgccatattgagatttttagacataagattatgagatatgttgacccctagttttcttttgatgtactgtctgtctagttttgagaccatatttttattttttagagacaggatcttgctctgttgctcaggctggagtgyactggcacaatcatagctcactgcagcttcaaactcctgggttcaactaatcttcccaccttagcctcccaagtagctgacactgtaagcatgtatcaccctgcccagctaatttttattggttttgagatcataaaatgagttgggaaatattcctccctcttctatattctggaagtgattgtgtaaattcttttttaaatgtttggtataattctacagtgaaaccatagaaacctagaaatttcttttttagaaaattttaaattatgaattcagtatcattaatgattatagaactgttcaacttacctattttaatattttttgagttttggtagtcagtggttactgagtaaaaggtcattttctgagttaaatttttaagagtaaacttttaatgactgcaggatctggagtgatgtcccttgtttcattcttgatatttgtaatttatgttttctctatttttattttgttaaccacaattttgtttccaatgaaacagaacattcaataaacatccaagtgactattctacagtaagtttgactccccagaccagtgatgtgccagtgaatgtgcagtaatgcccaccgagtgtgctacaggaaatgctggaagcctcttgggcaaaacccagaagaggagagcatcccaaatctgttttcaaaaaaaaaagaggttttctcattttctgcttcctttatgggtgagagccagcttatcaaagaaaaaacagatgactcagtgccttaggtatttatcaaagtgtgaaactgaggttttccacctcagttttctagcatgccaactcaaaaatgcatattgctgagcctggccttacacatactaaagcggaatgtgctgtgagtagggctcgttatctaaatttgagccactttgtgaactccatgggagtcatcctgcactcctcagannnnnnnnnnnnnnnnnnnnaggaaaaataaataagtaaaaaggaagtactctcatgagaaggttcccacatgacattttgaatctcataaaagaaaaaaaaaagtctaagtaatataacaatgatgagttataaatttaagagtcctccttggattacactggtttaaaagtttttgtaccttgaaattataaaatagtttatgtgaggaaagtgactattttcatatactataaaaggattaggtagttggcagtctctaaaaatagttgttgtaacataaaaaaaaacacccaaatacatgtctgtgttttaaagagacttagcaggagttatttgatatttgtaatttatgttttctctatttttattttgtcagacttagcaggagtttatcaatattattaacttttttttaagaaccagcttttgtttcattgattctattctcctattttcaatttattgatgtttgatcatacatttatcaataccttccttttacttgcttgggtttattttttactttttttccccctagtttcttgaggtagaaacttagatgattgatttgagacgttttgtctccgctgatgtaaacatttagtgctataaattttcctcacagtactgctttaactgtgtcctacaaattttgacatgttatattttcattttcatttagttgattgaatgttttttctttttttttttttgagtcttcctcaacctacgcatcatttagaagtatgttgtttaatttccaagtgtttggaggttatcctgttgtcttgcagttattgatttcttgtctgagaacatattctatgattttgtggtggtcaccctgcaggactgacctccacccaaaacttcatttggatgttgagacttaggattacaagcatataccaagagggtatgaaaggattattattcacataatgagactttctgaggagtgcaggatgactcccatggagttcacaaagtggctcaaatttagataacgagccctactcacagagattccgctttagtatgtgtaaggccaggctcagcaatatgcatttttgagttggcatgctagaaaactgaggtggaaaacctcagtttcacactttgataaatacctaaggcactgagtcatctgttttttctttgataagctggctctcacccataaaggaagcagaaaatgagaaaacctcttttttttttgaaaacagatttgggatgctctcctcttctgggttttgcccaagaggcttccagcatttcctgtagcacactcggtgggcattactgcacattcactggcacatcactggtctggggagtcaaacttactgtagaatagtcacttggatgtttattgaatgttctgtttcattggaaacaaaattgtggttatctttaaaacacagacatgtatttgggtgtttttttttatgttacaacaactatttttagagactgccaactacctaatccttttatagtatatgaaaatagtcactttcctcacataaacyattttataatttcaaggtacaaaaacttttaaaccagtgtaatccaaggaggactcttaaatttataactcatcattgttatattacttagacttttttttttcttttatgagattcaaaatgtcatgtgggaaccttctcatgagagtacttcctttttacttatttatttttcctaataaacaaaataaaattttgctgacacagacaacaaaatgtattaacacaaatgacaaattattcttttattcattcatcaataacttttttacagacaataatttataaatcattatctgagactacatcttcctgttttacagacctttagacttagagacctaagagtatttatatttcaaatttggttctcattaattttgaatatatgatcatctattatagatgacgacaactaaattgatgtttatctttgtgctatcttgttaaagacattcctaaacaaattgttggtttaattatgattacacagggaatgtttcagttactcttaaaaataagcatgctcaaacacagaacaagtacctgttgtagacaaagaattgatttactagttataatccacttgtgtattttactagagtaagttttcttacaggtttgtaagacatctctgacatagtttcatttatttataagaaatgatacatttcatatttttcattacctatgctggattgtgattcaggcaaaattaatgaagtttcaatgtggaaagaaatgtcttcccactcagcatgggctgaggatatcctaaacatttcatagacaatggccatctctacccttagtgtgagaagagagccaattttgtttgttggaaactgtgcagagggccctttggggagagtgaatattactcgtgtatttaattagtacataaaaaataaatgaccatactcagatccacaatgaaactgtgaaaataaaaacatttcagattttcagtactaattagcccttttcaccttgtgtgttaaatacttttaaataattcaaaakatactgggaaagaataaccacagaattaatattaggaacattggagggcattttgtaagcatcagtctaaatagttaataaggagaatatgcagaaggggaagaaacaataaataggaaaatgtttgtgtaccacaacagacacatatcattattattattattatatgaaatttgcaacacccactaccaaagagaaacatgggaaacaaaataagtttattgtacaattgtacaaattacagtctcatagaaataagaaataagacttatgttttccaagtaggaaaacaaataatcatttaaaaaaataacaaaaaatatgttcttccaagaagaaataataagcatttttttaaagtctgacagtgttttcctgactcattttgcatggttcatggagtcttacctattactgtcatactaaaagcttaacatctaaacaaattaaattaaggtaaatttggtatcataccaacacccagatgataaaacctttaagtgaaaagttaaattaccttttgcattcttgtttatttctgaaaatgtagaaactcttcctcttcatttatttgttcatttaacaaatatttattgagcatgttaatttactagactctggacacacaatgcaaagaaaacagataagattcctgccctcacagaacttaaaattgttcttgaacacctgtttttatccaacttataaagtggatctttatactcaaagatttcacacagctgttagaatgtttcatttttggaatattgcagggcctctttcttgtgggtaacatacatgcaagttgcacaattctgtaaagtcaggtgcagtgagaacagacacattgcatttaacattttcttgtctacatgagactattttggttcatgttcagtgaaaatgcctcaccttgcttttagatctgtttgacagaatttgttttttgaggttgtgagcactttgagtttccttgttttagaaacctgaggactgaattcaaagcttggttaaactcaatcagtcccycattcactccctcttgaggaaatacaaagatctctaccattataacatgtacattctagcagagaaagacagataaagaatggtagatgtacatgaaaaggactctggaagaaaggaggtaaactggccwaaggggcgatggaaagtagcagtcagggtggcaggatgaaaaaaagtagaagtgaagctgggcgtggtggctcacgcctgtaatctcagctctttgggaggccgaggcgggcagatcacgaggtcaggagatagagaccatcccggccaacatggtgaaaccccgtctctactaaaaataccaaaattagctgggcatggtggcgcatgcctgtaatcccagctactcgggagggtgaggcaggagaattgcttgaaccaggcagtcagaggttgcaatgagctgagatcacgccactgcactccagcctagcaacagagagagactctgtctcaaaaaaaaaaagttgaagtgagtcagtgtaggcctcactgagcagaaatgtgaaggacgtgagggaatgatgtgagtagattttaggaggaagaatgttcccagcagagaagaatggctggagcaaagktcccaaggaggaacatgcttggtgaacagcaaggaggccagtgtggstggggcagactgagccagagggagcastgcaagagaggaaggcacagggtggcttggtgggaagaggagtggattatgtagaaccccatcgcctattgtgaagagcaagggaaagcctcacagtgttttgagcagaggaatgacatgactrgacttgtttttaaagggtgactccagctgctttgttgagaatacactgaaggaaagcctgcaggcagggagagctggtagtgatatttcccttgacctctttgcaagacttgtgaagrggtggctcatttactcggcccgcagctctaaacccatcacgggaaggggagtactcaggtgagtgggtgcaggaaccagggcaaatcaacactggaaccagccagttgctcctctctggtgggagcaggctttgtacaggaaccacggcagcatccaagcatgttacaatgcttttttagctctgctgtctgggaaggggtgtctgcaactcccggagccccagaaggcatgtgttacaatcagtgctcttttagcattttccatctgcagatggctaagtgtaaaccagctcagtggagggtcagggtgacagccttttacaccctgccctcttggtatccaagtttttgtccagtgtccaggaagaatcaggtcacccaaatgaattgaaggctggtgtatgcagaggattttatttagaggtggaagtggctctcagtgggaaggggagctggaagggggacagagtgggaagataattttctcctgaatgaccgaactcttctcggaagtcccgccatcaagtcacccctctgaagtcaacctgcttttctctgacatctggctgctgcttctcttctcatctctgctgctccactctgctctcctgccagtggagcttggggtttttatgggtacagggttgggggcagggtgggccagggtggttttggaaaaggcaacatttygggtgggaaaacagggatgttaaagttctcattttggaccgcaggtccaggcttgagggtggggccctcgccagggaccgccctcttctacccagtacttccctgcctcctgtctgtatcaataggaagctctcacagaaatccagcaagagatgatggtagctagcattaggctggytgtaaaaagtgattggattttgtatgtgtttagaagccagaatcaatagaatttgctgatggattggatatgacatgtaagagaaagagaagagtcaagatgacttcacttagaaatgtagtgcaaaatgtaccaatctgtaagccttgacctccctttagttctatatttcacatatttctagtggccttgttttctattctaggaatctagtgggttttggtttttggtggtttattttttattttttatttttgtctaacattttcagcacttactgatggaatactcatatggtagatgctgtggaggatacacaatgaacaaaacattaattttgttgtcagcaaagatcacaagagataatgcaattagaaagtgaggtacaacactgaggagaagcagatcaaatgttatagggagtcaaagaagggagatgtttctttggactatgggaaaaggggaaggtccaacattaagttagcctaaacagagctttgagaatattgtagacttgaggattgccaagctgagatgcattccattttggcacatatacccacacagcctcaggtccagcggagagtaagtgcagtttggctggaagaaacagcaggggagaaggattgaacaagttgtcctcatattgcacagtgctttgaaccaaggggatgacagaaaagatcagaagtgtgggtgtgtgtgaaagacattttcagagataggactgtggggctagcaaggtataagtaaggccagggattagagtgctgttattgagaggatggtcatgccaaaattcaaatakgggcatagagagaaaggactttctcctaaaacatttccatctggactgcaaaggcaaggtgaaagggaaaaactaagatcaattgttcgacaaataattaacatattccctttttcttagcagcaggtttggggggcctaattttcttgattctctctttgcttggaatataaccgtcatttgtgtgatcttaaagactctggggaaggaatagaagatggttgatataagactaattcttttactatagtgactaaaacgttcagaaaaaatttattaaattctgaaagactagtrtcatcaagtttacagaaaaacttttcaaagctcatttgaggtaagagccacagataagcacctactatagctctgtttagttgctccttttaaaattgaatcgaaacgtgatctggcttctctgactggaaatttccggttttttccttaatggagcacagaggcagaggaggtgaggagaaggtcactactttgaaggactatggagcttaaaatattctggctatagacttcagctgaaccaattttgttttccatggtgaaatctaaccaaacaaagtcttgggaatgcgcccaaagagcttgtattgaatatttgaattctagaaggcaaagaagaggaagaattgattattttggcaaagagcacgttgtcagcaaggtgtttcttcacccttttgagtattcrtgagtgtctaaaataatgacacgcaaacactagtgttggaaaaaaaaaaacagtcaggagagagcttcttccagtcccacatttttcagagacctcagcggaaggtttgggtagcacactttgaggggagacagcatgtttactaatgaatatgaatagtatttccttatgggccatatatttttccagtaggaaatggataatctactatgacatttcagtgggttggaacaagatagataaatcaaatacaagttgccctgtttctttttcaaatgaaagataaatgccttaatggattagcaatcatgaaatatataagtatttataatacagtactgctttataacaccatctgctaaagaatggtatttatccagccactgatatgagagcagattttcttccacattatgcagggaggaagtacatcccagtgttaacgagcacgcactttgtatttaaccagcctaagttctaatgaaattcttcagttgacaagctgtgtaattttgatacagttacttaaccccactttcttcattgagaaaatggtgtcataatgatcctaccttttaaattcatttagtgcatcaaagaaggtaatatatagaaagcattatgccaagtgcttaacacgtgtaagtactcaataaataatagctagtatcatcattccactggccaaaattggctacacacaaaatgagccatttcaaagtatttggaatgtctggagtgaatgctttttaaaggagtactgaggaactagattaatgagtttctcctctagtccaggcaagtgggtctctacactgaaactgaggcatgtgtcaatcttaataggctagtttgtggtgggataacaaacaattcccaaataacagtgtcttaaaacaacacaaatgtatttcttacactacctgtccatcatgggttgacaggtacccaggctggtggaacagtcaccattctcacacactgccaaagagacagggagaccgacagggtcttaaatcaacaattgagggttctgtcctggagatgacatatacatttcttttctttctttctttttttttttttttttttttttgagatggagtctcactttatcacccatgctggagtgcagtggtgcgatctcagctcactgcaacctccaccttccgggttcaagcgattctcctgctttagcctcctgagtagctggcattataggcgtgcatcaccacgcctggctaatttttgtatttttagtagagacagtgtttcaccatgttggccaggctggtttcaaactcctgacctcatgatctgcccacctcagcctcccaaagtgctgggattacaggcatgagccaccacatccggcccacatttctttcattcacaattcattgggctcacacagttttacccaaccccgaagggacaagggtgtgtaatactgtcatattcctggaaactagtataaaggaaagtaaaaaaaaatctcaggacccccaaactcctttgcaaaagggaaagttaagcctggaggctgagtcgtgcaatgcccttttccaaatgaagctgttactggcattatacattagccagatccccacaaggtaaaaggccttgggcatctatgaaagactgctcccacagatcaatcatgggcaaatcttttgctggcctcccagaaacaagggcgtgccaattataactttaggcctgcaatgtaagtctagctcctaaatctaaagtctgttrgattccacacygatggtgtagattacaagcttatctttccaggtgcagaacaaagataagaggagaccaattatttccacctacccagagaaacttgcataatttacacttcctttacttctttttctcttcaaacattcaccttattacatgtaaaatgtagatttacctggcactaactaaagtctcacaggaatgtaaccatccactctaccttgtacctggccctcttcctacatgctttctctcccccttaaggaaatgtatatatactggacagcctgaaaactcttgggaaaaatagccacagctgtgtctatggctcgtgtttttcctggatgtaccctaaagctrgcttaataaacctccatgattgagactttttcctcagtgcctcatttccgttatctgcagaaactggaaatttggtggataacactgatgactatcaaagggtcattgatgtggttaaaaatagacaacctatagatactggcacttgaggccctccttattaagttaaaaaacaatgagccaaaattgattcaagcagtagtgatatatggcgtttctgaactctgagtgagactggagacatatctatgttggtggtacataccacaggatgccttgagtttctgggacgcctggtcccgtaagcagtgccatggattgagttcttctgttaaaaatatccaaagccacattttttctctatggccttatctcaccattccatgctagttaaatagctttctctgtttttatatcacatctaatgggtttaatgtgttctaagtgtatggctccatttggtgcattggatgctatggctgagaggtgccatataaaaatattgttattgttatgatgatgagttcaagcactggaagggaaattgtrcaataacttagtactggagctatcattattttcagcaaaatgaagtttggcttcttactacactactaagccttgaagattaaatggtatctacagcatgtatcttagcaatgagccaaagaagtccaaagaaaaaatgtttgttataacaaacatttcatatattataaaacagatgttcacttttatgtattcttgatactttaagaagttgatgatacccatgtcagaaattaagaaaaaaatcaaatgaaaaaaatccacacatttagggtattttccatttattaaattttattaattcttatttccattgtgatcagactggccagctatgttaattactttaacccttagtgctgatcaattgccagtgacctgtgaagttgagcaatagtttgtttcattgctgtagaaatgcatcattaggatggaaggtgcgtggagctctggaaaaagggactgtttaggtcccttccctcatgatgatgtgatattatgttcccattacttgaatattcattatggtttcccccatgtttttggctacctctgtttcctgcaagtgtttacattattaagttggtttggtttatagaaatgtagcttgaacctgtatatagctagagtagcttggggtgtttgcatagattggttagatttccttttcaccctagaagaatcatgggaggtttctaaaaggaggtgagacaaaaccaccgggaccgtgttacggagggatctcaaaacacagacggaaaacaccacagagctagcttgagggattctcagggggcgccaggcactaggccctccttgtgctttgactcaggtaactttcgacagaggagatagtgaaggcttcattcctttcagggtgggtggagggaggtattgcagagcatcccctgactcagaggcatgagaaattggcatgtattgacagtgccgtgagtccgggacttcctacaagggtttaggtggcatttgacaaattcatttgaaaacaggaggtaataacaagtatttattgcacaaggaatctagtggactctgatctagaaagatggagaggacatactggtcagaggatggggcctcaagtggctctcttcgcgttctacttctggacccctgagttcagtttcaagctgagatcattctctccttcctttgctctctttctttcaccagaaagcagtgtggtccagtgccaaagagctgggattctgccacaggactgtctgagtgtgaatcatagccctgctcctcaccagctctgtgaccctgagcaagtggcttcccttcggtctctcagtctcccccatttgtaaagtggggatgataatagggccatctggggttatcataaggactgagcaaaatgaatgagtgaagcacacataatagtgtctgtagtaagtgcatgttaaatgagtgaaagaagtcctgtgttttcattgttccttccacttaactagttaaaaggtaaaagggtataaaatgaatttctggtacacgtcctgatgctgttagagacactaagtatgtacttataaagagtgtggcttgggtaatcatccaacctcccgtgcctcttttttattctctgtaggaaggggaaacatacctatctcaaagggttgtaatgaagaataagcaaaataaatatttgaaaagtgctttttatgtaacacgtggttaagaaatggttgattccttccttccttttcccttcactttaaaaaaccttgtccctgacaattaaagatttctacaagttaaaacttttatctttagcctgctctcacaaatctaaaatgcagctaacttgctaatgttctgggaagtctaggtctgaaattagcaggtgatcaaagctcaatgagaggtatctaagttgctaaggtcatcactgtagcagagaagaaaggataacatacattgagtatttactgtgtgcctggtactgttctcagggattcataagaagcaaggtttttaattctcacagctttatatgacactttataccagtgtcatgcccattttacatgtaaagatactgaggcacaggttcagtaagtaaattacccaaggagatggagtcagtaaatggcagagccaggatgtgaacctagacactccagctctagaacccacagtcttaaccgccttgttgtatcacttctcaaaaacaacagctatgaagtcaacagatctatatttgcatctgtcgtgtgcccttgtacacatttcttaacctctctgagctccatgttcctcctttgtgatttaggcattaaatgcatttgtaaatgtaaaaaaaaaatgtttaatgttgttgtgaggatcaaattagataacaaacacatagcatctcatgtcgggtgaggtatgcagtaagcgttcattaaatagtagttttagatgttataatatataatttagaaactgtgacaggatccttccacacctacctctgcattttgtctactgccagctctgtaattctggcttccatgaarttgatcagttcagcctcccaggtatgggcatatgaagcagttgaagcaaaaagcctttgtcattatcctacaccgctctagaaccatcccttagaggaccacaggcagttcacccacagcccttgcttagagacgggcataacctgtaagcatggcttaaagtaaaagtaaaagtaccttaatttatacccatgaagtccatagatatttgtctgttgaaggacaagaatatggactttcttttaaagaaatgcacttatctccaaaattatgagctttagagataattatttatttattttatttgccccttgtggacataaaatgtttttgatgcaatgtattttggtagagaccttagatagtagagaaaaggcacataaacaacttatttttaaaacctcagcatcagagatgttggaataaatacaattgctgtggaaatatgtcattttagaatgaggacatttagatggtaaatgacttctgattttacacatgctggccaaaactcttcctttaatttcagacttgcatagctaaagacccactgacatytctctttggatatttcataggcatctcaaacttggcgtgtccaaaaaaataatccttggcttgtgccaaacttgtccatgcaatccattcaatcttccctatctggtaaatgaacccagaaactcagkattcttctttgatccttttctttttctcctgaactaccctggcccatgtattaatcagtgtgtcctctcattctatcactaggatacctctcaaaaacacatccacttttcttaaaactctaatgtaccattccagtcaaggctgccatcatctcttatgatctacccacaacaacctccaaactcattacattctctgcctagcacaaaagtattccttattgtaagtcctgccactgcttttcttaaagctccagtagcttcccactgaacctagaataagatccactgtcactactatagtctataccctgtgcatactatcccctgccacttcctgcaactttatctagtacctctcttctgttaaattacatgctagccacactagatcatttttttttttcaattccttgaacatcagtcttgttcatgctgcctggaatcttctttcccccactgttcgtattgatagctcagcttccgacttagcttaaggatcatctaatcagcttggcctcctctgcacgtcccatttagaaatgccctttctcccacttcagcccctccccactgtgattgcaatattattccattttcaacttggtttttaataattttataatttttagcaaattttagcaatttatttgcttttgtttgttcattgtttgcctcccacatcagaaagtaaattccagagcattgggtttaataagtgcttattttgaggggaggaccaacagcttttatcagcctttcaaagggtttcaagagctaagaaatgttactaattgatgagtttgatgatgacaataaaattgtgttttgtttattcccacaaccactcagcacaacacttcaaaaaaaaaaaaaagaaagaaagtaaattccagaagagtagggtccaggtctatgttttgtttgctaatatatatgtagatcatacagcccagatcttggcaccgggatagatactccaaaattatatgtagaataaattagtgtatacatacattaattaatatgatatgtattactatgtgtaataatatcacagtatttattaaactttcttttattgttagcaattatttgttcaacaaatttgtattgattgacagagcatgagccatggagtctaatagatagaagctctttttgtttttgagacagagtctcactctrtctcccaggctggagtgcagtggcgcaatcttggctcactgcaacctccgcctcccgggctcaagaaattctcctgcctcagcctcccgagtagctggaactaccagtgcactccaccacaccccgctaattttttgtattttagtagagacaggattttaccatgtcgcccaggctggtctcgaactcctgagctcaggcaatctgcctcccttggcttcctaaagtgctgggattacaggcatgagccaccacacccagcctgatataagctcttgtactggttctatcacttagttggataatcttagacaaattaattaaccctttaaagagcctcagttttctgatctgtaaaatgagagctataataatttcttccttatataaattgaaaagtccaatgaaataatgaaacaaaaagccatagtccacagtcatagcgaatatctaagaaagaatgcttgccattgatattttcattttatagcgaccatgaaaagcattgaaggcccattagcaaacacaattgacattattcctgcccccataggggatacaggcatctaaatagacaatttaatgctaagagctgttgaagagaatgcacaaggttatatgtgctactcaaatgaatgttcttagcatcaaggtcaaatgaattttctttgcagatattccatcaattacttaaaatcttgccatattttggatttgctacctatttggatcttgatttttccatgcactttttttcatagagtatctaattattattttttcttgtatgatgtaacttattattatatttttccaacttttcagttacagaagttacacaattaaggctttttgtcttcttagactttccttttgaaggcctctgtcctccttctccatctctgcttttattggctctccaggtctgagctgtcatcctgggaccttctttccctatgctccttagcaggtccttattgtgtatcaaaatttttttctttctttctttctttctttcctttctttctttctttctttctttctttctttctttctttctttctttctttctttctttctttctttctctttctctctttctttctttctttcttgtccattggcttctatattttactgcagtcatactcaagaaacttatttcagtacacttacttagtctttgagagtttgcaaataacttcatatttgattaatcatttaactggccataccattctaggtttaacagtatgtcccttgagaaagttgaaaggtggacatggatgctcctgtattcttagctacttgggaggctgaggtaggacgatgaggccaggagtttgagaccagcctgggcaacatagccagtccccatctctagatttttttttaaattagcctgctgtggtggtacactcctgaagtcctacctacttttgaagctaaagtgacaagatcccgtgagcccaggagctcgaggccgcagtgagctatgatagtgcctttgcactccagcctggcagacagcacgaaaccctgtgtcttaaaaaaaacaaaaagttgaaaacaagctctacttgtagtttttagtagacactagtgaggagtttggtgcagtctaattttattctttaaaaaaaaaaaaaagactagtttccaccctcctgtcctagtgcttaggtcttgaattgttcacccctcctccatttcyaggaagtttctcagatatttttaatgctgatattctgaaattttatgtgatgtcaagatgtaaatcttttttccatctatactgttggattctcagttgactcttttaatctgaaaaaatgctctcttctctattcctcatattctttgttgaaaaatttctcctcaaaaaaaaaaaagaaaagaaaagaaaagaaaaatttatcctcttctactctttttgcctcttttttcctggggttcttgtctgctttatgagaactcttagcttctttctcacattttttagacaagctatatttttgtccctaaatccttgggagcatcttttactttattttctaaattcctaattttaacaataatactggaaaatgtaagtgctaaatcttgtttaaattgcattttttttttgcatagcattctgttcttgttctgttttgagttatcttcattgtttccacttttaacatcttttatttggttctcatatttctagtcatccctggttgatcaatcttttatagaaaaaagatctggatgcctggcattgatttttctttgttgttgaggatgttttccacttttactggatctactctgaatgagaatgcttggaagtgtgggtcaaggtagtttcactgacagtctttacgacatggattcagagccatagacaggctatgggcccctcaaatgttggagtatcgagggctttgcactggggcacaaaaatccatattaaaaatttttaactttccctttatagctttcttgagcttctttttaaagaaatggttgatgctagctaaatgctagctgcttgtactctacttttacaaagcttgtttaaatgttattgcagatccaaactggacccttgttctatattcagacattcaatccttcttcttagtcctatttctagtccctgttctgtgtctctcataatcactgactttaagatcaaaggctcttgggaggcaaaacagaccaactggcatccgcttgctcttattctccttctacaatattttaggcttcagctttctctatctcttttatccatcaacatgatctcatccatgtgggctgtaaatttgttggaaatatcccattcattagtgatgatcccttccattcttttcattcatatgaagtttttttgtttaatttttatacttttatttcagtggggtttcaggagagtgtgaaggcaatatatatactcaaagccaaaagttaaattataacttgaaattactgtacaatttccctataatttatttaaccagtgcccaacttttggataaatctttctaatatttttcagcatgataactatttgacctttttatctggaagagagaggttgaagataggtgtgcaggacagtacatgaaataatgagaagctgaacacctagtcctaacagaggtaacccttggaagcaatgagcagacagaaaatttaagttaaaccaaagttgggatcccatgcaaagaatttttatgggctgtaggttagaatgccatgtaggaagtcaagagctcttaacagtattgagcagacttaaaaatctatatggatctttgcctatgaaaattgtgaacattcctaattatgtccataggaaaaaatttttaaagtgggatttctccatccaagtatgcgaacacttaaaagtcttgatatttagttgacaaatttttcctccagaaggattgcaccaatttacactcctatcagccaccaacctcttaaaatcaaacaaaattcccacattatttgctaattttataagcgaaattttatcttgttatttttacatacatttcttagattattactaatattgattgatatctatataatattactcagtgcccaaaccacccttcaataggtattgctgacttcgttttagaaatgtgtagactgaggctctgagaccttaagagttctgaagttcacacagcttgtacgtatttaaaaacagatgggaacatagatgttagtttgccaaaaaatttaagaacatgtgacttaccttgctcataattttttagatgaaagatcagattagtcattttctttggaccttcgatataaataattctgtcattttctactttttgaaacaaatgtgttttttgagccctttgttttcttcatgcaaaccttattcagagagggatgtccctgctattattattattgcacagggttgcaagaacagatttcaaatggctcatgggaatttagctttctctgagatcttgacatcactttatttgtcccgytgcagtctatgtcttcatcctagcaagtgtgaaaaagttgccaggtaataccattttaccaacctaaattcttgaagatattttatgcaaaaggttaaatactcttcattctaaactggtagcatagtcttcagtgtagatctggaagctaccagaaaagtatggcatacagtgggaggaacacaagttgaactgccctttagtttggctggacctgaagaattccctcattcgatcactgtgtggaggttaaaagtccaggcgcttagtactgatatgcacaatatggatgaatctcaaaaatattatgttaagtgaaagaagccagacacaaaaagtcacaaattatatatgatgctatttataaggagtagccagaatagataaatccatagggacaaaaagtagattaatggttgcctggatttgggaggaatgaggagaagctgcttgatcactttaaaatggttaattttatgttatgttaagttttatctcaataaattattattattttttaatccaagttgttgaacccaacagacgtgaaattggaatctaactctatcattttctagctgtgtgaatttgggcaagttattttaatttcctaaccttaatcctaactttaacatttaaacctccatttccttcaatgtcctaatctggaaataaagatgactgacagtctacccaaacgacaggaccgttgtgagaactgtatgcaatgttgtattaatacataaagcctttggtgcagtggttgacgcatcacaagttcttaagaaatggtagctgggccagcctgaccaacgtggagaaaccccgtctctactaaaaatacaaaattagccgggcatggtggtgcatgcctgtaatcccagctactggggaggctgaggcaggagaattccttgaatctgggaggcggaggttgtggtgagccaagatcatgccattgcactccagcctgggcaacaagagcaaaattccatctcaaaaaaaaaaaaaaaaaaaaaaaaargaaaagaaatggtagctggactatgatagctattactactactgtcttgcttcaggtaattcaagtggagtaaagtcacatgacattgacttcaggaggcatatattgcytcaagcagttcttcttttgatagacgggttttagattaaaactgtttttaattaatatcaaaatggaacagagttggagagagcaatgagtaagggtcagatgcctaaaccatcacattattgtcattcttgggagagctgtggaccctgcctcccagtgtctgctatagttgatttctctcttactgaaaagggacaaacccttgaaaaggtagtcatgcactggggcatttaaaagaaaatgtgagaagaaaacgatgaatgtcactaagcttcagagaaggaaaaactgtaggcatcagttgaaagttgtccctctgtagtggattagatgtgttacacaaaggtgcagcttgacggtgttaggagacccaagtcctccatctctgtcaacagtggcaagtgcaaaagtacttttattaatggaattctccaaagagctcaaagctcgtttgctgctttactgatgggcattcttttacccactcatgctttggttttatttgttcttcctatgggctcctcaaatcaagagaaagccagaaaaaaaaattgagataggaatatcctgttttatcaagtcttcttgtgactactatatcatttgttctcctgaagcctaatcaaatgagacataaaggacagccaacataaataccacttactgaatgtgataacaaaggtaaaattagttgaaacaacatgttccccagtgtccagcctctccgtggaagagtgagaagtcagaagtggctgctgatgttatggaaagttcatggcctttaatgggagacagttccagcggacacagattttcatccaggccctatgattagctatgtggccttgagcaaaactttaggttttaggggttttcatgtcctcatgggaagaatggggatagtaaaatctatttccaacagttcttaaaagcattgctcaactctgtttagaggaactttgtgcccggcaccccttttccccttacactataagcttcaagagagatgttgtggcagcttttgtaatcatagtaaccaacaagttttgtgcattagcatgggttagggaatgcttacttagtgctttctgtctatgatctcaattaaatccttacctgaagtctgtatagtaaacattatcacatccagattatggtgtgaagttcagcaattcatccaagatggctctgctagagagcataagagcggagagcaaagcctaagtctctctgacagtgaagcctgcacacataacttcttctaccaccaaaagccttgaaccagggtctagctgaggtttcggtgatctgcagtcagttgaactaaaccttggaactacacagtagacattgagtagtcagctgctgggttgctttcacctgggatcaaatttccagcttcagagagacactacgtttctgtggtcactgttctttcctacctagagttcactcagttgagtgccctacctctgagtcttcatgacgggaacaccagcttccaaayaggcccggcacaaattagcttcatccatgcagccccactgcatggtgatgagcgagtcagatgagcactgcacatttggatgaacctgagtcaagaaaagccacatgtgaaaacacgtttatttccaaaacgttgatgcatctggaagggtgtaactggcactcattgatatttttggcattcatggaaaacaccccaggctgcttaggtaattaatttcgtagggttagtcattaacaggcttcctgctttccttctcctttggcaggcccagctgtgagatacagtaagttcaagatgtcagaggccaggccgcccccsctgctcgggcagcacacaacrcacatcctgaaggaggtcctgagataygatgacagggccatcggggagctgctcagcgctggagtggtggaccaacatgaaactcactgacaaaggaaaagggctcttcctcataacctcgatccgaatacactggcaaaggcaacactttgcttggacccttctccccagttctgataccactaaraagaagatttagagtaactccagatttcttacatggcatctccagaatggctctrgtattaatgaatctagtgccttttaaatgtatcccacgttttgttccctaccatcttttttttcagatgatgatttcattatggatttgtgggatttttaaaaataaagwtttaatttttttcctggaaaaatgcactccttattctacttacattaatgtcctaaacgtttgccccttaccccccatgccctcaccagaccccccgccccrtccatacaggcctgaaaaagagcagctctcttgatactttctacttgtacataaaatctgcatttaaatttgtgttagggagtcaaagcaataagcagaatgacagtctctgtgattgattttatacagaataacttaattctgagctcttgaaccctttgttagtctctaatttaaaccatagactttgcggatgtccattataaaactgagctccattctcccctgtgggggtaaatatttgctttatgttgtatttctctggtgattttatgctatgtggcagaaagtcaatattcccagtgcatttagagatgtaggtatctgtctgcacaggtaggtgagaagtggttttacacttggtaccttattttgagccaagtgaaaatgcaacagggtttttaaatgaattaaacaggttcttaaatgactatccaggtgttaaataatttatacatcatgacagataaaagaatgacaggaagacattgctttgtaatctgagcatccactgttgaagactagatcatgccttagcattgagtatttcaatggatataaagtataaaaaacacctgtgtccagtaggtgagaaatgattaggacgtatgttccaggataaattgttgctcaagactgctaagcccaggtatagtctggggaatcagatgacctcaactcctggctgttaggcacatctattttaatgtcattacacaccaaatggtaattgaaagctgaattacagatgttcatctttcaaactgtgatttaaaactcattttcttttcatattcttctttattagaatgatttgagtcattaatctatgctgtaaggcctaagatgtttctagaatgaagaattccaaacaaataggaacttgtcttctcacaaggtcttgtgacacttttccaaagaatgtttactaatttttgaaacagttattgtcttctctgctttgctttttgtggacatcttattctgaagaactcttgctgttattctactagttagaatcacatcatacaagggtaattggatgccttctgcagtacttttcccccattggctaattcacaatgcatactcagagacatttactttaggccaggtagtgaaatatttctttatgcttgtacatttaatatgaaaaatggtaaaagattagatggcagagaattggcaaaaccacatatcttgaaagataggcccgaccatttcttccgctgatctgggtagatatcttgaaatgcaaatttactcacttactgggcagaccctaaatatctggctaaacatacgtaggatgatattgatcatgcaaagaggacagaaaattcctctaaaattttcaaaattcccctaaaattttcaaatccatgtacagctcagtcttcagacatgacacagtcaatattaaaacaaaaagactgtctctagtgaaatcatatatgtaagtgtctaggactccacctacgcaagtcaaaatgatccaggattttgaacctactggtcacccaacagaaagcatttactgtgctctgctgatttagtggaagaaataatttggaatatatttcaagttcagatgaataattagtcctgaaagaaacatcatgcttgctaaaatttctaacaatatgccccagatcaagttatgcttataaacaaatgtgctgttttaattatcggggcctattatcttacacattcctgaaacagagcacactactaatataccatatgctcaagttcagtttgtgtcaaggcctgccttctggcaggtttgtgtctaaggttggcttagaaaattttctgaaactcagtggggtaatcgttacagaattggaagtgtgtccgtaagcaaatgggcttctttttcttgttttttttttttttttattctgaaactttttactgccatgattttctgactaatcaagcatgatattttccagaaagcagtctgatatgctgaatgcttctctagcagaagagaaatgaatattgatcaactttgtgtgactacccaattacttggtgtgagcgtgtgtttgatccatctcctaggggttagaagtataatcatgatttaaggaaacaaagagggggtcaggcacggtggctcatgcctgtaatcccagcactttgggaggctgaggcacctggatcgcttgaagtcagcaatttgagaccagcctggccaacatggtgaaaccccgtctctactaaaaatacaaaaattagccaggcgtggtgggtgcctgccttcccagctacttgggcggctgaggcaggagaatcacttgaacctcctgcaaaggttgcagtgagctgagatagcaccactgcactctagcctgggtgacagagcgagactccatctcaaaacaaagaggattttatacaggctagttcataccaggacattaggctggatagcaccacaaggcagggctttggcatgaagacttcacaactcctgcccttgggaagcttgtaccttctcatatctcacctgagtttgctatttcaccactgactcttttgtgccatgggtttgtcatgttgtattttaaaggctttatagatatgaaactttcaggtcccacgtggctcaatgtttcattcatacgtaggattcatactccagataatggacctaaagagtctgagagtgaaggccaggtccaggctagacagactatgcagatcttcagccccttctcataactgctcaccattgactctcaattggcaaaggagatgagtgggaaaaatgcacaccgttgccctccataccctaaccctgggctattcattttcaaacccattgcccaagattatgatagtctccttgcatttgcttctgttcataggagactccctgatgtagtgagcccttctaattgatggaattcttgaggtacaacgggcctgaaaaaaaacagttgcttatcttgattacagtatgagtgatctttaggaggtaggatgtcaatctcactcctcttcctgcttgatctagtggtactagtactggtgcatgtgtttgataaggaagatgaagagatgcagaaaaaagatgcatatttccatttcaaacagcagttagggaaaattaaaaacccatcacagaggctcttatattgcagtctaaaagttttctcaggcatgaagtacaattgcgtttcttactatcccagtatagcaaaactagggttaaatgtttcatgaattactgctttcatgagatgcttagtttctccatacagacacaccatgccattttctgagcatgaatggccctgaaagttcctttcaacatctcagttgcctgggctctgttgtccagactggagtgcagtggtgcgatctcagctcactgcaacctttgcctcccaggttcaagtgattcttatgcctcaacctcccaagtagctgggactacaggtgtgcaccaccactgcccagctaattttgtattttaagacagggtttcaccatgttggccaggctggtctcgaactcctgacctcaattgatccgcccacctcagcctcccaaagtgctaggattacagacatgagccaccatgcccggaatgaccctgaacttttaaacaaggtgggcagtatgcaggacaggcttatgtggtgggtttaggggagcagaagcaactccactagacatctttaccccaacatccactcaaaaatatgtcttctggtgtcactttaggaggttaaagtattataggcaaatgaatgcaaatacttgcactactacatttattccacacactagggaaaacaagtacaaaaaaggagagatttggaggaatgggaactggaataggcaaatttgattagggggaaagggaaagagagagcacacccaggagctgcagatccaaggacacatttccttggaagactctggaagccacaggcagaatgaacccagcctgacgtgttggtgccgagagggaggggcaggcactagaaagagctcaaacactagccagatatcagaatttactcacctcgatttttcatgtgaagcagctcctttttctcatttattaagaccttagggttaaaagtgcaggacaggaaactctctcctttgcaacatgaacaattgctgcctccccgctcttccattttcacctctttctctctttgtcctgattactcccgttcttacctgtcttttttctcagcctttgaacctcttcccctctctctccttctctggggtaaaaatctttttcctcctgtccttttatcttccaaccccccctcctcctctcttttctcctttcttcatctcctcatcctttctctctctctccacacacagacacgcacacagagttatagatccatgttatacaactgtggataccaaaacctgtgtccgaccttcagaaaaataggactttctcagtctttaggaagataactagtggtaattctcactawgacttcacccccacaagcagtcttgaattaatctctgggtggggtggctctttaataactagctgccacttcttgtcccttgaaacacagggaaagaaatgaaagggtactccaaatgctactctgggctgtggcagagttctcaggctctctggctgtatgtcacatgcacccagttctaagggggaaaacctaaagtaaataaaatagaatgcagagcagagtctagactcttcgttccaggcccagacactttgttctggccccagacgctggagccgaacagcttgggtcttgctgttgtggttacagaggaagttccattagggcaggagcagggagagcatgacagtgtgatcggggactgttctgctccagcgtcaggctgggtcttggactttgcttcttactctttcttagcaaaggaaaatttacttggccttcaggtggcggtgaatagtttgtccctggccattttaatccaatggcctccagaaggatggtgccctcacctctaccttgttaaatagggtgattccattctcatgttccctttgctttcttctcccagcaggctgaaaacactttgccacatcgctccccatgcctcctccctttctctttctttgcagattaaccacatgacagtcctttcaactccagttagtttctttggctcctgaccacatagattgggggaacagtgttttcctgctttgcgtcctgtcactcacaccccttcctctcccctagaactttgcacgagtactcaccataaaacaggagactcagcttcagaagacgcaactgggatactgaaagaaaagaaattaatgtcaaactgtcacaggaaaatacctttctttccacccctcttacctctttgtgaacccactagaatttggatctccatagcatctcttggtatgagatgtggcaacacgcataacacacattcaccctgacggtcctggatttatgtttttagattttacaaaaaacttccagctgttcctgatggaagctttgaaatgtactcctgatgaacattattgtgttctttccttggagagggtcaggaaaattatagcttccattttgggaggacagttaaagaatcactatctctagaggtagaaaaatgaactcccttttcctatctaggattgcctcttcatatagccgaacgtgcttgcaatggcattgacacaggccacagggaaggacagaaatgcagcaactccacaagtgcagtgggagaagtctgagactacagcagactgaagcccccattctcagaaacacgacagagccgaagtagccagtgacttgggctcccacctccaagcccacgtttcccatatgctgagtcccaaacgttttgtctcattctctagctttactttctgcagtctgggaaaactcc

SEQ ID NO: 94580 - DNA, 27544 bp, Homo sapiens
ctgaggggaagactgagctacccacgacctcagcaaggcaggacagtggccaaggggcgggaagccagcgtcagactctgtgggtttgaatcctggtcctgctacctcctagctgtgtgacttgagttcctttatgttgctaatctgttcctcagtttcctgatccatggctggggatggtaacaggatccagctcatggagcagctgggaggatcaaacaagaacaccgcctaacacaatcccatatacgtaatagataatcatcgttgctaattacatgacataaaataataatgctcagactgaattccaaatccccactgctcacttggggttctggttttcaaaaagatcagtcccagctgagaagtttaggggactgcagccttcgcctttgtatttaatgtatagggtgtctgggagcactaccagcatgtcagagtcttgaaatctggcccgtggaaggagccccagggaggtgaagcgaacagccagtctgtgggctgactccgggtccagcagcccctgcagagtcggcatcaggtgttcagcatagaaacgctcatctcccgtggccatcaggtaggaggcgaagagaagtcctcctccccccaggatgatcacagcatcctgggcccgcttctgcaaaaaagagcatattaggggggtcccccaggccaggctgcagcacccttcctgagcccttcacacccaggtacacagagggcataacggcaggtcacatgaaacagacgcccttagccttccgctgacactggtctctacagtcagaggctgtatctatacttctgcctacacaccttcttcaggccctaaaggctgtcctgggactccaggccagaaatttaaagagggacagtactgtcccctagggtgatcgtggtggacactgctactggttacagtgacagggtaatgctaatagatgtggtgggcaggaatccataaagtcagacatccttcttggcttgagactatctgacatgaactgccccatttcctgtgtgacttttgaacattctgacatttgtgtgggtaaaaattatccgttcatattatctaagccaaactatattttaccacataaacacaaactgtctttcctgacctcctggtctcaagcaatcctcccctcctcagcctccccaagtaactgggaccacaggcacatgccaccaagcccagccaattttttgaagagatagagcctctttatgttgcccaggctggtcttgaacccttaggctcaagcagtactcctgctttggcctcccaaagtgctgggattacaggcatgagccaccgtgcccagcctctacatggttttcacatacagtacaaatatcttgtaaattgagggacaactgtacagtttcacatagaacattcccaagaattgttcaccatttcagaaaatctcatcgggaatggtacagtgctttcctggggtgcctgatatgtaacacacctgtgtacctgcatttctaagtagagacttaaacacaactatctcactaggggagtcatagcaatatttacatactgaaatacatgtaattttattattaatataaactacttttacattttctcctttatattccagttagggtattaattatgctggcttttaaaaattgcacatagctggacttggtggctcatgcttgtaatcccggcactttgggaggctgaagtgggaggactgcttgagctcaggagcttgagaccagcctggggaacatagtgagaccccgtctctacaaaatataaaaaattagccaggcatggtggtgcgcctgcggtctcagctacttgggaggcagaagtgggtggatcccttgagcccaggaggtccaggctgcagtgagccgggatgacaccactgcactccacctgggcgacagagtcagactctctcaaaaatgtatacatacaaagacattatacatatattccatttcaaggtaacgggggtgtaaaatataaaacagaagcttcagatcttattggatcaaaagtggttcacaatgcttttctctatcactgccacatgctgagttattcattcattagttcagtcattcatcaaatactgattgagcaaagatgacaaaacagatcttgcccctaccctcatggagagtgtgatcttatgaagcgacagacagaaattaatgatcatgcaaatatgtagtcatagcaactgtgatgaaggataaaaagtataaggtaatggaagtattcaacctaatcttagaggtaaggaaaggcttccttaaggaaatgacttaaagctgatactcaagggataaacgagttgatgggggtctctctgaacctattctggttcaattatttaaaaaaatagttaaccagaaggcagtacggagaggaaaaagtgtaaaggctctctcagtagcagaagagaatgaaaaagggagaaagtttggaacagaggagtgagggaaagtaaggcttaagacgaggcaggagaaaggagcaggagtcttggccaaaataaagatttgggttttgttccctaagccaggaaatgacatgatcagatttgcttttaaggatccttccaaactgctaaagacatgtagatcaagtattcattggctgggcgcggtagcccacgcctgtaatcccaccactttgggaggctgaggcgggaagatcccttgaggccaatagttctagaccagcctgggcaacacagtgagatcccatctctctccatttatttattttaaaaagagactcaggccgagcgcggtggctcacgccagtaatcccagcactttgggaggctcacgaggtgaggagttcgagaccagcctgaccaacatggtgaaactgcagtctctactaaaaataccaaaattagccagtcgtggtggcgcgcgcctgtaatctcagctacgcaggaggccgaggcaggaaaatcggttgaacccgggaggcggaggttgcagtgagccaagatcgcgccactgcactccagcctgggcgacagcgcaagactccgtctcaaataaacatataaaaagaaagtcaaggttattcattgcctcccttggagactgtactcccccccaccatgtcaatcaacaaatatctgaacacctattttttttttttttttttttttttttgagacggagtctcgctctgtcgcccaggccggactgcggactgcagtggcgcaatctcggctcactgcaagctccgcttcccgggttcacgccattctcctgcctcagcctcccgagtagctgggactacaggcgcccgccaccgcgcccggctaattttttgtatttttagtagagacggggtttcaccttgttagccaggatggtctcgatctcctgacctcatgatccacccgcctcggcctcccaaagtgctgggattacaggcgtgagccaccgcgcccggcctctgaacacctattacatacggggatacagctaagaacttttcacagagacccccgcccctaacaaaactttacctaaaagggttgggagcatgtcctactctagtttcattccccgttggatccggcacacaacgctaggcggtcatgtgttcactaagcacccctgtgccaggctcaaaaacatggcccaggcgcagacactcagatcagcacccacccagacctgcaggcgctgtctgcacacgcctgaccgagtccacgtgcaaatgcacacgcacgagcatttgcaggagaccccggaaacacgcacacgtcccaggggggcccacactcccggagccgccttcggtccatgcctcgcccggcctgactctccgttctcgccctccccggtccctggtcccccatccacactgctcactcgcgggactcactttcaggtgtctccacgccatgctccttccgtcattaagcccgcccctgtctcccttccattggaggagatggtggcggcccctcttgtctccgccccttagccgccaacccaccagtcgccgggcagaagggttgagaggacgcctccgcgcagcggggaaggcccggcaccacccccaggttctggttgggtgcacgtgcgcagtagcggcggccacgcctcttccgcccgccctctcccggcctgcccacttggtcgccggctgttggcggagatgagatgccgctgcacggtgtttgtccgtactaccgcagcctcgaatccaagagtccgcgagcatcaaaacactgtgtttcacaccagaaatatttgtacagtttttatcactttaaaaaataaattttactgctgtgttgatataaagatgaatatgttaatatataaactttttcaacttaaaagttgatttttcttaaggttttttaaggaaattaaaacattttcttgaggccgggcatggtggctcacgcctgtagtcccagcactttgggaggctgaggcaggcagatcacttgaggtcaggagttcgagacctggtcaacacccaaaaccccgtgtctactaaaaaataaaataaaatacaaaaattagccgggcgtagtggcaggcgcctgtaatcccaggtactcgggaggctgaggcaggagaatcgcttgaacccagaaggtggaggttgcagtgagccgagatagcaccactgcactccagcctgggcgacaaagcaagactctgtctcaaaaacaaacaaagaaaaataaccaaaaaaaaaaaatttcttgagatcctaaaagtgtcagaggcccttccctggccctgcgcctgttgtgcctcctggagaaagtggccctggttataccttggcattgtggtgcaacagatgtggaggtatttttttaaatactgtttctaatcaagaccctgagtgtgcaggcccgttggagtgtggtttactgcggtgatttttttttttttttttttttttttttgacagagtcttgctctgttgcccaggctgcagtgcagtggcgcgatctcggctcactacaagctccgcctcccgggttcacgccattctcctgcgtcagcctcccgagtagctgggactacaggcgcccgcaaccatgcccggctcattgttttgtattttagagacggggtttcaccgtgttagccaggatggtactgcggtgatttatgacgacctaatgtgtcactttgtagtcctctgaagcaatcgtgccctcacgaagaattttgaaatgtcttacctaatgatgtcctggccgttggagaatagcctctgtagacttaggtgtcaacagcattaatcagatacttattgtttggaggctctacacccatccgtgtcatttttgtccagttgcagtgttcccgccatcagctgaaatagctgggttattgtcgtagcagaaattagagcaaaagaaaggtgtatgaaatatcttgagtcaagccatttttgagcttcatcagttgtatgaagctatcaaattagaacaaattcacagacccagctgagacttagagacagattctactgcaataatttacatgctaggtgtttcagtctacatgcaatagaaatcattgaaaacatttatcaaggtaaaagttatgcttatcaacctgtcttccctttacactttaatggaataagttaattcagcacaccttagtcaacataaatcattgctcatctgggacaaaaaactacttacatgtttatcctcagttctgagcactctctcaccaattttttggtcgtttaaattaaaacttttattgatagagtgcttgtgtcttagataaagcatgtattgaaagaatatatacaaggactttaccctttatgaaaaggattgaaatgaaattacagcattgtgtaagatacctgacttgactttcagagatttcatcaacatcaggtttcatttaaaaatgcttgaaacggtcccagtcagtccagaggctgcggctgtggaggtaccacctgtggagaaactgcaaagatgctgtctgtgtgtgtctccgcggccgtagcccgtgacctcactcggtgggcaggactggtctccagaaatgctttgggttcatctttcattkctgcaaggaacctccatgcctctaacactcatcttcagaagactgggactgctgagatgtcctctattcttaaagagcatgttcttggagmtgatacctctgctgaccttgaagaaactgggcatgtcttaagtattggtgatggtattgtccatgtacatgggctgaggaatgttccaagsagaagaaatggtagagttttyttcaggcttaaaggatatgtccttgaacttcgaaactgacaatgttggcattgtagtgtttgaaaataataaagtaaggaaggaggtatagtgaagaggacaggaaccattgtggacgttccagtcggtgaggagctgttgggtcgtgtagttgatgcccttggtaatgctattgatggaaagggtccaatgggttccaagacccataagtgagtcggtctgaaagcccccagaatcattcctcgaacttcagtgtgggaacccatgccgactggcattaaggctgtggatagcttggtgccaattggtcgtggtcagcatgagctcattattggtgaccgaaggactgggaaaacctcaattgctrttgacacaatcattaaccagaaacatttcaatgatagatctgaagaaaagaagaagctgtactgtatctatgttgctattggtcgaaagagatccactgttgctcagttggtgaagagacttacagatgcagatgccgtgaagtacaccactgtggtgtcagctatggcctcagatgctgccctacttcagtacctggctccttactctgactgttccatgggagagtattttagagacgatggcmaatatactttgrtcatctatgacgacttatccaaacaggctgtcgcttactgtcagatgtctctgttgctccaccgamccccctggtcgtaaggcctgtcctggtgatgtgttttacctatactcccggttgctggagagagcagccaaaatgaatgatgcttttggtggtggctccttgactgctttgctagtcatagaaacacaggccgatgatgtgtctgcttacattccaacraatgtcatttccatcactgacagacagatcttggaaacagaattgttctacaaagatatccgctctgccattaacattgggtctgtctgtgtcttgtgttggatctgctgcccaaaccaggactatgaagcaggcggcaggtaccatgaagctggaattggctcaggatcgtgaggttgctgcttttgcccagtttggttctgacctcaatgctcccactcaacaactattgagtcgcggtgtgcgtctaactgagttgctgaagcaaggacagtatcctcccatggttactgaacaacaagtggctgttatctgtgcgggtgtaagggggtatcttgataaactggagcccagcaagattacaaagtttgagaatgctttcttgtctcatgttgtcagccagcgctaagccctgttgggcactatcagggctgatggaaagatctcagaagactcagatgcaaagctgatggagttgtaacaaatttcttggctggatttgaagcttaaactcctatggattcacatcaaatatcagttcagttttgtcactgtttgttctagtaaattagtttcatttgtaaaagagttactctcatattccttatgtacaaaaatcacataaaaaagtttccataatgcattaaaaaaaaaaaaagaggagagttccggggaccaggcaaccgccacagttgaacgctgctgctccacggtggagtcaccgcacccccgccagcatcatggtgttctacttcaccagcagcagcgttaattcatctgcytgcrctatttacatgggaaaggataaatatgaaatagagacagggtttcaccattttggccagaatggtctcaatctcctgacctcgtgatccgcccacctcagcctcccaaagtgctgggattacaggcatgagccaccgcgcccggcccttgagttttatatctctcctactaacccataaatcatcatgaagatctgatgaagcatggctggcctgaatatatctggtttcgtgcggacagactctctttggctcatgtataccttcaattgcataagggagagaatatagaggacrttccaaaggaagtgctgacagactgcgcccaccttgtgaaggccaatagcactcaaggctgcaagaacaacgttaatgtggtaaatactccacggtctaacctgaagaaaacagctgacgtggatgtgaggcagataggctttcacaggcagaaggatgtaaaaattgtgacaatggagaagaaagtaaatgagatcctgaaccgattagaaaaaaccaaagtggagccgggcacgatggctcatgtctgtaatcccagcactttgggaggctgaggagggcggatcacgagttcaggagatcgagaccatcctggctaacacggtgaaaccccgtctctactaaaaatacaaaaaattagycgggcgtggtggcaggcgcctgtagtcccagctactcgggaggctgaggcaggagaatggcgtgaacccgggaggcggagcttgcagtgagctgagattgcgccactgaactcgagcctgggcgacaaagcaacagtctgtctcaaaaaaaaaataataataatcttcatttctgttaagaagaacatgttggtgggtaattatgcgaatgtttccctgtccctgatttcccaattagaaaaaacagcatatgagttttggaaaagagagttccagaagattgttggcttcagtattcacgttccatcgtgtcgtctgggtctgttagtgtagtgaccctcagcgcagcctgtcctggcttttacgtccttgcttcctctgagcaggggcctccatcttagtatcatcatatttaaagaaatcaatggtgttcatcaaggtggggcctgtggcagttgttgcctgggcaccaagtcacccaagtcacctacacaacaacttctgggctcaggagtaatttctcagcactgagggtaaaataggaaggaacgctctgttgatcatttgggagatgtaggttacctgattggtgccttggaatgcagcatgaagcagaagtccatattgcaattatgattttagaaggaactaagcatttcaccagccagccaagtaattattttctttaccttgaaatcatatttgagttgtaaccccagagttcaatttctcattgtaaattcagtaacttactatgtaacattacttctcacttgaacctctcactatctgttttgattccgagcagaagatgtcttttgattgcagtatgtaaggtaacccctgtagaaggagaccaaacaaggagaaagagaacaaagcctgcaggaccagaggcatacagatagacattttactcacacccacagcagcaagaatgacctcctgcagcagatactccacctgtaatagcactttggaactgtgggcaaaaccaaaaggctagtgtttccatttatgtatggggttgaactggaaaattccctgaggcataattcattggccaaattttgagagggtatagaagatgactttagagatgagtggttttgtgtatgtgtctaatgatattcagcctgacgttctgcaattttaaaaattataataaagtatcattttttaatctggaaaaaaagcttgaaacatatgtgtggatgtatcatgcatttatttatgtatgtatatgaagatgtttagaagttgaggctctgtgaactttgaaaacaaaagcatcccacatccagatgattccattgtcacaaactcttgaaagggtggactactctgctcagaaaccttccaaataaactgcaagccctttattctggcatttgaaactctcccattttctggttacagttcctactactgttccaccaagtaccccctacatgtacacacacacacacacacacacacacacacactcaagtatttctttctctttatcaataccttccactttcccacctctgtgtatttattcacatcgactcctctgtcgagatgtccatttcatctgtctaaatattgccatcttaatatgttcattccaaaagctggaagtaatttcttccttatctgaaccttcccagcagcacctaagctgtccctctgggctggcacttttcactgcctatattaattacaattattatgccttttcttccctaattggactttatgaaagggaggatcatactgtatttatctttcatttgattactgcagtgtttttggtgtttttcttttgggtttttttttattgtttttttttttttttgagacagggtcttgctctgtcccccaggctggagtgcagtggtgcaatctcagtttactgcaacctctgccaacctactgccaagtgatcctactgcctcagcctcccgagtagctgggattacaggcacgcgccaccatgcacggctagtttttgtatttttagtagagacggggtttcatcatattggccaggctggtcttgagctcctgacctcaagtgatccgcccacctcggcctcccaaagcactgggattacaggcgtgagccactacgcctggctgattactgcagtgtttttcaaacaggatgtattcttgcagtctgtgttttagagaatttcataattttggtgaccacttctgtactgatttttagagtaacataagcatcatttggactatctggataaccatcttaaccctgaaacctaccaagcagttcagtgcccacatttgtttgagtttatgatcactttttggcaccaagaaagaacgagctgtaatacacgtgatggatatgcaacaggtggagaccaaatgacctgctgtgtgaacaaaggttttttktgtgtgtgtatgtgtgtgtgtgagtcaaataaagaaacgtggtatcagaactgaaccctccccatatcataaaatagcatgcatgccagattcaaaggaacctgtgtagtcgtaggccagagccctgtttatctgccatttagcttggcaaaacttggatctcattgattttcagttttgtttgtatttaatttgtattcattcttccatttaatattgttttgtttttrtgaccgtgtaagagttttaagataaagttcatggaccagggacggtggctcacacctgcagtttgggaggccaaggtgagaggatcgtttgagtccaggagttcaaggctgcactgagctatgatcatgctactgccctccagcctgggtggcatagtgagaccccataaaaaaaaaatagcatttatgcctagttctgtttgcatgtacttaagagacagaatacagtaatttaaatcagtcctgggggtagcagagatgtaggatgaacaagtcgagagatttagtgtacaaactgaagattacaggtaataaaaccatacagtagacaggattcatgctagatgagattttagctgctcttgctacaaaaacaaaaaaaaaagtgggtaactaatgtgwgatgatggatatgtttgttttactatagtaaccttcttaatatctatatgtatcccatgacatcatgctgtgtgccttaaatatacacaatarcatttatttttttaaaaagtcaggccaggtgcagtagctcacgtctgtaatcccagcactttgggaggccgaggtgggtggatcacctaaggttaggagtttgagaccagtctgaccaacatggcaaaactccatctctactaaaaatacaaaattagccaggtgtggtggcacatgcctcaactacttgggaggctgaggcaggagaatygcttgaacccaggaggcagaagttgctgagatgacaccattgcactccaacctgggcagcaagagcaaaactctatctcaaagaaaaaaaaaatcaatcctaggggatctgcaagaataactttctttaaaaaaaaaaaaaaatgtggctgagtgtggtggctcacacctgtaattccagaactttgggaggccgaggtgagcagatggcttgagcccagaagaacaccctgggcaacatagcaagaccctatctcaaaaaaaaaaaaaaattaggtgggcatggtagtgcactcctatagtccccagctactgaggaggctgaggtgggaggttgaggygcagtgagctgagatcatgccactgcactccagcctgaccaacagaatgagaccctgcctcagaaaagaaaaagctacacttattaatttttagcagcactaacttagatgttagatattcatcatcctctacccagtgcagcttagactcagctttataatcgatctctatttgctaaaggcatattcggtaggtagacacagatggtggggccccagataaaaagggccattgttttattgatctctgctatttgttttcagcttgtaggacctgcacctgggtcctcaaaacaaaaccttttgtatccttggtaaattgttcccaattcataaaagaataatactaataagacaagcccgccaatatatatatttaaaggaccaggcagctgctaaacccccacactttttcttgctacaattcagagaaaatgttcttcaaaggaggaagctggctttggttatacatcagaacaagtattattctaggaagtgagctaaacagcccagcaccacatgggcaaaataattgttaccagcttaacagatttcaatgcagctttgaggaagcacagcattactgtcatgtgcagagaggattcctagctcatatttggaacaaggaagttcaagatctcatccgggactatctggaagaaggaaagaagtggtggattgggcaaaatgtaatgccattgaaaaagcatcaagacaacaaatacccaggtaagaccctggggttcagtgtttatgaaggaaacttccttatattttattctgggacagaaaaaaaaaagaaaatcttaatctttctgcttttgtagacagaaaaaccagtcactttacttcattaccatctttcctctgaaatatttccattttgtgcgacagcctttgatttgtctgttagcaaaaatgatgcaatttttcctggaacccatctaaagttaacttacctgacctttcactaaaagaattatgctacgttccaaagacagaaactttgatggtcatttttttcctaataaacatctcttcattattctgatctctaagtttcctaacacaaaactaagaggaagagtatctacctattgtctttcttacaaagtgttttctttttctttttttttttttttgagatggagtctcgctctgtcgcccaggctggagtgcagtggtgccatcttggctcactgcaagctccgcctcccgggttcacgccattctcctgcctcaacctcccgagtagctgggactacaggtggccgccaccacgcccgactaattttttgtatttttagtagagacggggtttcactgtgttagccaggatggtcttgatctcctgacctcgtgatccgcccgcctcggcctccaaaagtgctgggattacaggcgtgagccaccgcgcccggcccttacaaagtgttttcaaagttatgcaccataatcttgaagttttagagacaaatccaagccattattatatcattctcatcatcttcattaacgtgtagataaagtaatactaagccttgtggtaaggaacacatatgaaaaaataaactataatgtrtgggaggaaattctacatttttatctattggaagtcagtcaaatttggctttcatatttacttttaaaaaatgcctggcagggtgggtgtggtggctcacgcctgtaatcctagcactttggaaggtggaggtggatggatcacctgagatcaggagttcgagaccagcctggccaacatggtgaaaccccatctctactaaaaatacaaaaattagctgggcgtggtggcgggtgcctgtaatcccagctacttgggaggctgaggcaggagaattactggaacccaggaggcagagattgcagtgagtgaagatcacaccactgcactccagcttgggtgactgagtgggactgtctcaaaaacaataataaaaaataaacctaaaagcctggctttcgagtatgaggctcatctgcgtctgatctcccctcagcagacgttgcagccaacgggcccccaaagcccctcagctgcacctacctgtccagaaacttcattcggatctcatccaaaggggacaagtgcttactgaaatactatttcatttgccagactggtaagtgataaagctacatgctgccaaagacccaaattttagaaactgattctaaataaggagtgcatgtgagaatattggttaaatagtctgtgagtgttagaccatgggatgatacagggcttttgattttcatgatgctgattagcatgagaaaattatctggagtgacttccttggatccatccccactgggagttggaagagttgtgccttgatgtcctcctcgtgttttgacttgggcagagtgtgggagaaattgtattggtgacaccattttccacatgcacactcataattcagtcagcatytgggcttcagagggaaggatgggaaagagaaggaggagaagagaataaggcagaggaagatgagaagtcgaacggtgagagggctgttatccgaggttcgcctctgcagaagtagatcaggattaagctatgtatgtatgtacgtatgcatttgtgtgtgtgtagttgttgwatttatttatttatttatttatttatttatttatttatttttccaagactgagttttgctcttgttgcccaggctggagtgcaatggcacaatctcggctcaccacaagctccgcctcccgggttccagtgattctcctgcctcagcctccctagtagctgggattacaggcatgtgccaccatgcccggctaattttgtatttttagtagagatggggtttctccatgttggtcaggccagtctcgaactcccaacctcagatgatccgcctgccttggcctcccaaagtgttgggattacaggcatgagccactgcgcccagcctatttatttttttatgtggagacggtggagtggggagtggttgtkggggggggggtcttgttatgttgtccaggctggtctcgaactcctggactcaagcaatcctcccacctcggcctctcaaagtgctaggattacaggaatgagccaccgtgcccggccttggtgatttcttaaaaaaaaaacaactaccatacaactgagcaattgctgggcatttatcgcagaatgagaaaacctgtgctcacgtaaaactatgtatatggatgcttatagcagctttattcataacagaacaaaactggaaacaattcagatgtctgtcaacaggtgaatgattaaaccactgtggtctagccatagcagtcatactgtttccactctcccgggtgactmtttcccactttcctctctctacttaacctccaacaactgggagcctccctcagtctcattcttaggtcaggtgataacctcgctttctaactcaaggagaaaaaaaaaaaaaaaaaaatcaaagcaatttggagtccgtccaaggctcggaccaccaaatctacccacctaccagcacctgtacctgtagagagataatgccttctctcatgctgctacaaaccttcatactcctacccaaagtgaatccctctggttgttgaattggattccatggagtccaattcagtaataaaaagaaacaaactattgatacacacagcaatctccagagaattgtgccaagtgaacaaagccaatctcaaaatgttacgtactctatggtgccatttattgagcattcttgaaatgataacatgatagaaatggagaacagattagtggttgtcggggtctaagaagggcatgggggcaggaaggaagtaggcgtcgctataaaaggacaatgtgggccaggcacagtggctcatgcctgtaatcccagcactttgggaggccaaggcgggtggatcacgaggtaaagagattgagaccatcctggccaacatggtgaaaccccagtctctactaaaaatacaaaaattagccaggcgtggtggtgtgcacctgtagtcccaggtactcaggaggctgaggcaggagaatcgcttgaaccgggaggcggaggttgcagtcagccaagattgcgccactgcactctagcctggtgacagagcaagactccgtctcagaaaaaaaaaaaaaaaaaaaaaaaaaggcgggggaggtgggtcaatgtgagggattcttatagcaattgaaaaaaaattttgacatgactgtatcagcgtccatatcctgttgttacccttgcaagatgttacccttggaaactggataaaggcatctctctgcattttctcttacatcggcatgtgaatatacaattatctcaaaataataagttacattttttaaaaaaaagaaaaatgcactgatgtaagtatacacatcacttacacagtatttttgccaaaaaaaatagcgtaatgcaaattaaaaataaactgagataccctttcccacctatcagattggcataaatccacaaacttaacaacactttccgttggcaaggccataagaaaataggtactctcataagttgctagtgagaatgcagtaagatataatctgtatatatttataaataaaggggaattcagcaatatctagcaaaattacatatacatctacccttgacccagtgtccactgctaggaatctatcccaaagtcaaaccagcaaaagtacaaaaagatgcacacgtaaggctattcattgtagctctctgtgatagaaaaaagtaggaataatccacatgcccatcaagagggaactggttgtaaaaagcaaataacaacaatctccatgtactgcagtggggttatctctatgatgtatttttttagtggaaaataaaggtacagaacatatatatttgcctgtatacatacacgtacgtataaatataacagaaggagaaacaaaaactaatgaaaatggttacctatgagggagagagaaaatagggcagaaaggatgaagatggaaatgagacctttyraaatgtacctggttttatagtttggcattggaactctttaaatgttttccataattattgctatggtttgaatgtgccccttccaaaacaggtgttgccaatgtgatcgcattaagacgtggggctttaagaggtgggttggcctacagggctcctcccttgtgaatgggattaggggcccttataaaaggacttggcagagggagggcttctcttgccttttcaccttacgakgttgcagccttcccccaactccaagtgccagtgccttcttcttggacgtccagcctccagmactgtgagcattagatttctgttctttataaattaccctgtttgtggtagtctgttatagcagtgcaaaacagactamagcaattataaaacaaatttaagtcaactgtttttttttcttgagatggagttttactcttgttgcccaggctggagtgtaatggcgtgatcttggctcactgcaacctccacctcctgggttcaagtgattctcctgcctcagcctcccaagtagctgggattataggcactcggctaatttttgtatttttagtagagacggcggtttcaccatcctggccaggctggtctcgaactcctgacctcaggtgatacagtctcctcggcctccctaagtgcggggattacaggcatgagccaccacacccagcctgtyaacattgtaaaaagcaatccctaaatgtagggaaaaagaggggaggagaagaattggagctgataagtttggacaatttttaaggtaattttgctcaagagcaggaaacagctggggcaatagttcatgaggccaatataagttgctgggttttttttaaggcagaagaaatagcatgcaggaatgatgtacttaatctgagctaccaaacaactagagggattcactttgggtaggagtaggaagatttgtagcagcatgagagaaggcattgtctcgctacaggtacaggtgctggtagacagctagatttgatggtcagagtcatggaaggactctaaattgctttgatattccccttgagttagaaagcaaggttatcacctgacctaagaatgagactgagggaggctcccaggtgttggaggttgagtagagagagggaagtgggagtcacctgggagagtggaaacagtatgactgccaggcagtatgaaggcaggctgctcgagcttcacgatagcgaatttaagctgagccatagtcatcatggttatatgattttctctagccatgtccaattgtgtgtgtgagaaactcttgctcgtgtatgcaaggaggcatgttcaagaatgttattgccagacgggcgtggtggctcacacctgtaatcctagcactttgggaggccaaggcgggcacattacctgaggtcaggagttcaagaccagcctggccaacatggtgaaacctcgtttctactaaaaataaaaaattaggcgtggtggcacgtgcctgtaatcccagctactcgggaggctgaggcaggagaatcacttgaacccagaaggtgcagattgcagtgagcccagatcgtgccattgcattccagcctgggcaacagagcaaaaattgtctcaaaaaaaagaatgttatcatccaccttctgaactcttttatctctaccaatgagagttacagaactcaaaggagaatattaygcttagtatggaattttccatttatgctggaggttgcaaacttttttggtgaaaaatcagaccctggcgatgaccttaagcagtaggatgtaaataactccacatgcctagtgttccaataatggaacactaggcataaatgggttaatgaacttctcagtgttgacccaactagtgaacttaatttgaaatgtgggacaccataatgtgagcagagcaaaagggctactgcagaattcttagtgtccttaaaaaactggataggaatttttaatttgtgttttcctgattatcacatacgtgcatgtaatgatggttttatagacttgtagccatagctataacctataaattaacttgtgtgttggctttcaaataggtgactttttggacggagatgcccattatgaaagaaatggaaataattcccatttgtaccagagacacaagaagacaaaaagaggagttgcaatagcaagagacaaaatgcccccaggtaatgcgttactcctctagtaaccttaaaaatccgtggaatcaatttctgctaaaagaatgcacaagactgaattaatgctgaaatgtgttataacatgtgcccaatattcgttgcattctattctgtctgatcttaatatggcagtctttgccttcattttatgtatgtgttttcttgatatgcccttggccgccgtcttttcatatattcccaaataaaagacaaggttttattcccacaaaatttttcatcaacaaagtagtcgtcttaaagttcttgcaaagtctttcaaattatggtgttatcacttgtttatttaattttgaaaaacaagtactatttgggaaggatgcattagcctgaaatgacggcaatcaatatcggtggatgggtggttatagagatcaactgaaagaaagaagtgaaacagatcgatttaaagtggatctcgtgatcactcttcggggtatgacctcacagctgcaaatgttagatgtcctgatcaacaaaccctttaaatatcacttagcaatatagaaggttttatttagagacatkaatatatatwtaaagaacaaatgtaaaatccagcttttctcaatcctttgtaaattgggacttgtgagttgtaggaaaatgtttagtgatagcattaggtggaagtaaagatgacatattttggaaaactgttaaatccaaaagttgttctgatgataattaatgcaatgatgttaaagacacatttgaaatgtttaagctgtgtcccgcaatgtgagtttagtgagagcaatgcttccattattaccttacgtaacatgtggctttaagtgtcatagtaaaactaaattactgaattaaatagacatttgactatttcacctatatcctttaagtttatattgtcaagcttgccccaggaatactttttaaaatctcctcattgggaaaaatgtagactgccttattgtggggcaatttacctaacaagcaatatgcctaatatttatgtacgtagggtcctttaaaaagtttgcgggctggatctcccctcagcagacatttgctcacacttgtaatcctaggtgtggcttgggtgtaatatggtggctcacacctgtaatcccagcaccgtgggaggctgagttggaaggactgcttgaggccaggagttccagtccaacctgggcaacatactgggtctctgtctctacaaaaaacttttaaaaataaaaattaaaaaaattagatgtggtggtccatgcctatagtctcagctactcaggaggctgaggaaggaggatagtttaaatccaggagttagaggctgttagagccataccgcactccaggcakccttttaaaatctctatcagattgcttgtaaaagttttttgtaattcagaaattttctcagtgtgtatctaggttacttttcactaattgtgcttagaacatgatgctacatatacacatcttttttgaatcaagaatatcctacgtatgtatcacttctatttcatttgttgtggttttgtccttaggaaataccagatatctacgtgccatattgctgcttcctaccctctgtgtctttcctgtactctttaaatgaaaaagaatggtttcgtatttatcaccctttttgttgttaggagagcaccttacatttatcttccatatcagggactaatttttccacatctgctcagtattccctcccatgtggattttaatttttctacagtattttttttgtcatcttgaaatcctttgatatcgtttatttttcttttaatgtacctcattctggtgcatgttagcttcaagtggttatccttaggattttgtttggttacctctacctttctccatcatcatggtgggtgtggttgactcggtttcttgccatgtcttctcacaagactttcaggatcatgtgattcctggccaagaaataaaagcaaaatcattttattccccagtggattcggatgaaaccggtgataaaatcaggtacaactccaagaggagacattggagaacaggcatgctgggtctgtaaggaactgcacgttaagatggcacatatacttatgctgtatcaatcaaggtcgtccctgtatcaatcactgtcatcttaccttttcaagctgaaaatgtcccatatgttcaggcattttttactgggaaaatggtttttctctttgtttctgtgttcttcactcataagctgatgcagtaataaataggtgagaccttttatttggggaaataacctttttcgttctattaaggatgttcttattaaggatgtattaacagctttctgaactttttttctggattttgttgttgataattttcagggctgtgctttccttggagtcctctggattccattcccaggtcctcgagtgatcatcataggttcccttttgtcttttccttccttacctttatttttttttggcagggggtgggggtggaatctagctctgttgcccaggctagagtgcagtggcacaatctcggctcactgcaacctctgcctcccaggttcaaacaattgtcctgcctcagcctcccgagtagctgggattatatgcatccgccaccacgcccggctaattattatgtttttagtagagataggggtttcaccacactggccaggctggtctcaaactcctgacctcaagtgatctgcctgcctcagcctcccaaagtgctgggattacagacatgagctaccatgtccggccttggttttctatgtaaaacaatttgcattatttttagccatgaataagaagtcctcaagtaaaacgaatatttctgtcttaggcttttacttgaacttagtctgctttcttttttctataggacctggtcatcttccaaccacatgtcactatcctcttcctgctcatcttgtaagtgcttcccttgacaacatacattgtgaaatgttgatctctttgtcatacctagtagatctggttagagctctatcttgtagagtgttctgaatatagttttctaataaggaaaataaagtacttacgtgcaagaaaaaaattggatttaataggtacttcattcaaggattttttttttttttttttttggtgggagagacagggtctcactttgtcacccaggctggagtgcaatggtgccatccatcttggctcactgcaacctctacctcccgggttcaagtgattctcctgcctcagcctcccaagtagctgggattacaggcctgcgccaccacacccagctaatttttgtatttttagtagagatggagttttgctatgttggccaggctggtctcaaactcctgacctcaagcaattcacctgcctcagcctcccaaactgctgggattacacgtgtgagccaccacctccaaacttggaatttttaaagcctctctttctggctttcatgctgatgtaattatcaagtgtttgttggttgggtatttattccctgcttcattccagaaaggacttgtggcatcttacaaaaatacaatgcaataaaacgtaaacatctaacagaaagggaaaggaaataaaggtagaaactgtccacataatctataaaatttcaccttcaagaaatctctcagcattcttgcccttgtgtcctatgtagaaaccctttagttgatgcctaaacacagatatgcatttgtttgactcaatgctcgctgcaaaaataagtgtttctaacagtataaaagaacagaggctgggcacggtggctcacgcccgtaatcccagccctttgggaggccgaggcgggcggatcacctgaggtcgggagttcgagaccagcctggccaacatggtgaaacctcgtctctactaaaagtataaaaattagccaggcttggtggagcgcctgtaatcccagctacttgggaggctgaggcaggagaatcacttgaacccaggaggcggagtttgcagtgggccaagattgtgccattgcactccagcttgggcgacagagggagactgcatctcaaaaacaaaacaaaacaaaaaaaccctcagtatttcccacgctgttttctgcagagcaacaaccactagcccttgaaattgaaagagataaaaatatgccactctgctatattgatgatttcagttaaaggcatttgaaaaatggcaggtgcaaaaacagcactctgaccttggtaccgtttcttaaaaacaaggtaaaattctcttgtgaaatatgcaacattgttgtcctccaggagaagtcaagacctggagaattctgcacaggacttgttaagataacgcttatcttttaagcctccccacataatttcacttcttcacaactatttgtccaattcagcataggagagatggactctaactgctgcttcaggtcttcattttttttatgagggctcctgtgccacataaaacttggactcaataaatgtgtgtgcttttctcccgtttatcttatgttagtttaattctcaggcccagctggagccctaagagaatggaggtggagttttgccacccctataatatgttgctggaagagaagacaacaaaggcttttgactataggactttgcagtctttcacaggtcccaaatctaaccccttctcaccatggtcaccacgatcaccacatggtccaagtcaccatctcccatctgaactttcacgtttgctggcttggtgcggtggcttatgcctgcagtccccatactttgggaggccaaggtgggtggatcacttgaggccaggatttcgaggccagccaggccaacatggcgaaaccccatctctactaaaaatatgaaaattagccgggtgtgatggcaggtgcccgtaatcccagctactggggagggtgaggcagaagaattccttgaacctgggaggtggaggttgcggtgagccaagatcgcaccgctgaactccagcctgggtgacagaaggagacacgatttcaaaacaaaaaaaaaatttacaaatgaacttttacatttgcctcctactgatctgcttctactgttgcccctttttctgacccttctcaacagaatggttgatcatttaaaacacagaaggatccgttaaaacagaagtgaaatcatgccactgttctgcaaagccctttgtcttcctgcctcattaaaaataacatctgcattcccttcaactgcctgatatatgacactcccctggccctgggatcttattgaatccccctcctgccaccatcactcctctagcttccttggtcttcctcagagctagctggctgtgggcttgggggcctttgcactcctcacataccgtcactaacctatgggcagagctctctctctccctgtattcaactcagcaaaaatgtccctccatcagacacagtgcctcatgcctgtaatctcagcactctgggactccgaggcaggaggatcgcttaagctaggagttcaagaccagcctgggcaacgtagtgaaatcctgtctaaaaaagtgaaaaaaggccgggtgcagtggctcacacctgtaatcccagcactttgggaggccgaggtggcggatcacttgaggtcaggagtttgagaccagcctgggcaacatggtggtgaaaccctgtctctactaaaaatacaaaaattagccgggtgtggtgatgtggtcctgtagtcccagccactcaggaggctgagccaggagaattgcttgaaccgggaagaggaggctgcagtgagctgaggtggcgccactgcactccagcctgggtaacagagcaagactccatctcaaaagtagccaggcatggtggtgtgtgcctgtagtcccagctgcttgggaggctgaggcaggaggattacctgaacccaggaggtcaaggctgcaaggagccatgattgtgccactgtactccagcccgggtgacagagtgacaaccagtctcaagaaatcctctcctcagccgggtgcagtggctcacgcctgtaatcctagcactttgggaggccaaggtgggtggatcacaaggtcaggagatcgagaccatcctggccaacatggtgaaaccccatctctactaaaaatacaaaaattagccgggcatggtggtgcacgcctgtaatcccagctactgaggaggctgaggcaggagaatcacttgaacccaggaggcggaggctgcagtgagccgagatcgtgccactgcactccagcctgggagacagagtgagactctgtctcaaaaaaaaaaaaaaaaaaaaaaaaaaaatcctctccttaccactgaacatcctccatgacatccactttctctctgcttagcattattgttttcttcatagcacgtatttaatacgtgacataatttgtttctctgcctctaccactaacacaggggctcgacaagcgcaggaacttggctccttttgctcattgccatattcagttctctagaacattcttagcaacttataaatgtttaagaatttattgaacgattgacaataaatacactaatataaatcatgaatctcaagtaatatgcagatttcttgaaatttcaaaattctgtttgagcacagaattttttttaacagaaatgcctattagtatctcataggacagagtttcagagtatttggggaaatgctgccttaattataaaatggtaaaatcagattcagtcttttcctttacatatttttatcttttagtccaagaccctgtgtcatcccatcagccagtttccttcagtactaccaagtatcacatcacaggtaacatcagccgcatctgaacccagcagccagcctctccctgtgataacacagctcaccatgcccgtgtctgtcacgcatgctgggcaatctctggcagaaacaacttcaagcccaaaggaagaaggtcatccgaataccttcacctcttatctacaagtgtcattgcagaaggcatctggtcaggtaaacatgggaaattcaagtcacaggtagctttgtgacccccaaaaagtacttggttcacccatttgcctccctgcagaactacacctaagaatgcctgacagaccagcgtatatgccaatccaaaacaaaaactaaacaagtccatggaaacagccaatttgacagcacttatacagcccaacgtttcattaatgacactatttaatgctattctatttaatgcttcagatggggaagaagttctgttcacctaccctgctttttcagcagcagcaaacctctagacaattcctcctactcactgtcccctctctccgccttgtttccttcctcccaaaaacatggacaaggcagccaggctcactgagtcacgcctataatcccagcatttgggaggccaaggtgagaggatcacttgagcccaggagttttagaccagactgggcaacgtagcaagacctttctctactaaagttcaaaaaaattagccaggcacagtggctcacgcctgtaattccagcactttgggaggccgaggtggaggatcacgtaagcccgagtttgagaccagcttaggcaactttatgagaccttttctctattaaacttcaaaaaaaaattagccaggtgtggtggcatgtgcctgtagtcccagctacttgggggtggcggggcaggggctgaggtgggagggttgcttgagcctgggaggtccagactgcagtgagccatgattgtgccactgtatactgtaggctgggcaacagaacaaaactctctctcaaaaaaaggcaaagtccctttgacagtattgactgaagaaaataatcctgcttccctcatgcttttttttccctaaactcaaacgagccctgtttatatgcagttgaacatttccctgctaaaacaatcctgttcactctggatctgcttgcaatggtaatggaaattcggtgttctatttgggggagaaactgacctacaggagtttaaacaaagatttttgtttttgtttttgtttttcttggaaatcctgaagtacagaatatctaaaaggatctataat

SEQ ID NO: 94581 - DNA, 133983 bp, Homo sapiens
cccaggccccgagcaaaggctggtggccaggagcatggggccacacaccccgcctgctcggactggctggggtgcctgaagagggcagcctcggcctgcaccccagcagcctccacttggtctctctctgtctctgctcctccctcagccaggaccttggagcccctcagactctgacactcgctgagagggtgcgaagcgtggaccacagctcccagctctcacctgcccaggccctgcgctgggctttgcaggcctgcggtctttaccatgtggtcacttcacagtgcggttactgtcgccccactttgcaggaggagatggggtctggactcacccagggctgctactctgtgcagacacttccccacctgctggcgttggcctgctcttgtgaccttgactttgacctccaggctgatgaggccaggctcctctgggagtcgctctctactctctgctgacccctgggatgggggatggatgtgttacaggaaacgggtccggatctagacaccaagagggggttcttggatcttgcacaagaaatataattcagggtgagtccgtaaagtgagagcagtttattaggaaaataacggaattaagaatggcttactccatagacagagcagccccaggactgctggtcgcccatttttatggttattcttgatgatatgctaaacaaggggtggattattcatgcctcccttttttagaccatatagggtaacttcctgacgttgccatggcatttgtaaacttgtcatggtgctggtgggagtgtagcagtgaggacggtcagaggtcactcttgtggccatcttgcttttggtgggttttatccagtttcttcactgcaagctgttttatcagtaaggtctttatgacctgtatcttgtgccaacctcctagctcatcctgtgacttagaatgccttacctgtctgggaacgcagcccagtaggtctcagccttttactcagcccctgttcaagacggagtcgctctggttcaaaagcctctgacagatggcaacaatctcaccggactcagcgcctccagactgaactcagtttctcaagaatcatttccaggggtgaggtcttagtgcacccagggtttctaatctctttgctgtgaaagatcttgtttataatttttgcctctgtggaagtctatgtttaaaaaataatgtgtctcctaggaaaaaaagcttttgtttgcattgttttcctattacctattagccaaaaatagttaacgtccatccagtagagattagtatccacatgccggagttcgtgtatttacagcaaagttattatctttcgttttggtaaacttttacatctgagataaatatagagttgtctttgggcttttaagaatgccggagttaccccgagggcccctggctctcccggcatcctcttggagatcagggaaatctgggtgggaacctcctcattttacaaaaaaagaaactaagaccaaatgggtaacgtcgttgtttaaggtcacaggctggcgctgagccttggctctcagctcccctggcagtcgcgcgactcagcgtccagcccyacctgctccagggccctccctactgccagccgctgcctgtcctctcccctgacctgccttgagccagactgggccccctgggccttgggcagggctggatgggcaagttgtccaatgaggccccctcagaactggaaagcctccttctgggtgtggaggtgggcagcaatctgccatttggccctggggtcatctctctggctcagtttgcttatctgtgagcccagatgtcggcaagttcaggctgagaattagagcaaataatgaagagggagcccctttcccagggcctggctcatatgcaccgtggacaacaaataccaaaaaggctgggcacgtggctcacacccggaatctcagcactctgggaggccgaggtgggtggatcacttgacgtcaggagttcgagaccagcctggccaacatggtgaaaccccaccactactaaaaatacaaagattagccgggcgtggtggcaggtgcctgtcatcccagctactctggtggctgaatgaggcagaagaattgctggaacccaggaggcggaggctgcagtgagccaagatcgtgccactgcactccagcctgggcgacagagcaagtctctgtctcaaacaaacaaataaacaaaaaaactacttttcttcttttcattcctagcaaaaatcccctctctggacaaatactactcaaggtcagaatctccctttgcccccagtttttcattgaggaggctgaggatctgagtctctctctttttttttttttttgagatccaatccagtctcactctgttgcccaggcaggagtgcaatggcatgatcttggctcaccacgagtctctttcttaataaccaaccccattaccgggtcaggagaagctgctgcgctgtggctgcatcagggcctagagccgggctgcctgcctctgctgccctgtgtgctggcggataaggtagggaggtttgttatgcctcagtttccttaaaggtaaaatggggtgtcagtcgtctctaccttgtggcctggttttggttaatgaactaatctacacacataacaagggctcaacaaaggttagcgatgacgtttcctgccaatctgagcacctgcacactggaaccctgtaaacagttgagggtgggtggctgacttccagttcccttcaaatgcttctctgagtgtctgcgcacctgcggctctccaggggctcgactcaggtctcagtgatcacagattctaatgaagaaagggtctgtctctgtcatccaggctggagtgcagggggcacgttcatggctcactgcagcctcgactcccacctaagcctcctgagtagctgagactacaggtgtgctggaccacacccagctaattttaattttgttgcccaggctggtctgtcagtgaagttttacaccagtgagacaaacataatatttggggctcatctaaaagctcaaagtgaggctgaaggagccatccaatgtttaaatgaagaggtacatcataattcatttttaataagtatgcagagctgggtggctcatgcctctaatcctggcattttgggaggccaaggtgagaggatcgttgaagccaggagtctgagagtggcctgggtaacagaatgagaccccatctttactaaataaataataaataaataaatagctgggcgtggtggtgcatgcttatagccctagctatttgagaggctgaggtgggaggatcccttcagggatcctgcagtgagctatgatcataccactgcactcctagcctgggtgacggggggacaccctttctctaatagtaataataaattataaaatttataaattataaaatgtgtgcttatgataaatctaaacattactacctaacatacatagaaattttattgtaataaaatttctttacccttgcccattcactatcatatcttcacagagccttctggacttgtatctgcctatgttgttttctgtttttttttttttttttatttgtttgtttgttttgagacagagtctcgctctgtcgcccaggccagagtgcaatggctagatctcagctcactgcaacctctgcctcccgggttcaagcaattcttctgtctcagccttctgagtaactaggattacaagagagcaccagcacgcccagctaatttttgtatcttgttttagcagaggtggagtttcaccatggctggtctggaacccccgacctcaagtgatccacccgccttggcctcccaaagtgctgggattacaggtgtgagccactgcatctggtctttttttttttttttttttttgagatagagtctcactstgtcrcctaggctggagtgcagtggcacaatcttgactcactgcaacctctgcctcccaggttcaagcagttctctgccttagcctcccgagtagctgggattacaggcgcctgcaccacgccaggctaattttttttttgtatttttagtagatacggggtttcaccatcttggccagtctagtcttgaactcctgacctcgtgatccaccagcctcagcctcccaaagtgctgggattacagacaggtgtgagccaccgygcctggccattttttgtttgtttgtttgttttaaataaagcacatcattgtatattcactgctctgcactatttttattttttaatttaacagatcttggagactatatcctatctgtgtacacagaattatcacatcacaactttagaaaatgttttaaattaaaaatgctaaatgaatgttctagagtttatttaaccaagtgtctggttgttctcaggcttcctgtgattataggtatagctgtaagtcagcacatccctgtatccacacatcccgtggtgcctgtgagaatttatctgtggcacagattacccaaaatgacatgaggggtgagaggttttacaaatggtgaattccacgagctttgcaaatcttaactcctttttcaagaataagggaactgtgagtaggacaggtgcacggtactttcattttattttagtctaagtattttctgaaataatttgaggaggcttaaagggaggtgcaagctgggtgcgggggctcatacttgtaatcccagcactttgagaggaggaggtgggagaatacttgagctcaggagttcgagatcagcctgggcaacaccgtgaggccccatttctacaaaaaaaattttttttaaattagccagacatggtggtgtgtgcctgtggtcccagctacttgggaggctgaggtgggaggatcacttgagccctggagttcaaggcttcagcgagctatgattgtaccactgcactccagggtgggcgacagagcaagaccctgtctcaataataataaaaataaaaaaaaaaaaaaaggaaaaaaaggggcacagtagacagtaccagtacttggtattttaaatggttttcaaatgaagcccacccaagctcagcaagtccagccggggcctgaggacctgagcaggcgccaggtcacacaaggtaccgggcgcaggaggcggagcccgcagcgggccctgccctgacagcggcacctgcgcggcctccgcaggttctgggatcggccgctggccaggtgcaagggaggggggacggcagccgctgtcctggggctgagagggctccgcggtctggaggggacggcgtcagcgcccgcgggggttcgcagggcagccccggggcgacccccacccccgccacggtcaagtgtcgatacagtgttgccagccgggtgccaactatgaataagtccaagggcgcggcacgtgggccgaaacgcgatccttccgcggagccgctgcgcgcagggccgtccccaccgagcccgccgcgcggcgacccctgacggcgaccctaagccccggccgaccagggcaggagctcgcgcgcgaaacttccccggcgcccgcaggagaccccggcaggggagatggcggggcccaggcagagctcggaggcccctcccggccccaccccgcgccccggccccctctgcccccgacccggtccgggggagccctcgcgggaccccagcctggtccttcgccgcctccccccgttcagccccgacccccctgatccccgcgccccccgcggtcccggcccgccccctcccccagcccgggccccagccccgtccgttagcggatcccacgcaggctccgcgcccggccccgccggcgccctcggcccacacctctctccgcgcgcgtgtcccgccgtgtcgcccccgtgtcccctccgcgtccccccccgcgccgtccccccgcgtccccccccgcgtccttcccccgtgtccccccagcgtgtccctcggccgccccgcgcgcgccggcggaactgtgggatcgccgcgcacaggaagtggcggcggcggcgcggccgagggcggagggcggagggcggcgggatgggggccgggggcggcgggcgccgcactcgctgaggccccgacgcagggccgggccgggcccagggccgaggagcgcggcggccagagcggggccgcggaggcgacgccggggacgcccgcgcgacgagcaggtggcggcggctgcaggtgagcaccgaggcccccacccgaggtcgggccgcccccctcttcccccacgccccgccgccgcccgaggtcgccctcccgccgccggaggtcgcccctgccccagccgtccgacctcgggccgcccggggccccgcgccgcaatgggccggccgcgctccgcggggcgcggggcctgggaaggcgcggggccgggaggaggtctgggcccgggtcctgtgcgccccccgcaaccccggcctccccggcggcctggtccagcgcgaggccccggccgcttcccgcagcagcctcggtggcgctgggcccagcggggaggcccgggggttcggggcgcccgggaggggcccgggccgggccgagggagggcgagtgggttcccgcggggacgtcccatccctccgtcctggactctgctccgggccccgctcggctcccccgtggacaggacgcgcccgccgcctggtttcggggcgcggcggacccgggaccccccccaggggcctcctcctcgcgcgcccaggccaagggagcagtttcacttttgccgctccgcgcggggagggctgcggggcccggggttggctgtgggttcggcccggagaccggcggcgcgtttgcaccgggcgggtcaggggatggggtcagtccgggggcaagagccgtgggggcgaaaacccactcctggccaccccaggacccttggaacattggtcccaagtacttaggaaaggagggttattagtatttgaaggcagttaaaaatggtgcagtgtttttttttttttttttttaactttgagagaagtttagtgacatggggaaaatgcttttataaatggcttcccagacctttaaaaaaaaaaaagcacaattttaaaagctttgtctaggagaatacttgagcagttgggttctttttcctgggaaacatgatcttagtagaagaaagatgtgggctgttggcctccagacagagggtgatgagcatgcggctcttattaaaaatgaaagccaacgccgagagcctgctgggggctgggaggtggggcgggcggcgggcccaggctgctagagggacccaggatcctgcagcttttaaattgcaggcgcggctgctccgactcgactcgcttaggaattgctgaacttcgtcttctcagtttgaaagcttcagaggggtctcccgaggatgctgagcactctcttgatttggccacttctttgccgccccccctccctctttccaaccaatcctcctcccccacagagttcggcgttagcctgtgcctgttacaactcgcttcttgtatccatttctggttagtcttaagtatcttcttgaggacattgtctaaaaagcagctgcatgccattgacattcagacagaacagggccccttggccttagaaggtgtaggggccttaaatattctgaaggtgacttcatggagtggccgccctctgtggtcaccctacctgtgcgtggccctgtcctggcgtatctgccagggggacgcgctgcagcagcctgaagactgctgggttaaaggcagtgtggccgggtgggaaagtccccaggagtgtggattctagaacaggccttcctggagggagggtgctgccccgccccaggctggggccccagtgcagactccacgctggggagctacaccctgcgcctggacgcgcgtctgtgtgccaggactggggaagcaaactgaaagtaatggctttattttggaaattagaaaaagagcattcaccaaagtaatctgttccgtccctgccgtagacacgtgactgatacacctgcctcccatcccctccgcactttgacctcgtaaacaagtgatctgacacaacagggcttgagttacttgcccgaggttgtgtcacggaacggcagggccgcctttaggcttacatccctggaactcccacctccacagacccgtccgggtgctgaaagtccacggatgctatccctggtcaaatcagaggtaggtgggaaatgttggaattctcctaaacagggaaggggaagatcagaatgtgtgtttgagaagagcctgatttcctggattcctttggaggaggggtgtccttaacttgcccaatcacatttaccctgttcatcaatcttcagccccgcttaggctctcacattgcagaccccacggcagagcccctagtgcttggcactgaagagccagtgcaggcccgttgtcaccatcaaaacccacctctggtaaattcaatggcttctgcttccacgctttgccccccctctctggccttgtcaaaaactcttgtgatgtccctgttataaggtatcgccggtggactggtgtttctagatcgcagcgtgggacgtgattggctacatttgactgtttcctttttaatgacttgtttaatgtgagatctttagctgctccatctcattgcaagatttttgttacagtaaagttggactgagttttctaaagacagttgctcagaaatttcatgggaatttacttttggttaaccgaagagtgtttggggttttaaacgggtcgtttcaagtggtaaagtaacatgaccacgaggcgtctgtccttcctaaaaccacttcatcataatttcaagattgattctaaattaccaatttcaaagcgctgcattttaggcaagtgcattaatcgttcaccttctgacaggctttcatgtagtcatttacaagcggccatgttttgattatctttgtcaagcaaagtgcaggagacaggcagtctcataaccttggggcagtgtctgtgtttagttttggaggcgggaaggccgagttgatggtgaaagttggccattctttctgcagggccaaagtctgtacctggctattagggtgcatggatgctggggttaaattggccacgtcttttcccaagcctaggtagaaggattgcagataggatatgttttaaatgttactggtggtgaattgaaagcaacacaactatccttcagtgtgtgactggcagaaatctacctcctggctagcgtgccctgtgtcacttaagactcaaagtggagctgggtgctcttggtgggacagtgtgcctgcagcccagaggcctgtccccagtgactgggaaggctatgcatcattgttggagatggtctcgattcctttctgaaagcgggtagagaatgaaatgcataataaataacaataatgatgaattataaaatgagcagcagtaacaagctgtacaaggaaatacctgtcctgagatcgattactcacccctgactgtctgccctcctgattctcagccaggtgctgggagctgagtaccggcgctgcagccacgctggctcttgttctcttcctcatgtcctattagctgacctgacactaaatctgtcacctgctttatgacatgcttaccttattattttataagctcctctacatccctgtaaggagagtggtattgccccatcacacagaaactgacagagacactgacatgggaaactgagtggggaagtgtggccagcgtctcagcttgggcaaatctagatttaaacaaaggtccaatagaatccaaagctgttattctttccaccaaaccaccttgatgctcataagatccaatagatgaaaatctacatttctgaaacggagactaagtcattggcttcacatacacgtattcatttaaacacttttcacttgtagaaggccgtacttgctggactgggggctctgaaatctccatctgaattgatagaaacagatacatgctggatatggaatcaagaagaaaattaattcaattgacgtaaattcatctatgctcagctttttacggtacacttggtgggagtaaaatgaagagctgtttattgactcctcatgtgaagaatgtgctgatgattgggttaagcttttcatagattgatttctgatttaggccattgtcctagtctaattggagtgattgattgagtgaacaaatgtgcattttattagggagctacacataatttttgcattgagaaattaaccagttgttatactttgtaaaatatggtgtactagcattgatttttgccaaaatagacagaagtcagattgttagaggaagaccgcgtcagtttgggttatgcacttgtcagtttgggaagcaggtgccacgatgagatgggaagtgcaggaagaaaccctgcagaggatggtgggggagcaccagacctccaggcaggtctgacccccgtgagaggaggcggagggagcagtgctggggaggaggagcctcagacccagccctgagttaggcacagccagcccagtgccaagtggacccccagggtggccctgcgtgagtacccgctttggtcattacccctgaaggggtcccgaaggtgtctcagcaaggaggctgtggctcacctgtctcctcacctgtcaccttgaagcggctytctctggcagagctccatggcggcctcagaaacaaagtttagggacttaaaattttatgcatgtattttagaggtggggcctcactgtgttgcccaggctggactcaaactaytgggctcaagcgatcctcccaccttggcctccccagtaactgggactacaggtgctgccaccacacgtggctaagtttagtgacttttgataatccacaaaaacaaaaggaacagtaaagacaatcccaactgtgactcattatgcggcacgggcgggcgggattttggattagttttaggaagcgaaccacagccgtcctccttggactccctgccgtggctggcagtgagctggtgcagggaggcgaagtgctggtgttctgggaattttcaaatgcactacagcgatcaggacacacgtgtttcagtgcacacaggttattttcagttttctaaatcaggagcttattactatgacttaagttctagaacattggttagaaaatatgtttgtcgtgcagttcagttccagctccaggctagcattgcattttcctggagccccaaagcctttgtaacttttacttcttttctttaaatgttagtgaattattgggtccccgggtggtggttcacacctgtaatgccagcactttgggaggctgaggcacgtggatcacttgaggtcaggagttcgagaccagactggccaacatgatgaaaccccatctctacttaaaaaaaaaaaacaacccaaaaattaaccaggtgtggtggcgcatgcataggtcccagctactcgggacactgaggaaggagaatgccttgaacctgggaggcggaccttgcagtgagctgagatcgtgccactgcactccagcctgggtgacagagccagactccatctcaataaataaacaaataaataaatgttagtgaattattcagtatataatgtttctttttggtgaacaaagctatacaggaaaatcgtaaacacagattctgacagggtccagctaggaaggtaagtgagaatgcagacatgaggcctatgaaggggtggctgtggtgaacatgagtgagagactgaggcctcttccacagggtctggctcacctgaccacccgctactgacccccagctgagcagggccaggtgggtataggaccagagtgactccatctttagtcttccgagagaaaccaggtatctggagttttatatgcaatgtatttatttttaacaaactgcacacgccaaattacaaatgttgccaactgaattcaactggggctactgtttttacagtctctgggctacagtatttatttcttgaaacaaagtaactgaactaattaaatgaggacaaaacacgcatttccaaaatgcaggaagagagggagaaaaatcccaagaatttatgtgcagatgaaaccaaaagaatcattgcctctgtctcagggatggctgctggaaacagcgttctctgatgatgcttagaggaaaggagaagatggtactaagagaataagcatcaattggaaaaacaacgtaactccacgtgtctttaagggcctacgggagaccctcccgtaagatctatgcaaagataaagcctgcaaaaaataatgttttcagaatgcatccatacatttaccagaagcacttctaatcttgacctgtttacatggaatgttctatgtccatgtctctggacacacgtgatccacatacccgtcagcacttggcattgctgttgattttcgcaaagctggtagatgcaaagtgttgtgcagttgtggtcttgatttacgcctgcctgctggatgaaagtgagcatcctgcatatttattggttatgtgtgtccttccctgtgaagttcctgttcatgtgcttcatccatttttcttttgggtgatgtctttttctcacctattccttatatatagtttccatattatatatttccttatagattcaggatgttcatctttggctgtaatgtgtgcattatatatttttcccagttgggttttatcttttcactttttttgttttggtgaaaagatagttttaatgtaatgtataattttatccatccttcttttctaggtagtgccttttgcatgttactttaagttcttcccaattcttgggtcacaaatgtattctgtatttttctgtagaagttgtaaagtttgctttctctgcttaagccctttatctctctagagttgactgtgcaggtcttccgaggtgtcttttgataaagcaccgtggtatttcacattccacctgacactctgtgcttacatttattcccaggtgcccttattattgttcttgcttttgtaaatggtgtttttttttttttttcttttgagacaaaatcttgctctgtcacccaggctggagtgcagtggcaggatctcagtgcactgcaacctctgcctcccgggttcaagtgattttcctgcttcagcctcccgagtagctgagattacaggcatacgccaccatgcctagctaatttttgtatttttagtagagacagggtttcaccatgttggccaggctggtctcgaactcctgacctcaagtgatccacccacctcggcctcccaaagtgttggaattacaggcgtgagccaccgcgcyggccgtaaatggtgttttttatttttattgatttctaagtctttgctggtgttctgtagaaatgcagttgacttttgggtattgatttaacagctgatcaccttgccattgcttaaaatttatttgtagattttggggattttctcagtagacattcacgtcatgtgggagtggtgaagactctgtttcttccttatatctttcgtatttttccttcctgttttgctgcctgggccaggccctcctgagcagggctgtatggaagtgtgacaggccatccttgtcctgttcctgattttagggaaatgcttctaccatgctgccttccggtgtgggtacaaacagtggccgtttagttctgaatcgtcccactctgcctccttgaagcagaggaggcctggtgtgagaaatacaaacaaagtgacccaaaagcaaggagctggagagatggaagatccactgtcatgggtcaccgggaagacgcagaaacaaaaccacagagagctgcggcctccccctgccgggacggcgaaacttaaaagactgtggggacaagtgctggagaagatgtgggggcagacagagcactggtgccagcgtggctgctttgggaatggcaggagctgcagggagatggcatcgagtggcgggtgcacctgccgtgtgcttcccgggggacatgctgaggtgctcatagtggcatgggtgttggagtcagaccccgggagctctctcaatgcctgtctccaaataaaatgaaaaataacctcgtgctacattcgccatggaaaggggaaggaaggagctcctccaggccgcaacatgtgtgcgcctccggaggataacgctgggtggaaggagtgagccgcagaagtgtatgcagcacctgacttcatcaaggtaaagcacgcgcaccagcaaaacccatgtgccctgaggactccggctctagtacctggaaggagaacacagggcttctgcatcctctgcctcccgggttcaagcgattctcctgcctcagcctcccgagtagctgggattacaggcgygcaccaccacgcctggctaatttttgcattttcagtagagacggggtttcaccatgttggccaggctggtctcgaactcctgacctcaggtgatcctcccaccttggccttctaaaatgctgggattacaggcgtgagccactgcgcccagcccaggttgtcagtttcttgatacaaaggtcagaatattttcttaatttttaaatctctactatatctgacagtaaatcacccttttcattcctaaaatggttttacctttcttttctagattcatctcacagaggctcatcttttttattagtgttcacaaagaaccagctattagtcttactcattttctccactgtgtctttgtttccgtatcactaatttctgctcattgtcaggatttccttctacactctttgggtttattctggtgttctctttctaggttactgaattgaaacattttcttttctattttctctaagcttagtttcttaattttcaactttctgtcataagtattttattattattttttgagacagagtctccctctgtcacgcaggctggcgtgatctcggctcactgcaacctccgcctcccggattcaagtggttctcctgcctcagccacctgagtagctgggattataggcgtgtgccaccatgcctggctaactattgtatttttagtagagacagggtttcaccatgttggccaggctggtcttgaactcctgacctcaggcaatccgcccacctcggcctccccgagtgctgggattacaggcatgagccaccatgcccggtcctgtcataagcatttaagtctatgtagctttcctacttagttctgctgtactgtcgtcttgtttattttgatatgtaatattttcattgttcagcattttacaattttattattcttccatgacccatgaatgcatttatgtccaaaggcattgaggattttaggttgtttttattatgatttcagctgaaaagcctcatgggcagagggatatagtctgtatagcactgagtctctggcatttctttaaggattgaattctattatgtatcttctggcttataaagttgyggttaggaagccagctgtcatttcaattgtccttcctgtgtcagtagtaagctttttgtctggctgcttttatagtctctttatttctggtgtttttcaacttgaytgtggtctttctagcatggatttctttttgtttatcctgttttggattcattgtactttctgaagataaagtatcatgtctttcagcaattctggaaaattttcagccattattttgttcaatacagtcattctgcggtatccactagggattggttccagaacccaccatggataccaaaattagtggatgcttaagttcctgatataaaatggtgtcgtatttgtatataacctgtgcacattctcccatatatgtatttttttctttgtttttgagatggagtctcactcagtcgcccaagctggagtgcagtggcacgatcttggctcactgtaacctccgcctcccaggttcgagcaattctccagcctcagcctcctgagtaactggaattacaggcgcccaccaccacgcctggggtaatttttgtatttttagtagagaaggggtttcaccatattggccaggctggttttgaactctgacctcatgatctgccctcctcggcctccctcccgtgtatttttaaatcatctttagattacttatartatctaatacaatgcctatatataacttcattaatgtggatttaatatagtagagagcagcaaattcaagttttgcttttaggaatttttccacccaaatatctttgatccacagttggttgaatccacaaatgtggaacccctagatatggagggtcaaccatacagcatctgccttatgctttgctttctcataccatcctcccagccacttaaactctcgttcatgtttttacctttcagtctttttatgcttcattccaggttatttcttcagctgtcttccaatttagcaactctatcttcatctccatctactgtgctatttaaataggtatacattttttttgagatggagtcttgctctgtygcccaggctggagtgcagtggtgcaatcttggctcactgcaacctccgcctcttgggttcaagtgattctcctgcctcagcctgaagagtagctgggattacaggtgcccaccaccatgcccggctaatttttgtatttctagtagagacggggtttcacccatttggccaggctggtctcaaattcctgacctcaggtgatccacctggcttggcctcgcaaagtgctgggattacaggtgtgagccacygtgcccagcctctgcgctattaatatttaacctgttattgttgttctttttcttttttctttttttttgttggtagagatggggtcttgctatgttgccagggctggtcttgaactcccaaggtcaagtgatcctctcacctcagcctcccaagtgctgggattacaggcaccatgcccagcctaacctgttcttttaattttcatttttttaatagttatatttttcattcctgaaagttctctttgtttttttccaagtttgcctctcctcttgtttggtattcttttccttacacttatttttattttctctttatgtctaaacatacttattttctatactgtaactaataataccaaagtaataccgataataatattaacaaatactaaaatttgaatttcttgagggttggactccgccacttgttctgctacctcttgctccctgatccttgcctgtcacacactttgtgattttggattgtgggctcatttcacatgggctttgtctgtggattcctgcaaggcttgaagggagcaaagcctccctggagaagccctgctcctaccaggagtccaggagtgggactgatctagaattactttaggctgatttcctgggctcacaaaggggatgtctaaagacataattgacttagatggaaagtgatcctacagcagaaatctgagattgaagaaattgctgatggtggaggtggatctacataaatcctgatgagtgaaaccgtaatgaacagtagaaggaatgtcacagattagatataccaaaatgaccaggctgtctggggggaaattttttctcactctaaaactacctggtggaggacaacgtgtaatttccagggtgtttaaagctgggaagcctccccactgagcacgtcattatcaaatgcttttcaccagtttttgttttgttttgttttgttttttgtttgttttatttgtttttttttgagacaaagtctcactctgttgcccaagctggagtgcagtggtacgatcttggcttactgcaacctccgcctccagggctcaagtgattcttgtgcctcagtctcctgagtagctgggactacaggtgcatgccatcacgcccagctaattttttgtattttagcagagatgggatttgaccatgttacccagggtggtcttgaactcctgagctcaggggatccgcttgccttggcctcccgaagtgctgggattacaggtgtgagccaccatgcccagcccaccagttttaacaattgcaaaatgtgactcagattttgtccttataaacttaaccttttgtcgacttccctgtcacccatcccacctgagatgctttctgctgctttagcacaggcagactaggttgccatttcaattggctttcttcagatgacttgtattcggtagctgaagaactgctgtacatatacatggcatatgccagtaatagttaaagggcatgtgaggtttcaaaagtagaaaataaatgtgaaggaaaagactaggaagcacctgaaatggtgctattcttttttttttctttttgagattcactcttgttgcccagtctggagtacaatggtgccatgttggctcaccacaacttccgccccccgggttcaagtgattctcctgcctcagcttcctgagtagccgggattacaggcatgcaccaccatgccctgctatttttttgtatttttaatagagacggggtttctccttgttggtcaggctggccttgaactcccgacctcgggtgatccgcccgccttggctttccaaagtgctgggattacaggcatgagccactgcgcctggctgaaatggtgctattcttgggatctggctgaggatatcttcccagcaggcccattcccatcgttgttctggtatcaccatcttgtcccctctatcttctgtctccactggtgtccaggacagaaacctgggccccatctatgacccccttcctccatctcccacacccccttccccatctatggctccttgaccctcacgattccccttgcccgcctcctgccccaccaccagcctcgctttcgactgagactgcccgtggtcttgcgtggggtcgctccagctcagatcccatcacacttgttccccacagaacaagaggcagcctttcagtggccctgcgctttccccgccactgcttgctcagcccccacccgtgatgacgcctgctgatgtcagtgtcccccgacctcacgctctgcacccccacacccggtcttcaagctgccccactggccacactctgccttggactttagcctgcctggaacacactttctccttttgcctggtgacttcgacctggatgtcactttgccgaggtggcctgctcctatcctgagtgtgagttagatacacacacacacttaatgcacaacggagtcacgtcgtggctctgtctctgcggcctgcccgcttcagttcacattgcactgctgaccttcccatttgccccctcgagggagggctgcactgggctccgctgtgtggacacagccagctgtggccagccctgtcaatggacactgatgccgctccgttttcccagttataaatatgatgggcatccttgtacagttcttctctagtcaatgtcttgaaggtaaagtctacaggtggattgctgagtaaagggtcttgccatttcaaagacgttagacacgttgttgctgatttaccctctgcaaagatcacgtctgtttctactcacaccagtagtatttgaaagaatgacactgttgtagatgtttaatagttttttatttccatttgtctttttttttttttttggacacagagttttactctgttgcccagacgggagtgcagtggtgcaatctcgatcttggctcattgcaacctccacctcccgggttcaagcgattcttgtgcctcagcttctggagtagctgggattgaagttgcacgccaccacacctagctaatttttgtaatttttgtagagatgaggtttcaccatattggccaggctggtctcaaactccttgcctcaagcaacctgcccacctcgggtcctaaagtgctaggattacaggtgtgagccaccacgcttggcttgtcttctagttttgaaattcaacatgccactggctgcagtgtctcatgcctgtaatcccagcactttgggaggctgaggcaggctgatcactcgaggtcaggagttcgagaccagcctgaccaacatagcaaaaccctgtctctactaaaaatacaaaaactagctgggtgtggcagtgcgtgcctgtaatcccagcttctcagaaggctgagacatgaaaattgcctgaacccaggaggtggaggttgcagtgcgctgagattgtgccactgcactccagcctacaacagagtgagactctatctcaaaaaaaaaaaaaaaaaaaaaaaaaatccaacatgctaagactgagtaaagcttcatctcctgtgaataccgtataaagcacaattgatgctgtacagtattttatttcagctgtgaaaagggaccgcgggtgtctggctgtgctggaggaggagtctggtctttctcggtgggaagtgctgggtggccgtgggcttggaggctgggtcgtgggggtgtggcccaggcaagtttccttctctgctctcggctgtgcacctgtctccttgtctgttctccttcagcagtttgtgaggctgcacatgtgaaaatgccttgtcaatggcacagtggcacgtggacctgctgckctgtgtgcgtgtcagggcggccatgttgtgtgtggctgtctgcactctgagtcctggctgggccgcccggggatgatggcacttagggaagagtgactgcaatcaatgagcaccacgttgaaaagcagagcaatctagaagcgacagcctgagctctgcgcctttgtcctgagctggccttaggacctctgggcacctggtactcttgcttcccgtgagctcccgtgtccccgcatcctggcatgtgggcctctccctatgctcctggggtggaactgagaagacgtgggttctgcccgtctctgttactgtttattcttgaagaacagggcagcatgactccggggcggaggacgcagccctgcatcccttgcgtccccaggcatcttaggagcactgtggaaactcagggtgtggacttgagcttcgacatcagttggcactggccttttgcacccatgaaattgatgtttgtctgtggcctcccaggctggtgctgtgttcctggaccagcgtccgatttccctgctgctgaatcacttcatggctcagcacagctgagggcagcaactgttgtcccctagagcccgagatctgggagcggcaggggcagccactgttcctgtggaacacactggagaggcatctgcaggggcggggtggggctcctggtcagcctgttcttgtcttgttctggtgccacttcctcaggtatgcgagggctgcctttgtaagtcactggcaggaagatgggaaaggtgctctgcaggtctctactgccaggagctcagctttgatcttgagtgctggtggctgtccagctttactggcagggattctgatgactcagagacagtagctacccttttcccagtggtattgccactgagtgtgggatgggtcacagctatgtctgtggccttttgcaaatcaacttcaaaatttgcagtcacatttatggtaggacagattcatttcacaatgattttgccaattacccttgttatttccactcacatatatctccccaaagtggaaacaaggacacgtctagagacaggcgctggacgtctcctgctcactggcattaagtgggcaggcggcttattgctgagtgatggtccctggacatttccagtcgactgtgtttgacatggtggtgaattggacacgtgacaggtggcaatatgttaactgttcgtagcaaggaagatttgttttcaggctggtggtttgattacaagttggtcattcttaatgccagggagggggaagagagagaaaatgagagagaatgaatgagaacaaatgtaagaactttttttggaaaaaaagaaaattgagaagaaagtgatagtaattactaattgtttttactttgtcacttattatgtatttatttccagaaagggatcagttttttcttccttccaagttttgtggaagaaaaagaaaactgaaagtatttaataactgtgtcataatttttattttgtgccttgtgattacattgtattttggggagtgggtcaattttttcttaaattaagaaatgctttatatgaaaacacatacataaagtattgaacccctgcacctgcctcaagtggagaaattaaccactataaatactttagaaggcaaagggttggtgaagctgaaaactgctaaaattcttaacatgcagacagaaaagggaggtgggaaggatgtcgccctcagagaacgtgtcatacctcagcctgtgctgtctggggcagacggcatgagccatgcagcccacagaggcatgctggaaacatggctggtgggaactgagatgtgtttgtggtgtgaaatgcacgccgatctcagaggcttgatatgaaagagaatgtaagtgatctcattcatattcttctatattggttacacgtagaaatgataatattttggatatactgggttaaataaaatgtattattaatttttttttttagatggagttttgctctgtcgcccaggctggagtgcaatggcacagtcttggcccactgcaacctctgcctcctgagttcaagccattctcctgtctcagcctcctgagtagctgggattacaggtgcatgccaccacgcccggctaatttttgtatttttaatagagacgggggtttcatcatattggtcaggctggtctcgaactcctgacctcaggtgatccacctgcctcagcctcccaaagtgctgggattacaggcgtgagccaccatgcacggcctattaaaaacatttttttgccaatttctttttacttttgaatgtggcctctagcaatgtaaagttgcacacaggccggcatttgcagctcacgtgtgtttgccatgttggcgtggtccagggtctaagccactgcaggggcagacccttgtcccttgggtgagtccctcatctgggggccctgtgcccagggctgagggagtggtcagtctcagcctgtcattccccgccctgccgggccccacatctcctttgcataatggaggtaatgcaggaaaatgcttagagcagggtctggcaaatgtgttattagtgctctgtgttattaataaagcattgtgatgtctcttgtgcagtatggaaataggtttcgtagattgcactcaggatttcagattgacacgtatttccatctggaaactcttgcacgcgtttgcactgggagatgaagtggtccctgttggctcaagctgcagtgagagggtggtgggggtagactcagtcccttgccggggttggccaaagcaggcttcctcttcctccctcaggtgtgtgttatcggaggtttcattcctggaaaatccagtgtctatgaaaccaacatacatggcgtttgcatcacagttggagtcagatgtgagcccggagggcaggtgtctggtaagacccatgaaggctgcatttcagcccccctctaagaaccagcagtgccttccatcactgcaacagcaaacacccctccataaacatctagggcagcgagcagtcacatcccrtgagactcaactgggtcagagggcccttgcttgggtctcctccagccacgggtgccctggtcttggggggtggtgcccctgggtggggcttaaggaggtagctgcccagctctgcctgttgtctccatcctcaggggcctggggcaactgctggccaccaagcagtgtccagtgtcatagccgctcacttgtcctgtggggccacccatgagatgcaggattcctggtcagccccaacaccaggcccacacctccacgcaggcctggaaggcaggagagagcaagctttcttctcctttatttgtgaattatcagcacctagaaacttaagcgggcaaatgctgaattgctggagactgtgaagctgtgatacacacagagttgctccttcccttcctggctggggtgctggcctggggagcctcctgcccgggtcactccactgcgcatgctctgtggctaccgtgagactgacctgcctcagacacccttctccttgagcctcaagggcctcatggcctggacctccgtgatcagccagaggagcccagagtccatggtgctgtggcctcctgcccactctgggaccccagggagagggcctgtcctcgctgagcctccgacaccggttctgagcctcttggacaacattttctctccagtttacaagtaggagccccttgcataaataagatggggaaaatccctgcagatgacatggccggggccctgggccccgggagccatttctgttccttgtcactcagcctggccagtccttgagtttttccccagagtgtcctcaataaggaatagcaagcctgggtattttcttctggtcagtattccgtttttttgttttgttttgttttttgttttggagatggagtttcgctctgttgcccaggctggagtacagtggtataatctcggctcactgcagcctctgcctcttgggttcaagcgattctcctgcctcaggcacccaagtagctgaggttacaggtgcccactgccacacctggctaatttttgtatttttagtagagatggggttttgccatgttggccaggctggtctcaaacttctgacctcaggcaatccacctgccttggcctcccaaagtgctgggattacaggtgagagccactgtgcctagctaattttgtatttttagtagagagacggggtttctccatgttggtcgggctggtcttgaactcctgagctcaagtaatccgcttgcctcagcctcccaaagtgctgggattacaggtgtgagccaccacgcctggccagtgttctggtctgtttgtgatgggtgtaagaatctgtctctttaaagaggtgcctctggccaggtggttacctctgtcaccagagatgagtcacccagtctcagctcgcaggccttcctggacgttcccagatagtccccagkgctggaggcctgtcgaargtgtagctccaccacgccctttgatctcttcctcctctcctcttccccacccgcttccccctccttccccctccttccccctcctccttccccctcctccttctctcctgctgagggcatttggcctcatagataagcggtttctaatgagctcactggtttccgatggtgggtggggagtgactctgggctttctgtgctgcctcttcgacctcgtccctgttttctgctgtgcggagcatggccctttcctaatccgaaagagccgcacagtcccttccagtgctgcctgtggtctcgcccagctggctgtgctattgcgggacatggggcccagcctcctgctccttcagaggcctggggtgggtgaggctggggtgccctggtgctggatgcaggggtgctgtggtgctgaatgctggggtgccctggtgctggacgttgggtgcccaggcactggatgctggggtggcctggtgctggatgctgggtggcctggtgctgggtggcctgatgctgggtgctgggtggtctggtgctggatgctgggtggcctggtgctgggtgctgggtggcctggtgctgggtactgggtgctctggtggtggatgcagaggcagggctatctgtgggtctgcccttgggtgtggggcaagccaggtcagcatattgcaaagcacacgttgggctgctgcttgtgtaattgtctccttgtctctgctctctcccttctcccacctcacatgggatagatcggagttaacagtgatgcctttgttttttgtcaaaagcatcatactcatgccccgtggcattctctttaagggaagagctggttttactaaagatgtgcttcaatgcagtgacgtgcggtgctgagcaaggccgggaacctggcccctgacctgtgtacactggccggccgtgctcccctcaccctgcggctagacctcaaatggcatccccacctccctcagccaactgcagcccctctggtagcatggagctcgcagacgctgggtgcaggaggcctgggcctgggccagacgggttccctgcacagctgcttttgcgtcattgatgcagacgcggagactcacttctctgcttcgtgtgttcctagttggtctccrgttcttgaacaaataactttcaattacaattttttttctacttatgattgccagtttttcttttttctttttttttttttttgagacagagtcttgctctgtcacccatgctagagtgcaatggcatgatctcagctcactgcaacctccacctcccgggttcaagcaattctcctgtctcagcctcacaggtagctgtgattacaggcacacgccaccatgcctggctaatttttgtatttttagtagagatggtctactaaaaatcaggctggtctcaaactcctgacctcaagtgatccacccgccttggcctcccaaagtacagagattacaggcataagccaccgtgcccagtgccagtttcttatataagctgatttggaggaagaaaagggcctgttgtttgatgactctgtggccccaggcccagccctgtggaagcctggagtatacggccggggtttgtggcacaggcgaggggagccacaggtgaaggtgtgcaggtgcgcaggtgcgcagggctcctgtgggtgagggcaccgtggctcagggatgggtaagcagtgttttcaggagcactgaggagcgggccagtgctggcaagggggttccttggcagcagctgacaggagggaaggttgcccggtcaggggctccaaatacaggcaggggtttttgcaaagccggggcagcgacatggcaatcgtgatgccataggaagccgaagyctgcaaagggcacagctgggtggacgcagcacctgcggccagagactggtggctgagcatgggggtgcctggcatggaaacttgcagggcttggagctgatggttaggggagggagtcaccaatatcacctctgctcctcctggcagtccccctgctgtgctatcaaatattaggtctttatactagatctttttttattaaaaaaattttttttaaagatggagtcttgctctgttgcccaggctggagtgcagtggcgtggtctcggctcactgcaacctctgcctcccgggttcaagtgattctcatgcctcagtctcccgaatagctgggattacagccatatgctatcatgcctggctattttttgtatttttagtaaagatggtttcaccctgttggccaggctggtctcgaactcctgacctcaagtgatccacccgactcagcctccaaaagtactgggattacaagcatgagccatcacacctggccaaatactaggccttattcattctttctaactaatttttatacccattaacctccctctacccccatatccttcccagccttctctgtcttcatgagttcagttgttttgatttttacatcccacaaataagtgggaacatgttatgcttgtctttctgtgcctggcttattgcacttaatataatgagctccagttccatccatgttgttgcaaatgacagaacctcattcttttttatggctgaataatactccattgtgtataagaaccacattttctttatccatccgtctcttgatggacatgtgggttgcctccaaatcttggttcttatgaacagtgctaaaygaacatggaagtgcaggtatctctgatatactgatttcctttcttttgggtatatacctaagagttagatagctgggtcacatggtggctgtatttttagttttctgaggaacctccaaactgctctcaatagtggttgtactaactcacattcccaccaacagtggtttgctggagatttcatagtgcaggaactggctaaacgtgggtactccaaagcagccctgctaaccaggtcaaggcycagctccttctctgtttttgcaggtgaagtagtactggctgtcactccattgccttcttggtgcctgtggccactgttgagctgcaatggccccaagcctgaaatattcaccatcttcctgcccagaagcagtcgccaccctctgttctggatgaaaagaccccaaagaaacaaccaaatgcagcctaggaacctggattagagtccaggttgaaacagcaactatctcagtgtttctgggacagctggggaaatgcaaatgtaggttgactaatagatgatatcagggactaagggttaattttcttagtgtgctaattttattgtgatgatgaagaaggccttactcttagcagagacacactgaaatatttgggtataaagtgctatgatgtctggaagtaatgctcaggtggttgaggaataaaagcgtgcgcacacgcacacacacacacacaactgcgctctcctcaaatgttaattctaatataggtagttgtatacagagtttatttatttatttatttagagacagagtttcgctctgtcacgcaggctggagtgtagtggcgtgatcttagctcaccgcaacctccacctctcagactcaagtgattctcctgcctcagcctcccaagtagctgggactataggcgcccgccatcacacccactgacttttgtatttttagtagagactgggtttcgccatgttggccaggctggtctcaaactcctgagctcaagtgaactcctgcctcagcctcccacagtgctgggatgacaggcatgagccaccacgcccggcccatatacacgttcttgttgtactattaattcaacttctctatacaaacttttcatttaaaaagttggagaaaacatcgtgttttagttttttgtttgtttatttttgagacagagtctcactctttcacctgtattggagtgcagtggcacagtcgcagctccctgcagcctcaacctcccaggctcaaacgatccttccacctcagcctccaagtagctggcactacaggtgcacaccaccacacccagctaatttttaatttttttgtagagatggggtctcagtatattgcccaggctggtctcgaattcctgggctcaagcaatcctcctgtctcagccttccaaaatgttggaatgacaggcttgcatcactgcacccagcttggttttactttttaacatttgtaaggctttactccacctggaattgtttttgtgtaggatatatatatatgaaagctaatgtatgctgggcttaatgcctaggtgatgggatggtctatgcagcaaaccaccgtggcacacgtttacctgtggaacagacctgcacatcctgcacatgtaccccggaacttaaaataaaagttgaagaaaaaaagaaagaaaccttagcagggtagctagataaatggtaaggtcaatcaatattcttatatatcagcaacaaacaggtagaaaatgaattatttaaataccagttacagtagcatccaaaatatgaagtaccaggaaaacattaaacagaacatgggccgggcgaggtgcttcacgcctgtaatcccagcactttgggaggccaaggcgagcggatcatgaggtcaggagttcgaaaccagcttggccaacatggtgaaaccccatctctactgaaaatataaaaattagccaggcatggtggcatgcgcctgtaataccagctactcaggaggctgaggtgggaggatggcttgaacccggaaggcggaggttgcagtgagcttagattgtgtcatygcactccagcctgagcaatagagtgagaacttgtctcaaaaaaaaaacaaagtttcttattgattttaaaaatcttatctgtacattatttcagatttttaaacatttatttctttaacttttagattttgaagtgcacagtcatgtcatctgtgaataacaacagatttgttttccttttcagtccttagatttctattgacttttcttgtcgtcctgtgctggcatctccaacaagcatgggactgaggtgatgmaggcatgttggcgacagagggtcctcaccaaagggaaaccttccttgttacactgctaagtgaagtggttgttgtgggtttttttttttttttaatgttttttatcaagttgagaaaattcccctccatttcgcatttgccaggaggttctggtttttgtttttaatcacaatcatgattggatgttgccagttacagtgaacttgtggctttccccttttgatttgttaatatcatgttaaaaagtccctgcattcctggaataaacccaatttagccatgatctttttcataaattactggattagttaactaatacaggcacaccttggtgatattgtgggttccgttccggacttcggcaataaaataaatatcacgataaagtgaggcacacacattttttgatttcccagtgcatacagaagttaggtttatgctgtgtacagccatgccaccctgaacgtgcctgatctcatcagaagttatgtttctgctatactgtagtctgttaagtgtgcaatagcattgtgtctaaaaaaaacagtgtgcatgccttaattaaaaaatacttgattgctaaaaaatgctaatgatcatctgagccttcagtgagtcttcgtctttttgctagtagacgggtctgcttcgacgtgaatggctgctgagcactcagggaggtggttgctgaaatggggtggccattgcaatttcctacaatatgacattttggatctgtgtccctaaaatctgacattttggatccgtgtccctaaaatctaacattttggatctgtgtccctaaaatatgacattttggatctgtgtccctaaaatctgacattttggatctgtgtccctgtctgaatctcagttgaattgtaatccccagtgttggcagtggggcctggtgggaggggatcggatcctggaggtgggttctcatagtttaacaccgtccccctagtgctgtaactgtgatagagttgtcgtgagatctggctgtttgaaagtgtgtggcccctccccctctgtcttcctgctgctctggccctgtgagaccgcgcgtctgcttcccgctttgcctccgtcatgatggtagacttccagaggtgttcccagaaactgagcagatgccaccatgcttctgaaacagggtggagaattgtgagccaattcaacctcttttctttataaattacccggtctcaattttttttttaagacagggtcttgctctattgcccaggctggagtgcagtggtgtgatctctgttcactgtagtcttgacctcgtgggctcaagcgatcctcccacctcagcctcccaagtagctgggaccacaggtgtgagccaccatgcctggctcatttttgcactttttgtagagatgggttttcaccaccctgcccaggctgaacttgaacacctaggctcaagccatccacccgcctcggcctcccaaattgctaggattacaggtgtgagccactgtgcccagccaggtttttttttttttcatttatttatttatttattaattttttgagacagagtcttactctgttgcccaggctggagtgcagtggcacaatctcacctcactgcaacctctacctcccaggttaaagtgattctcctgcctcagcctcctgagtagctgggactacaggcacccgccaccacgcctggataatttttgtatttttagtagagacggggttttgccatgttggacaggccaatctcgaactcctaacctcaggtgagctgcctgccttggcctcccaaagtactgggattacaggtgtgagccataatgtctggccagccaggtatttgttaatagcagtgtgagaacagaccaatacggacagcaatgaagcttgccacatggatggactctctttttcacaagttttctctgtagcacgtgatgtcgtttgatagcattttacccacagtagaacttctttccaaattggagtcactcctctcaaaccctgcagctgttttatcaatcaagtttatgtaacactctggatctttgttgttatttccacaatgttcacagcatcttcactaggagtaggttctaccttaagaaaccatttgctttgctcatccataagaagcaactccgggccgggtgcggtggctcacgcctataatcccagcactttgggaggctgaggtgggcagatcacgaggttaggagattgagaccatcctggctaacacagtgaaaccctgtctctactaaaaatacaaaaaattagctgggtgtggtggcaggcgcctgtaatcccagctactcaagaggctgaggaaggagaatggcgtgaacccgggaggtggagtttgcagtgagccgagatagtgccactgcactccagtctgggtgacagagcgagactccatctaaacaaaaaaaaaaaaagggagcaactcctcacctgttcaagtttgatcatgaggtggcaataattcagtcacatcttcagaccccactaataattctagttctcttgctatttccaccacttctgcagtgacttcttctgctgaagtcttgaactcctcaaagtcatccacgtagcttggaatcagcttcttctaaactattaatgttgatattttgaccccctcccatgaatcatgcgtcttcttaatggcatctagaatggtgaatcctttccggaaggttttcaatttactttgcccagatccatcagaggaatcactatccatggcagctatattcctatacaatgtatttcttaaataataagacttggcagtataaattactccacggctgggcatggtggctcacacctctaatcccagcactttgtgaggctgaggtgggtggatcacctgaggtcaggagtttgagaccagcacggccaacatgatgaaatcccgtctctactaaaaatacaaaaattacccaggcgtggtggtgcacgcctgtaaatccagctactcaggaggccgagacaggagaatcgcttgaatctgggaggcggaggttgcagcgagctgagatcatgccactgcactccagcccgggcaacaagagcaaaactctgtctcaaaaaaaaaaaagaaaaaaaaagaaattactccttgatccatgggctgcagagtggatgtcgtgttaccaggtatgaaagcaacattcatctccttgtgcatctcccccagagcttttgggtgaccacgtgcattggcaatgaacagtaattttttgaaaggaatccttttttcctgagcagtaggtctcaacagtgagcttaaaatattcagtaaaccatgctgtaagcaggtgtgctgtcatccaggctttgttattccatctctagagcacaggcaaaagtagatttagcatcattcttaagggctctaggattttcggaatagtatatgagcattggcttcaacttaaagtcaccagctgcattagcccctaacaagaaagtcagcctgtcccttgaagctttgaagccagacattgacttctctctagttgtgaaagtcctagatggcatctttttccaatatcaggctgtttcgtctacatcaataatctgttgggtggtcatggtggctcacagctgtaatctcagcactttgaggggcttgaggtgagtgtattccttgagttcagaagttcaagtcaagaccaagctgggcaacgtgacaaaatcctgtctctgcaacccccaccaaaattagccaggcatggtgacttgtgcctgtcatctcagcctcttgggaagctgacttgggaggattgcttgagcccaggaggcagaggttgcagtgagctgagatcatggcactgcactccagcctaggcaaccgagtgacaccctgtctcaaaaagaaaaagaaaatctattgttgagtgtggccaccttcatcagtgatcttagctccatctgcagatgacttgctgcagcttctccgtgggcacctactgcttcacctgcacttttatgtgaagaagatgtggcttcttttcttaaatctcctgagccagcagcctctgctagcttccaactttttctctgcagcttcctcaactgtctcaaccttcacagaattgaagagagtaagggccttgctaggcactaggctttggtttaagggaatattgaggctggtttgatcttctctccggaccactcgaactttctccatatcagcaataacgctgtttcattttcttatcatttgtgtgtttacctaagtagcacttttaatttcctccaagaactttttctttgcattcatcacttggccaactgtttggcccaagaggcccagctttcggcctatctcggctttcaccacaccttcctcagcaggcttagtcacttctagcttttgatgtaaagtgagagctgtgcaactcatccttttacttgaacacttacaggccatcagagggttattaagtggcctcatttcaacactgctgtgtaacagggaatagggaggctggaacagagggagagagatgggaagagccgctcggccgagcagttcagagcatgcacgacctttttccactcagttcctcctctgatgggggcccggttcacagcactgaaaacaattatggtaggaacatcaaagatcactgaccacagatcactgtgacaggtataacaatcatgaaaaagtttgaacgattgcgaaaattaccaaaatgtgacacagacgccagaagtgagcacttgatgttggaaaaacgtggccgatagacttgctggattcagggctgccacgaaccttcacgctgcaaaaactcagtatctggaagtgcagcgaagccaggcacagtgaacaagcttccttccggcttctggcgttcatgctcgtgagtgagactgctccgtaattatcctttgcatcctgtttttgtcaggttttggcaaaaagattatattagcttcaaaatgcactgggcaggggccaggtatttctttctttctttcttttttttttttttttaacttctctaaaagagtttatggaagattggaatccctacaccaagagtgtaggatatcactggtgaaatcgttctgaacttagcatgatcatttttttggtggtggatgtttgacttttgtttcagttttgtaacgattatggtattctttgggttttctattttttttttttggtaacagctttgtggagatatagttcacccactatatgactcacccatttcgaggggataagtgtgataatttaatatattcacataatttgtaaaggtcaatttggtataaattggcatatctgtcaccataagtatttgtctcgtctttaagctaaaaacattcaaattcttctctgctatctattttgaaatatacratagattattgtaaactgtagtcaccatactgatctataaacaccgggtcttatttctaggtcttacttcttttatcaagtgtttatctatacccactaatcaacctctcttcctctctgcccctgatttattcttgaggatatttttgtccgttattgttcttaggaatttgtccatttaactttacattttcaagttcattcctatgaaaaggcatcagtggcctctgattttaaaagacctgaagcactggactctgttcccctttctttcctgacctgattcgcacctcctctctttttatcatcaactctcttgataaaactcttttgattttattgatcctttcagagaaccaactttgtggctttttgtatgttttctatcttattaatttctgagttttagattgttttgttacttcttctaaatttgttttcctaattttttgagatatatcttgtgtcatttgttttcggcattttattttattatttatttatttttttttttgagacagagtcttgctctgtcccccagtctggagtgcagtggtgcgatctcggctcactgcaacctccacctcttgggttcaagcgattctcctgcctcagcctctgatgtagctgggactacaggtgcatgccaccatgcccagctaatttttttgtatttttttattagagacagtgtttcaccatgttgcccaggctggtctctaactcctgagctcaggcagtccgcccgccttggcctcccaaagtgctaggattacaggtgtgagctactgtgcccagcctgttatcagcattttacaatgttctaatgcagtccacacttaaggttgccactccccttaggaactgtttaggctgcgtcagcctatatgtagtgacaggatttttttttttttttttttttactatttcattcaacatatttttgaattcctcttttgaattttttgacaattgatcactttttaaaaaaaaatttttttttgagagagtctctgtcacccaggctggagtgcagtggtgcgatcttggctcgctgcaacctccacctcgtgggttcaagtgattctcctgcctcagcctcccaagtatgggattacaggcaaccgccaccacacctggctaattttttgttctttgtttttcgtgggtttttttgagacagagtctcgctctgttgcctaggccggagtgcaatggcacagtctcggctcactgcaacctccacctccctggtttgagtggttcttctgcctcagcctcccaagtagctgggattacaggcgcctgctaccatgcctggctaattttttgtatttttagtagagacagggtttcaccatattggccaggctggtcccgaactcctgacctcaggtgatccacccaccttagtctcccagagtgccgagattacaggcatgagccactgcgcccggcctaattttggtatttttagtagagatggggtttcaccatgctggccaggctggtcttgaactcctgagctcaagtgatccacctgccttggcttcccaaaatgttgggattacaggggtgagccaccacgcctggccgtgataactgtttttaacttctgagcataccaggatttttgcagataactttttgttacttttttttcccctcgtttaagcgtctgtggggtgaaggaatctgctctgcttgatctctgtcttctgaaactttttaggacttgccttatggcccagcacacggtcagattttaaaatgttctgtgtgtctttgaacagattctgttctgcagtggtaggggcagcattgtgtgtagattgattgaatcaagtttattcatcatgttattcaaatcttctatactaagggtcagcaaactacagcctataggctaagtctggctagctacctgcttttataaagttttgctggaccgcagtcacaccatttgtttatgtcttgtctacagctgtttttgcattgtggatttgtctattttgtctagcagttgtatcgagttttgctttatatacttgagagctatgttattaggtgatacagacttaaaattttatatcttccttatgaatgaagcgactattactgtgaaattatcttcttacctttttaatgctttctgcctttcagactttgtctggaattaatatagcggcaccagctgccttttgtttactgtttgctttgcatgtctcttttatttttttatttttaatttttctgtatctttaaatctgaaatgtatctcttgtagacagtgtatgattggaggatcttttttaaattgaagtttgacagtccgtttttttttttttttttttttttttcagtatttattgatcattcttgggtgtttcttggagagggggatgtggcagggtcataggataatagtggagggaaggtcagcagataaacatgtgaacagaggtctctggttttcctaggcagaggaccctgcggccttccgcagtgtttgtgtccctgggtacttgagattagggagtggtgatgactcttaaggagcatgctgccttcaagcgtctgtttaacaaagcacatcttgcaccgcccttaatccatttaaccctgagtggacacagcacatgtttcagagagcacggggttgggggtaaggttatagattaacagcatcccaaggcagaagaatttttcttagtacagaacaaaatggagtytcctrtgtctacttctttctacacagacacagtaacaatctgatccctctttcttttccccacatttcccccttttctattcgacaaaaccgccgtcatcatcatggcctgttctcgatggtcgctgtcccttcggagctgttgggcacacctgcagaagggttcccagacagggcggccgggcagaggcgctcctcacatcccagagggggcggccgggcagaggcgctcctcacatcccagacggggcggccgggcagaggggctcctcacctcccagagggggcggccgggcagaggcgctcctcacatcccagacggggcggccgggcagaggggctcctcccatcccagagggggcggctgggcagagacgctcctcacttcctagacggggtggcagccgggcagaggctgtaatcttagcactttgggaggccaaggcaggcggctaggaggtggaggttgtagcgagccgagatcacgcctctgcactccagcctgggcaacattgagtattgagtgagcgagactccgtctgcaatcccagcacctcgggaggccgaggcgggcagatcactcgaggtcaggagctggagaccagcccggtcaacacggcgtctccaccaaaaatacaaaaaccagtcaggcatggcggcgcgcgcctgcaatcccaggcactcagcaggctgaggcaggagaatcaggcagggaggttgcagcgagctgagatcagggcagtacagtccagcctcggtaacagagggagaccgaaaaaagaaagaagaggggagaggggagagggagagcgacagttggttttttaagtctgacaactaaaaaaatttaactggatcatttatttggtttactttaaatgtagctgcagatatttgcgttgaaatataccatcttatattttgttgatttcttggtctgtgctgatgttttcctttccttctcctttcttgctctttttgagtcaactattgatcctttcattttctgccctccaccagtttggatgttacagactctgttcttttactggtttccccacaagcacaacattcttattaaacgaatctacaattaacctgtacgttttacactcgggaatatccaaggacctgcaagcatccttaccttcgttaatgccccttacaactaatagactgtgtatttaaattctttttttttccccaagacggagtcttgctctgtcgcccaggctggagtgcagtgggccaatcttggctcactgcagcctccgcctcctaggttcaagcaattctcctgcctcagcctcctgagtagctgggattacaggcacccaccatcatgcccagctaatttttgtatttttagtagagacggggtttctccatgttggccaggctgatcttgaactcctgacctcaggtgatcagcccaccttggcctcccaaagtgctggtattacaggcgtgagccaccacacccagcctgtgtatttaaattcttttttacttttgaatatcacaagacattgctggattattactgttttttttttttgtaggtacagggtttcaccatgttgttcacgctggtctcaaattcctgaactcaagtgatccttgtgccttggcctcccaaagtgtttggattataggcgtgagccactctgcccggcctgattacattttgtgttagatttgcacacacttgccgctctctttcctttacgttttgcatctcagacttcccatctgggatctctttttctccttgaagtgcacgtacatgagaaattcctctggttagagtgtgctggtggcgaacccgccccttgtgtttgtccggaagcactagttttccctgccccttgggggatatgcttgctggttgcagaactcttggttggcagtgccgttctttcagcactttgatgtcagcctctgcttggcgtcagcatctttttgtgtgaagacatccttgtcaggccatctctcctttgaaggtagtctcccttttttctcaggttgcttctaagatcaaaattaaaaacctttgtgctacaaaggacaccatcaagaaaggacgaccacaggaagggggaagatgtttgtaaatcacagatccggccggggatgtgcacccagagcctctaaaggtctcttagaaggtctgagcgattcgtgaccggatccccgggacgcccttgcccttaccgagtgcgttggggagggctggcagacagggaggagggagccctgctgcttgggctggccgcggtgagcagcggcagcgctgtggttctggctcttgccttcctgccctgagcagagcacccctcccatctgctccccaccgctgaggatcactggtcccccaggaggcttcccaggcatcacctygtgtgtgtgtgtgcagcagctgcctcggccccggttctgttgggtgttgagaggagcttgggagaacccatgactgggagtggtagagattcgtgacccagccccggtgatgctctcttgacctgcctaggtcaagaagaaattgggaagaggcgatgaactgagaggaggagtgtctcaggtgctgtcagtacatggtctgcctttggagcaccgccttctttttgctgattaagtgcaggcttgccttctagtttaacgtgggcaggcaaatagtcctgctattgcattctgacatagaaaatgtactttgagtgagatgtcttcatggagagtaaatgatctggaggtagaaagaaaaaggcaaatgcttttgttctcttccagagacggctgtcaagctggctctgcaagtcaggccctctgcagctgaggttccactttagacataggtcagtgtgtcttggagagggaacacctgtgaggtccactggagaagcccattctggatgagtgaaaacctggatttaaaaatgcaagattccagcttgcacttctagccatggtggaagatacagaccaaatttcacagcctaccttaatcaaccagaaagccaaacaaaagtgcatgaagccacaggcttcagacactggtggcaggccgtgtggacagtgaccagagaggggcatgagggaagtgaggcctcagtagcccagcgtgtcacctgcagagtctccagccacagggcagggaggggaaccaggacctggtggagacagagtgtggagttaaggggctccaggaaggctggaatgtacaaagaaaaatatggaagaagagggagttccataaagaaacagctctggagagctgaggaggggccttccagtctctgagagctgaccacaggtggcatgtgaatgctgcccaggtgagggaaaggggcgtgggagagcaggggtggcacagtccccgagttcacagggtggggtgaatctgtgtgctcagtggccagagggagagactcaccacccaaggttgtcctacaaaggtccgctcaggactcaccaaacagagcttacgagcgagatctgaaaagatcaaactggttctaggttgactgctcccagaacaaagcccggagatgcaggacagcagcaaacccagcgtccagtgccaagttcacaggcaccaagttcacagtgcccagcagccaagcaaaagtgactgccatacagaaaacccagaagaagaggaaaatcaatggttggaaacatccaggctagacactgtagcccccacctgcaattccagccctttgggaggctgaggcaggaggatcacttgagcccaggagttcaagaccctctggggccacatagcgagaccctgtctctaaaaagatatgtgttcttttgtttgttttaagaaaataattagctgggcatagtggtatgcacctgtagtgccagctactcaacggcagaggcaggaggatcccttgagcctggagttcgaggctgcagtgagctatgattatgccactgtactctagtccaggcaacagagtgaaactctgttaaaaaaaaaaaaaaaaagagaagagaaaagagaagggaagggaactatatctatccagatgatagagctagcaggcaagcatgttaagatggcattgataaatatgttccacgtgttcaatgtcagggcaaatatgataaaaataaagaaaaaaatggaagatataaaaaaaagacctagggccgggcgtcatggctcatacctgtaatcccagcacttctggaggctgagatgtgaggattgtttgagctcaggagatcaagaccaccctggacaaccccatctgtacagaaaagtacaaaaattagctgggcgtggtggtgcacacctgtggtctcagctacttaggaggctgaggtaggaggatggcttgagcccaggaaggttgaggctgcagtgagccatgatcataccattgcactccagcctgggtgacagcatgagactgtctcaaaaagaaaaaagacccaaataaatcttctagaaatgaaaaatatgctgaatgggattagtggtagattagacattgcagaagaaaagatcagtatacttgaagacacagcactttgtaaaatgaaacacaaagaaagaaagacaaaaaaatgaacagagcatcagtgggaccatatcgagagtaacatatgaaactgatttccagaaaagaggcgtgtgtggtagaaaatacctgaagacaataatggctagaatttttccagatctgatgaaactcatcccgaagaagctcaacaaatctcaaaccgaagaaacatgaaggaattcaccccaatacacaccatcatccaattgccgagaatcctgaaagtagacagaggcaaatgctatcacatacagatgaacaaagccaaaaatgagagccggtttctgatcagaaactatacaatttgaagacagtggaggaatgcctttcaaatatcgaaagacaatattggacacctatctacaaaaacaatggcccttcaccctactttatgctatatttaaaaattaaccaaaatggatcatagacctaaatgtgaaagttagaactgtaagattaataggggaaaatatgcgatatatacactgtctttgtcaatttgggctgctataaaaaaagttaacactgactggctggcttaagtaacagaaatttatttctcacagttctggaggctggaagtccgaggtcaaggtgcctgtaggtttggtggctggtgagggcctcttcctggttgtgccctcatatggcagagagataggaagcagctggcccgtgtcttttggcataatggcaccaatcccatttttgaggctcctccctcttggcctaatcccctgccaatggccctgtctccaaatatcacattagcagggaggatttcgacgtatgaatttggaccaggcatggtgactcatacctctagttccagcactttgggagggcgaggcaggcggatcacttgagctcaggagttcaagaccagcctaggcaacatagtgaaatgctttgtctacaaaaaatttaaaaaattatctgggcatggtggcatgcacctgtagtcctagctacttgggaggctgaggtgggagaatcacttaagcccagaagactgaggctgcagtgagcggtgattgtgccacggcgactccagcctgggtaacagagcgagatcctgtctcaaaaaaaatatgaatttgtagctgggggacacaagcattcagtccatagtgtctgtagtggaatattatccagcctgaaatgtgaatgacattctgacacctgccaccaagtgggtgagctttgaggacattatactgagtgaaataagccagtcacataaggacaaatagtgtatgattccacttatatgaggtccctagagtggttaactcgtagagatagaaagtgtgatggtgggtgccaggggctagcggggatggggagtaggtgtttaatggagacagtgtttctgcttgggaagatgagaaagttctggagatggacaggggtgatgattgcacagcagtgggaatggacataaagcccctgaaccacatacctaaaaatggtggattttatgttagtggacgtcaccacaatgtaacacaaatgagcaaacacgggctttttcctggttgccggcaggcaggctaatggtctgctggcgggggctgggctgggctggattttggagaagcccagggctgcgkctggcagggctttgggaagcagcgggagcgcatgtaaggctggtgtagctgtcgcaggagctgtggcatccggaggggcccatggtggccccgcctttccaagagcctgcaggtggctgggtggcttttccgtgtccttcctggggcgtgacctctggcggctccgggactgttcatttatgagccatctgttgggcctcctggccaggcagtgggaagcagcgtgccagcaatgccctgaatggccttgaccctgatgtttaagtgacggagtgtttggttgatcgggaaaggatgttaatgcgtgcttgtcagtctccctgacatgcagcctttcgggttttgaagtggatgcatatatttggtcacacggcgtctctccagtcctgcgcaagcacgttgacatgtgtgcctttcactttcaggcttgtccagccggaagccctgagggcagctgttcccactggctctgctgaccttgtgccttggtaagtgggcagtgaggccgcctgacgcagggcgccgtgtgtgagagtgtgtgtgtgtgtgtgtgtgtgtgtgtgtgtgtgtgtatgtgtccagtgttggggtcagcgttgggccttgataccttgttgattaatttttcttaaaggtatatattttaacctttgcttatgaccaacagaatatttattacagtcccttctcatttgtccaaaacccagatgataaagttcaggtaactttgttctcttcctgcgagggatgagctgagctcaaaggggctgagctacaaatgacgctgggctgaggckcctaccagggcacagcggacatgggagtcacctcacagggctgccccggctctgttagcagcccaggaagtccacccctctcctggagaccgactgggagccgtctgtctgggatggggcagaggtgtggcccggggacagctgcacaatccccgtggggagcccagctatctgttgctggagggtgctctgctcctggggggtcggtgccctgctcttgggggttggtgccctgctcctgggggacgcgctcctcaggaagccctgggtttggtggagagcatggaattgcctggccgttgagtcactgggtgggcccagggttggggcagctcctcctgtgctcctgcagcccgtcgtcatagggcccctgcccactgctcccatgtgttccacccccgttcccaggcccgctgctgtggctgatgaggctgcaggtcccttctgggtggccctggaccctgtgtccttctcccactgtggctgctttctacccaggaggtgtctcctccaaatgctgtcsgcagagatcaaatcccatccctgatgttccaaggcttccaggtgtaactcacaggcccagttcttggtaggcaggtgatttagccttctgtgtcccagtcacaacccagggtgtgttgaaagctaccatttgataaaaacaaacatgagcaagattgaagtgaccaacaccaagctcgggctttcagagatgtagtcatggcggacctcaaacagcattgctgaccatctgagctgggtgctgaatgcctccatagttttcaaattaaaatgactgtatttagtgtctcttttttttaaaaaaatatttatttatttatttatttatttatttatttatttatttatttatttattttgagacagtctggctctgtcgcccgggctggagtgcagtagaacgatctcggctcactgcaacctccacttcccaggttcaaatgattctcctgcctcagccccctgagtagctgggactacaggcgcccgccaccacgtccggctaatttttgtatttttagtagagatggggtttcaccatgttggccaggatggtctctattgcttgacctcgtgatccacctgcctcggcctcccaaagtgctgggattacaggcgtgagccactgcgcccggcytagtgtctctttaggattgttttattaagattgcttatttgatagcagataactatgaagatactaacgatactataaagacacagtggcagctcccagctaactggcactctgagctgtcctctaacattctggattcacaaaagtttacttgctgggtttgctcattgttgatttaatactttgcctgtggtttaaactgttaaattgttgcaaattgctattctgtgcaaaagaaacttgaactgtcctgcaccccccagttcagctctcactgcattcccgctcttctgcctgtcctttggctattgttggactgtactcagggctgagaggagggcatggggcttctgcagtcaccacagggctgtgggaaggccaccagcaagggctggggggccagagggcttctgatctgtcaggtgcagggtgtggcgcacgtgggcttgtgctgtggatgaggttttgcttctaggggagaaaccggccaaggcgcgtcaggcatcagcagacctctcccagaaggaggacattttgagaagatgaakatggaaatcggtttgatctcctttgttccctttctggggacagggacatcacggttctgtaataactgaggtctaggaaaaagaacagaaagaagggcaggttggaaacattgtgtcttttggggctagtagtagctgcagaacaacccaaatccgatttacaaccaagcttctagggtgagtaactcgatattcaccaaaccgggtgactgtcagtgatggcatgccacgtatcacttttgggagggaggagaggttgcaaaactaagcagacggtgtggcactgcagctcccccccgcccaagctggtgagtgttaatatcgaaatctatagcaaaatgtttgtccatgacttgcaccagtacctctcgaaaggtgcccaaatacctaataaacatctgaaaaggcatgcaactcaattggttatcagagaaacgaactttttaaaccagaaatgttgtatcactagacagtcagcagattggctaaaaccaacgagacagataaggccagagttgatgaggaggtgggatggggcgtgatgggacgcttgttcctcatggtggctgtgacctcacctcttaattttggaaaactttggcaatatcttctaaagcggagcaaacccatggcttgtgacccagcagctctgctctgaggcgtgaacccacagccaggagtgtcgccggagccgtgttcatcaggcctgtgtgccctgcggaggtggactgggtgaacacactgccggmtacttgcccaggggagcagcatggaatgagctgcgtggagacacccgtgctccgcctgggcgagccgacacacacatgctgggtggaagaagcgcagtgggtcagcacatgtgcaaggccctcgtaagtgcagcacagagacaggcagacctggcagggggaacaggaagggtagctgccctggcaggaggcaaaggaggcccagggggcttcaggggctggcgagggtctgtttcttttctttcttttttttttttttttttttgagagggggtctctctctgtctcccaggctggagctcaatgacgcgatctcaggtcacttcagccttgagctctcctgggctgaagggatcctcctgcctcagcctcccggtagctgggaccacgggcatgggccaccacacgcggcttttttattttttgtagagaccgggttttgccatgttgcccaggctgatcttgaactcctgggctcaagcccatctgccggcctcggcctcccaaagtagttgggattcgtttcttgatctgggtgctgctggtcagagtggatcctctctggaatttcatccagccgcatgctgaagatttatgtacttctctgtatctattacactttaacaaaaagtttcccataaaactgtgccataccaggtacggtggctcacacctgtaatcccaggactttgggaggccgaggcaggcggatcacgaggtcaggagatcgagaccatcctggctaacacggtgaaaccccatctctactaaaaatacaaaaaattagctgggcgtggtggcgggcacttgtagtcccagctactcgggaggctgaggcaggagaatggcgtgaacccgggaggcggagcttgtggtgagccgagatcgcgccactgcactccagcctgggcgacagagcgagactccgtctcaacaacaacaacaacaaaaaaaccgttccatataagcttcctaagagcttgcgttttcggtttcatctgattccctctgtgaaaaatacgggcttctacaaaacagcagactcaaaaagcaacaacaaccaaacccccaaacccagcagaccgataccatgttaaagccacaygtttgtcgattcccctgctcgggtgtttgcgcgccctctccgtcgcacggctccgtgtgctggagaccccacgggacygagtagtccccaccctcgtggaagcatgttcccgtaatagcagagcaaagggatgatggtcttcggaggagggcgctggctcaggcaccccagggacgctttctctttccgtgtgctggaagacctgaatgcttcagagcctaaattatgtgggaaaaacgtgtgtgtgttccaaagctggagtgagatttccaaggcttgtatgaggcacttggcaagcttcacttgtgccctaaagcacaaaataccagggcttggggtgaatttggtgatatccagagctggcagctttgttggggctggtcactccccagccctgaggactctggggaaggaatgcctgtcgtgagcggaaccagccaagttcacacatggccacctgccaacctgacctgtgtgttgagccccggcccttctcgatcagaaaggaggtgtcccgatcagggggagcacatgggctgggaacttgtggaacccggtgtgtatgactcgctccgtgattcataacaaggcatttgctttcctgggccttggtgacctgtctgtgaaatgggcacaggagcccagctcttgcatagacagaaggtgagggcatggggtagggggagtggagccgtgggtgcggcactagaaggatgagaaaggacctatggcctccagctccgggttcagggctgtgtccaggttcaggggactgtgaaatgccagcagcttctaaaacctttgggttctttaagaaaaggctaattgcagaggatgctcactgatgagggcgaggatcaaagcccgtgctgcgtcagcgtggtggcctgccagctccaggctgcaaaagtccctcgtcatttcatttccttccatccctgtggagcgaaccctgttgtttgcattttttggatgagggtacaggctcaggctcagctcacacggtccccggatgcccctgctgtgctccgaggttggcctgcgtcttttgctcctgggtccttacgtgccctgtcacagccagccctgccctggagagagaggccactgggaaaaaccctgagagcaggcgggcctcacctgaataggacttcattcgttgattttaatttttacttactattttttttctttgtacaacaaacattgtctgataagggacttcactcttccaacttcaagaaaggctcctcccgggtctgggtgctccaagggccccattgggccgatcctctgacatcacttggtgtggcttcctcggaagctacaggcccctcggtccatggccccttcacggcaggcagtggactggccggcggtgggccactcatttttcatacacattttttttttttttttttttgagacggggtctcactctgtcgcccaggccggagtgtggtggcgtgatctcggctcaccgcaagctccgtctcccgggttcacgccattctcctgcctcagcctcccgagtagctgggactacaggcgcctgccaccatgcccggctaatttttttgtatttttagtagagatggggtttcaccgtgttagccaggatggtctcgatctcctgacctcgtgatccacctgtcttggccttccaaagtgctgggattccaggcatgagccactgtacccggccttttcatacacatttgaagaggactttaaagtgttcttgagtctttcctggataatgaaaggtatcccgacggtgctgttccatcatatttgtctcaggtctcgtctctccttgctctgccctcgttgcaggagagcctggctcccaggcctgcaggccggctgtggatctccgagaagccactgggtgggactttgttctctgctgcagggggaagctgtgagggagcactgggcccccgccctgagcattagtacaccgtcctgcagggtctatctgaacgctagcccggtggggaggggggcccaggcctcatcatggagagggtggtggtgaggagtaagcccccaggtctgcaccagggtgccccaggacaccctggactgggagtttaggagacctaggacgcatcctggggaagtgaggcaggtgtgtggtgtcttgttctttccgggttaaaacccacagcgtgacccgtggctgggatccccctgttcgtgagttctcaaggaaggggagcctgcagggtgtgactcacacctatctcaggaacacagaggacagagagggatggagacggcctccctctgtgctcctggcctctttctggggagtgcgtgttcagccctgatggcagccaaaggtttgtgccaggctggtcctgcgcccgtgagagggtgctggtctgcagagattggtgacagatgccctggaggaggggagtggagccacaggtgtctcccagcggctgtggccgcgcgtattgccagcagcagtctagggtcctaatacagtgaggtgaaggaggaggtgaagtgctaatacagtgaagtgaattaggtgaagtcctaatacaggtgaattaggtgaattagtgaattaggtgaatacaggtgaattagtcctaattaggtgaattaagtgaattaggtgaagtcctaatacagtgaggtgaaggtggagcggagggccgaggagggccggccttccctctggaagcaagtgtgctgtatgcccacgggggactggaggaggtgggtgttccggtcactgcagttcttacatctttgctgtgtgtgggaggaggaattatctttgtgctctgaagtgtgatgtatatgaggggagagcaaagggctcrgactttgatctgccaagctgtgtctcgtgaagtcaggtattctgcaagggaagcttttttcttaagaaacaaatctcatcagtgttcaggacaaggctgtactgttccaaccaccgcagagatggagggttggaggttaaggcgcacaagttaattttccatttgatatttatgttttcattataaaagtaatacatgcctatgaaaattaaacacagagccaaatctaataaataattaaaattgcattctttactccattccacatcccactccgtttcctggagggaaccactgtaagcggtttgtggtttatccttctagagtttataaaaaatacacataagaacatacatacaccgacagagtttccaaaaatgcacctacgtgtcatgacatctctctgcaaaacctgactttaatttgtcttggaaaacttttactacacatagatctacttcatttaaagaaacacttcctcttttatgcatgttctaaagagatacctgtaggcacacacacacatgtgcattgtaagaactgtccgtgtgatagttttggagcacagttacctgattatcagtctrctagaacccgagtgtgctttaaagacttgaactgtgtttgtgtgatttggaaagtgtcctagagctgcgctcttatattgaggggctgggcagggtcagaagcagcctgtccaggccaacgcagcgaggcctgtctgggaagattgcaacactggccctcacagctccctggtctctgggtgaccccgcctggcccagatgccgcctcgctggaaggcagactttgcctcctgcctgctctttctttctgtctgtctggtgccgttcataagttcataaaggtggcaaggaggccctaggtgctccgtggcctgggctgcagactccttttccactctggagctgctgtgctctggaacatcccacacggggttcctcccattggaacacaggtaaagggctctatgcatgcacatttctgcgtgttttattgaccgggtcatctgtgttcattagctagcagctcccctgcagtcctctgaagtgcaggccagcagagacrggggcggtggctttcgtctgaccatgcctagtcacgaggctgctgtgtgtctgtgcgtgtgtcttctctcagacactgcctgcctggcacccccttacctcttggtgaatgtaattcaaagcaaaggctgcccctggagcttccaggctgggccccagcgcatcttgctctgctggtttggcattaggtcaggggtcctggtggaactccacggactcatgggcatggtggcactgggagcctagaggtatcttagtcgtcctcacaggctcagcttgagcattgccgtaagtgttcatctcaacacttccatgtgaattggaatcaggaggtgtgtccatggcaacacgtgggcccgagctggatgggaccactgtgtgccttcagtccagcctgccagagtggcagaggacgatgccggggccatggggcaatcctggcacgcgagcaaagggtggggcacatgtgagccacgtctccttttatcgtggccttgtctcccttcctcatctctcccaagtgaggatgaatttctcctgaggaaggcgctggccatggcgcagacctagcgaggatggcaggcagcccccgtgggcaccaggggtgctctggccatggccaggaacttgtggattttccgtgcagatgattgtgttatgtccaaatgatgaaagcttgctttgttctttccaatctttgtttctctcctttactcgtcctatgccagtggctgcaggaagtgccctgaggaacggggcctcatgcctacttctttcttaatcagtggtgcgtggccatggacttcagcatctgcttttcctgagtctaaatgcaaatcatcctgttgcttttctccttttatcacttatcgtcaatagtcctgttaattggtcttctatagtaaaccattcctgtgtcccgggataaaccatatgtggtcatgatgttttggtaaagttctggctggagtcagtttgcaaatgttatttactgtgggtattccatcgctgtgcatgcacgaggctggcctttaactacagggcactctgccttgtccctgacggttgctgcggtgcctccggtgtttgcccagcgagtgaaatgctgactgtggcctgtgaatgagcacctcactggaagttcagtgaatgtgttctcctcggagaggcagacattgaggacgtgtaatatttagtactggcccctgctttactgagtgtttttattgggaagcagggttgaattttgttgtgctgcctgtcaagccttcttgttaaggaatcagatgaactttgttagtcaatttcctcatagcaaaccatccttgcattcatgaaacagatccacatggtcatcatgtatgtgttgactttttaatgtgctgttagccctgtttgctaaattttaaagaaatttttgcattcatagtcatatgaagagcagtggttctcaaacctatgggcagtttacactcttaaaaaattactgagggcctggtgtggtggctcatgcctataatcccagcactttgggaggccgaggtgagctcagaagtttgagaccagcctgggcaacatggtgaaaccccgtctctataaaaaaatacaaaaattagccaggcatggtggtgcacgcctctagtaccagctacttgggaggctgagatgggaggatcacctgagccccaaaggtggaggttgcagtgagttgagatcaccccactgcaccccagcctgggtgacagagcgagaccctgtctcaaaaaaaattattgaggaccccaaagagattttgcttttgagttgcggctattgtggtccttaactggggtgactccctttgtcccttggcggacatttggcaatggcaggagatgtttttggttggcagctgctgggagacagtcactcctgcatcaaatgcacagagaccagggaggctgctgaatcccgcagggcacagccggccctgcagcagagttatcccatccaaaatgccaggagtaccgaggtcgagagacctctaatatggtgttgatatacactaggtaagaaattaacagtgagaacattaaaaaatatttaataattcatttcaaagtccaatgcatacaaaaaagtattttttttcctgtgtcctgggataaaccagcttttgtraggaaaacccatagtttccaaaattagtaaggacagtggccctgttttctatttttatcagtctctttgatrtctgacctcagaggccacggctgacgtctctctgcctctgcaggcagcctgttgctctgtgtcgtggttgaggctcataaagaaaattatgctgcacaaggctatgcgctcatgaagaaggctgttggaacccccctgcctgcgaggcctggggccccctggggtccttacgccacaatttgagatggtgatttagacaaatttccttcttcccttccctctgcactctttctccttgtgaattttatgtcagtgttgcttcattaaagggattgggacgtcttccttctttatgttctgggaaagtttaattaatgttaaaatagtctattcttataggatttgtagaattcacttgtgaaatcatctgcctttggtacttttgttagaggtaaattttaaaaaactgtttaatagatattttaattatttttatttaaaaattttttaaaatatgagattccatgtagaggttttttttgttttgttttgttttgttttgttttgttttagagctgaagtctcaatctcttcccaggctggagtgcagtggtgcgatcttggctcactgcagcctcgaactcttgggctcaagcagtcctcctgcctcagcctcccaagtggctggtgtgccccaccacgcccaactaatttttaaatttgttgtagggatgggggtctttccatgttgcccaggctggtttcgaactcctggtctcaagtgatcctcacagctcggcctcccaaagcactgttatcacaggcctgagccaccgtgcccagtactcagatattttaattctgtaaaaacaagtctttcttaattctataaaattctataaagatagttctgtttaaactatcttttccatggccacactttataattaatttttctcctagtaaattatccattttatctagatttcaaaatttatttgcatagagatatgcaattatttctgtgagtttttaaaaaatgtattttattttgatgattatttcctcttttgtttttttgagatggagtcttcctctgtcacccaggctggagtgcagtgatgcagtcttggctcactgcaacctccaagttcaagtgattctcctgcctcagcctcccgagtagctgggattacaggtgcgcgccaccatgcccggctaatttttgtatttttagtagagatgggattttaccatgttggccaggctggtctcaaactcctgagctcaagcagtccgccctcctcaacttcccaaagtgctgggattacaggcatgagccactgcgcctgccccccagccctgttttcttattttgtatatttttattctccattttcttgattagcttttttttttttttttttttttttttgcgacagtctggttctgttgcccaggctggagtgcagtggtgcgatctcgggtcactgtaacctccgcctcccaggttcaagcgattctcctgcctcagcctcctgagtagctgggattacaggcatgcaccaccatgcctggctaatttttgtatttttagtagagacggggtttctccatgttggccaggctgctcttgaactcctgacctcaagtgatccacccgcgttggtctcccagagtgctgggattacaggcgtgagctactgtgctgggccttgattagctttttttaaaaactgctataagtagcttactgttttgttgatttaaaaaaaatttcaatttagctattaagattaaaaaaaatttttttccttttatatttattaattccttcagttactttgtaattttcaactttttaagttggaggcttcattcattctcttactgtcttgctttcatttctaaagatgtaaagtaatcaatgggttaaattttcctctaaagcactgctttagttttattagtatggtttctaaaaattcttcagtttttacttctattttccctttaagaggaatatctaagaagataatgtttaaatttcagtgtagaaaaccctgttttctgattttgttactaatttctagggaatattgtttgtattttaattattacttggtattggttgaaaatttctttgctgcttaatatatgggtgctgtttatgaatgtttccatgggatactgaaaaaagaaaggtgtgttctctcttaccaagtacagaattgcctctttctccttatgcactgcttctttaattttgttgtttatatgtctgacagccttgtgtgcttatttcttgcccgcgtgttctgtctcgggttggaagggacacgcacgtctcctgccttcacatgctgagatgggtttctgtagcatccccagaatttctgctgaatkaagtgtgtcgggttatttggtacgaacatatcgaatgactatatctgctctaagaattttagttttagcgttatattcctgatgtctcatttatttcatttggcctgatattttattgtctaatatcaagatattgaacccttttttttttttttgcatttttccagtatatatttatttcatgtatttttaactctgctgaatttctctgttttaggtctttctcttctatctgcagagttggggtttgttttaagccagtgcgaatgttgtccttttagtaggtgattggaggctttttgtatcggtagatatgattggtgtgtttggaccagggctgtggtcattttgtgtattttagggagttgcagataaaatacatgcacgttcgcacacacagcacagacgcctgcatcttcccatgcgtggtttctgctcttgcctctctgggtttttgtttcacttcggtcgagtttttggtggtgttgagcggatagccggggaagttggagtcttgtttgtggccgcctcgtgctcgtgtctgtatctaagatcctcaggctgctcctttttgggtaaggtctgttgcttctctaggaacagtgacggtggcagagcccgtggcccctctctcctgtcccagagccaagctgtttcctctccccactcccgggcaccctgcgggcaagtgaggggggcccactctgccctggcctgccccaccgccccatttgctgggttgtcctcaaagcacacggtaagcacccccgcccccgccccccacacacgtaccgctgtcagccttcttgctcktcacctccatccagggcacatccgcccctctgggtgctgtgagcctgttgccggcrcggtcccgctgctcctccttctgctgccctgcactgccgtggcacaaccctccctccgggtctctgctgagccctccaggcgctcaggtctgccgtctggttgcaggtgttttatagagtgcagctttacgctcccactccagtcatctccacgttggtgtccgtctgtgtgtcctctctgcctttaagttctgcctctgtgtgacacagtttcacagtttctgtgaccaaaacacaggtttagtcgcttgctgctggcagagtccaattaacaagagcacgtcgggtataaagaaagtgactttattccaaagctagcttaggggaagaggtaaagtgagggtaccactttgcttttggagcagaaagtgggaacttttaaaggtggggggatgtgtggcacacaggggaggaggctggcaggtgggggtccgcataactcgtttcgctgccttatctaccgggtggtcgagttggcatcttccccggcagaactgtgttggggtgttgtgggtattgtgggtattgtgggggttgtgttgtgggtrttgtgggkrttgtgggtgwtgtgttgtgggtgttgtaggagttgtgagtgttgtgggggttgtgggggttgtaggggttgcgggtgttgtgggtgttgtagggggtgtgggtgttgtgggtgttgtgggggttgtagggggtgtgggtgttgggggtgttgtgttatgggtgttgtgggggttgtgggtgttgtggatgttggtgttgtaggggttgttggtgttgtgggggttgtgggtgttggggttgtgggtgttgtgggtgttgtgggtgttgtgttgtgggtgttgtgttatgggtgttgtgggggttgtgggtgttggagttgtgggtgttgtgggagttgtgggtgttgtgggagttgtgggtgttgggttgtggaggttgtgggtgttgcggcggttgtgggtgttgtgggtgttgtaggtggccagaactttccaggtggagagagttagttcataacagcactttgggtgtggatcaattgttgtctctagaggtagccacctggtggctgagggttcccctggagctcctgagcacatggttaggtgagcttgccccatcggcagtgtccagtgaatggaagggaaaagggtataattgcatttctaaagggctatgtaggaagtggggaacagggggaaatggagacaagagaagagaagagataaaaataatttagaaacagaaaaatgggggacacttggttacattttagctttgtgtgtctctgtaaatctagcaatctggcagactgctggctttttttttttttttgagactgactcttgctctgccacccaggctgaagtgcagtggtacgatcttggctcaccgcaatctccgtctcccgggttccagtgattctcctcctgagtagctggaattacaggcgtgcgccaccacgcccagctaatttttctatttttagtagagatggggtttcaccatgttagccaggctggtcttgaactcctggcctcaagccatctgcatggctcagcctcccaaagtgctgggattacaggtgtgagctacccctgccggctgacagctaaatttttaaatgctgtttatacttgtgattacttatgtgtttaacttttttttctttttttgtcttaactttctactttaccatcaccatcgttattacttaacattcttttccttcactttcctgcctgctctgagactgggtgaagtttgtttttatttcctgtttctcctactgcagaagtcacacatctgtccatcatttatattcttggagtgtcgtccttaaatgttaggatgcatgcttgatgtcacaaaagtttaccggtgtctctattttctttttttttaaacttcactartgtgtggggtacaggtggattttggttatgcggacaggttctttagtggcgaattctgagattttagtgcacctgtcacccgagcagtgtacactggacccaatatagagtctctatccctcacccccttcccaatttccctgtccattatatcactctatgtttttgcgttctcatagcttagctcccacttataagtgagaacagtttttggttttccgttcctgagtttcttcacttagaataatggcctccagctccatccaagttgctgtgagacattattttgtcccttttgatggctgagtagtattccgtggtgtatatggaccacgtgttctttattcactcttcggtccatggatgctttaggttggttctgtatccttgcaattgcaagtcatcttgctgcaaacatgcatatgtctttttccgctcatggcttcttttcctctggtagatacccaggagtgggattgctggatcgaatggtggatctacttttagttctttaaggaatctccatgctgtttccacagtggttgtactagtttacattcccaccagcaatgtagaggtgttccctgttcaccacatccatgccagccaaaaatgtggaatgcttcacgaatttgcatgtcgtccttctgcaggagccacgctaatcttctctgcctcgttccggttttagtacacgtactgctgacgcaagcatgggtgtctctgttttcttcccaaatagtgtaaagatcttggagccgggactttggttccatggtgttttcaaaccggctttcctcatgtgtgggtgccatgcgggcgtctgcatctccatgcttggagtccgcggggggtctccagacaggatcctggttgtcacctgaagcttggagaagggacaggagtgcactgcaggcgggggtgtgaccacgtccgcacccctcccagagtgcgaggctgtgtctttttagtccatttcttcccccactgcatgctgggacactcatcatgtcttcagccctgtgtgtgtgtgtgagtgtgagagattgtgagtgagtgtgtgtgtgtaagggtgtgtgtaaagcgtgaatgtgtcagtgtgagagtgtgtgtatgcgtgtgagtgttgaatgtgtgtgtgagtgtgactcggctgagaggagacagcgcagctgggcaggtgatgcttggtgagtgtgatagtgtgatgtaatcagaaacatactttggtctctggccctggctctgggcacacagctcctacaacctttagtgctgagtgtctttttttttgctaatgaggtgactgtggctggggctccaggacagcctcctgggggactggttgccagggcaactgaccatgtaattagaggttgggactccacccgtggacctctggggaggggagggagcccgcagaggtggagtggatcaccagtggccggtgttctgctcgatcgtgcctgtgtaatgaagcctccacagactccctcaaggacagcgtttgggggcttgcaggctgctaagcacggggaggttcccggagggtggagccctggggagggtacagcagctccgagctccctgccccatacctcaccctgtgcatctcttcatctgtatcttttgtaacatcctttataaaaaccagtaaatgaggccaggcgcggtggctcacgcctgtaatcccagcactttgggaggctgaggcgggcagatcacgaggtcaggagatcaagaccacggtgaaaccccatatctactaaaaatacaaaaacttagccgggcgtggtggcgggcacctgtagttccagctactcagcaggctgaggcaggagaatggcgtgaaccctggaggcggagcttgcagtgagccgagatcgggccactgcattccagcctgggcaacagagcaagactctgcctcaaaaaaacaaaacaagacaaaacagtaaatgtgtctccctgagttctgtgagctgctctggcaaattaattgaacctgagggggagtcattggaaagccaccctgtagctggtcagtcagaagcactggacactcctgtgccctggacaccccaggcctcgccctgtgctcctctccgcccagctgtccatccggatccttcataacaccctttataataaaccagtagacggtgttcccagagttctgtgagccgtcctagcaaatgatcaaactcaaggagggcaccgtgggaaccccagcttagccgggtggtcaggagcacaggtcacaagctaggatcagcatcctgacccggtggtcaggagcacaggtcacaagtggggcagtctccagggcgagccctggcgccatgggattttctgatgccgaaatccccacccgttttggtgagcagagcattctgtgttgagtgttgaatgtggggacagaaggaaagaagagtttgtttcctgcgggtgagactctgggctgcaccaggtgatgagcagccctggagcgcttgttagttttgtggtgcctttgaagtcacttcgctgggtccgcaatcaaaagccggggttggtggtggttcttttgttaatcagtaattagctccacactgttgattctctgagctcttttttttttcccccagggataaagcgttaattacttttttaacacgatactaacctcstgacagcctcccaccccaagctgggtgtctggggacggcgggcctgtctcccccaccaaggtgtggggtgagtgtggagaggacatttcacagctccccgggggtcaccatcaatgtgagtkttgggacattcttttcctgatttctctgtctctcgatgccatttttgtgaaggtttagcaaatactygatagattgttgtgagaatgtgggcttccttatttgggggagattttttataatggaaaaggtttccttttttggaagtcacctggggacggggatgagtcacccgggggccttggtgcatgtggaggcccaggcttgtgggggagtcgcacagagcacgtgtgtgatgcatttatcagggcctttctcagcctggggacgaggagtggatgtgacggaggaggctcctgttcttgtgggggtggcgaggcgaggatggtgaacacatcagcaaacaggaagcgtggggggaagcgtgcgtgcgaaggagtgcagcccccaggacgctgggccgagccaggcagggacctgcttcagtcctcgaaggaggctgctggcttgtgaccctccttaaccccaccctcaaggcaggcagcgagtggaggagagtgtccctgggaccctccttaaccccaccctcaaggcaggcagcacgtggaggagagtgtccctgtgtccctggaagagaggcctgcatggcagggggcacagagactctgggcctgggtcccccccggcacagtctgtgacctgtgaccaaaggctgaagtctgggctggagctacctgctctgtgggaaacaacagtgtgctctgggcttccatggggtctcccagctcaggggctgtggctcaggagccatgtgccaggcagggcactccgtcagtgtagggtctcccagcacaggggctgtggctcaggagccacgtgccaggcaggtcactccgtcagcataggggctgccatgaggattggctgcattttttcgctgtgtgatgtgactggctgcccagtggtggtggcagagccagcctggggtctgggcatggggcgcctgtccccagcggggcgggctctggggtgcgagcgtctgttctgtgtcaggagtccctgtttctttctccccatgctcacacggggtttttagactttgtgaagggtgtgcttcccaaagaaaaccagctgcaggtgtctgtgctggcacaaggagaacaaacccagagagcactgggttctttcctagaggggatggaatccagccaggcgtgccatgaggctcgcagcctcggggacctgtgctcaccagcacaccaccagtgcccagggctccttgtgctgcaggaagggacactggcatgaagtagggggtggggggagtcgctgtctggggggcactccatgtacctccagattcatgcactcggggaccgggcaacgcctcgggaagcagcctgcgctgatgtcaggatctatagtttaatactcgttagtttgtcccctgtgaaaaggaaagaaagattttctccctactgcactctcatactcaacacagaacacttctgccgtgagatgcgtggatgtttccccacaagcagtgctccagggcacccacccaggcgccctccaattccattgagttctgacgcgtcagatcccccagggccagggcccagtcccacaagactgccccactgtcagatgccaatcccaggttgtgatccatgacccaactggctggaagctggggttcccatgatgccctcgagtttgaacatttgccaggacagctcacagaactcagggaaataccagctgtgtctgctggtttctggtagagggtgttacgaaggatccgatggacagccagggggaaaggggtacagagtgaggcctgggggatcctgggtaccagggcttctgtccctggggagctggggtgcacgggcctcccagcatgtgggtgagttcaccaccctgaagtccattgtacaagagttttgagggagcctggtctccagcccctgtccttcctggaggacggcagggggctggggagtgctgtcgagggccccgcaagtctcctgtcactcaggtgagattgaaaggcttgttaggagtaacagtagatgctcccatcctgtaggaaatgtaaggtgttttttttggttttttttgagacggagtctcgctctgttgcccaggctggagtgcagtggcgtgatctcagctcactgcaagctccacctcctgggttcacgccattctgtctcagcctcccgagtagctgggactacaggtgcccgccagcacgcctgcctaatttttttgtatttttttttttttttagcagagacggggtttcaccgtgttagccaggatgatctcaatctcctgacctcgtgacccgcccgcctcggcctcccaaagtgctgggattacaggcgtgagccatcgcgccgagccaggaaaatgtaaggttttaagaactttgtacaagaaccaaatagaacaaaagatgctcctgtcacccttcccactcaggaaattacaaggaatttatgagctttgtgtcaggaaccagggactaagaccaataaatacctgctgcttatcacacagctccccaggtccgctcccgtgaggagcaggctctgcctttgcaagcactttcacgaacagcagatccatcttcctcctgttagcaatcaggcggtcagggtggcggccacttccctgccatgccgcagagaccctgacctcctccgacatcatgctccggccccggcttctgtcctagctgtggctcgctggtctcgagatggctgccttgccccggctgtttcatctgcattccaggcaggaaggtcgagaagggcacgcctgggcttttcttttgaagactccccctgagccccaccctgccgcaaggggcttgggctgtcaccctgtgggctgagtccagggctgccgtgttggagaggcgtgtgggaatgtgcgttttgggatggcagcccgagcctcctacaacttggcagagttgtcaggatttcaagcccygtgtgtctttgaccttttacctgagctgtgtgagaagaggcattttcttgtttctttgcgagtccttcctcactgcacttcagccagggcgccgacacatggtcgttcgacttctggcttggcctcttttgtgagtgtggggcctggtcatatcctcttggtcagtgtctstgtgatgatgagaacgggaagacggccacggtgcccaccctggcaggactctctcccctcgctggcgctggctcagctgccgtgagcggccgtaggcactgtcccgggccctcctgtggttgctcccagccatgctgctggctgcttctgccgtcctggcttgcagagactctgggtcatgcggggaagagggcagagtcctcctccctgctcaggcaagagaggatccagcaagatttcttcctccccaccctcctgcccctcccagtctgggcagcagataaaagccagggccccacacttctgccacctcctgctgctcacacactccagccagggacctgcccccsgggtccaacaaggtaaggacagcggggctgcccctgagcagaactctctttcttccctggctgactttgaggcacctgagtcattgtgggtagacaaaagggggagggagaacgggagcttggggtcctggtctcagaccccatgctgtctccaagtctgtgccctctgggctggactcttcctcagccccagccccagcgcctccagctccgctctgtcccctcagggggcattgaccccttgtagccccgtggcttgttgcccctgcaccccataaccctgtgttgacttgggcacctgtgacattcatgcatctggcctgcgcctgtctccagcgcccacattcccacacagagctctgtcaggacgtgccacagcaggactcccaagtccaytccaccttctccgtcagggcaggccaatcctcgtctgctgcaaatgtcctgggagtaacaaacccagagctggcctctctggtgtggtggccgccggcgccatgtagctgcctgcccaggagaagcggcgaggcccacgtgtgaggccctgagagctggaaataggtactggatttcagtgtccgatggagaagtctgtgatattttggatatgttggattaggtaaaacacatcgttaaagttaattccacttttctctgtgttttactgtggccactggagcattcagtggtacggtggctgcggcttgccttctcccgctgggtcagcaccagggtacaggtcatctgtagacttttgcctgagacacagacgcctgcttgggacatggactccagctcctcagccctgtcctccagcagcggtgaaatctggagtgttcttgagtaacgcactggcgccaagggggtgctgagccttcgctctgccgtccttggctgaacaagctgtttctctggggaccacgtcaggtaacacgtaggacagyggggtggtccagcagggagggcatgcgcatctgtgtggcaggactgggggtgattttatccgggatcccctggggtggcccagcgttggctcgggtgtttcattctcacagagaacaggcagcttcaggggccacgcgtgcacgagaggagcccccagcccccacggcgcgttcctgggtttccatgctgcggcatttaagaaaagagctctgtgtcgtgctgctggggtagcttccgtgagctacgctggcctttttttttttttttttttttttttttttaataaaaaggagggctgggcatagtggctgatgcctgtaatcccagcactttgggaggccgaggtgggtggatcacttgaggtcaggagttcaagaccagcctggccaacctggcaaaaccccgtctctactaaaaacacaaaaagttagctgggcgtggtggagcatacctgtgatcccagctacttgggaggctgaggcaggagaattgcttgaacccggagaattgcttgaacccaggaggtggaggttgcagtgagccaagattgcaccatctcactccagtctaggcgacagaggaagactctgtctcaaaaaaaaaaaaaaaaaaaaaaagagacagggttttgccatgttgcctaggctagtctcaaactcctgatctgcctgcctcagcctcccagagtgctgggattacaggcatgagccaccagccaataccaratttgaacagtggtcagtcctggggatggagacggggtgagggctgagcattcccttctgaccatgtacctcgtcttggtttaaaatttttacagcaaggtgtattactctcttttataaaatatcattaatttacaaaatcttgtatttttaatttttgtgggtacatagtaggtatatatatttataaatttacaaaatctttaaaaaagaaccccacagagttaaaagttggagtgttttttgcttgaaatgttctattgcagctgaaggactgggtgggtctgtctcccccaggctgtgaggctatcagggctggtgctccaggttgattggagggctgagtttttgtttcttcccagtccattgagacctgattttagaagttagcaaaaggaagctctgtgtcaagtgctcggcacctctctgctcttcccgtcttaaattgcagcaggcttctttccagctagaggctgaagtgttctcagctgatgggaaacctcctttccagtgaagatgtgagataagcactttggttgggttttgatccttggctcctatctgtgggagcagtgactttgtggtgagatggcctgggttttgagtcctgattctgctactgactggctgtgtggctctgggcaagctgctgaacctctctgtgcctcagtctcctcatctgtaaggtgtaagggcttccatgaggagcaaatgtgtggggccacagagctgccaggtcaggcctggcctgcagaggggcctggtgagggcgaccgacgtgcctggggacaggtaccccagcctataggaggccacacaattcaagttagaacgccttgccccaaattctggaactctttctgttggtgttggaggagaacacaccctccctctccaaggagctgggcctgttgcatcctggcagggctgacgtggcacctgctgccccgtgccctgggaagctgaaccagccggacgcagctcccggacgcagcagaaacggaataaccactcggcccaccggaagctgtgatccttgctggacgtggaagtctccgctgcacaataagaagcgacggtttcaggcaggccaagggcatgatggtttcaactccagccacaggggccctcttctccggggcctgcaggtgtacccctgccctgagttcgacacggccactgttttgamaatgcctgctcagaaacgctgacacagcgttaaggaatatacacacaggcaaggtggcaagccccgtcattccggggggcagccgagttctgtttccccaccccgtcaccccgagggagtgaaatagggtaaggttcaccaagacattctgcagatcagcgtgggcagcagcactctggagggktcagtgcctcccgcctggggacagaggcctctgcttctcccgacccgtaggctgcagtgatccatgcagttcactgctctgtctgaaggtttgacttaggttttaagtgtttttactcagagcaagctgatacatgcgcattttagtaatcgtgataattgttccaacagatttcacgtctgaaactacatcttgtttagaaatcactttccatgtaggagttttccttctgggatgcatttcaagctggggcactcgctactggagacgtcatcggatttactgaggagggtgtgtttgcgtgtgtttggctacctacggatactacagatgaggcgctgtctaattttgtttcacmatgagctgaaatttatccccacaccaatcctctttttgccctacggagtttgtgccttggccccaccctaggtggctccggcaggttcctcagctgtgtgtacccaccacccccaccttgtctgcacgtgactgtgactgactttaggaggccacacaattcaggaagcagagtgtgccaccctggccagacataccatattttgaaaactccgtgcgttctcgttatttcastgtgaggtgcctgagtggcggggccccgatagccagtcccctgtgaccttcagaaggaggccactgctcccgtagtgggtgcctcatgcgggtggggagctctgtgtgcccacctttcatggaagcagggcatgtacagccgtgtggcggcagcaacagcgtaagatggttccgacaggctccagagcacaggagacgggcctggctctgggccgcatgcgggcttgtgtgctttgtttggtttgcatagtaacccgcgccctgtccccatgtggattggaaggacactctgtcagccgctccctgccatcaccacacactcctggagcctctgccaccacggcccgtgctgaccccagagcgagtcaaagccaggagccttcccacggtgggacttctatttttatgtgtgtccttatttgtttattgaaagatgtgaagggcaagtgggattggcacacagaacaagacggtgccgcctgctggccacagcaaagccacctcccccggtcgccgctgtcctgggcaaggcctggtccctgcagaaccggacayggcctgccagagccagtgtgtgtggcaggacaggggacacctgcagaggcttggcctgtggatgctgctccttactgggatggagggagaagacgcggcccacattcctcaggctggagggtgggcaggatgggcaggagctgtggggcccgtgagtgctgggccttgaccctctctgttgaggtcctgcctgtgtcactggcctggggacagctcccgcctggctgagtgccgagctaaatycagrtagacaggttggtgagatggcgctcccrgcgagctcacagtgtctcattaacctcataaatgcagcggacactgggctgcaggtgacagacgcgttctctggagcaccgacagcccaggcgtgccggagagagaggacttgagtgactgtcctcctggaacccagggtgccttgtcctggcacttctgtgtacatcatccagccccgttttcacgttcaggaagtcacgaatccacagtgtctttgaagaaagtggggaatagagttatcaaccrtcactccacggagagtctaaggcagagagaagttgggttccccttccacggttccctgyccccggggacacagttgtgggaggtctcarggcagagacgccgcacggtggggtagggggctctggtgccaataccaatgcagcccggttccctgtcctgggcctgccagtgactttgtggtcctgggcaggattattttcagaggcagtggagctagcggggcagagctgtgctgagcgctgagggatcatttgtgtaaagcacctgccactgagtgtgacctcagggttgcccgtgcgacctcagcgtggcccatgggacctcgctgtggtgtgtctcagcaacatcatctttcttactgtccctgttctctgggcctctctcagaccttggggacagcaagctctgccccgtgaactcagaggctgcagctcctgattgtgggtgtccacagtgggcaggcctggcggggtgagggtgggtgggtgtttctgtcgggatgaggggaaggcggggatgaggtgggggtgcacacctgggctgaggggagcagagggaagcagggcttgctggcacattcccagggggctgctgtagggccagtgtcccctcctggggtggcaggaggtggctcctcacggtggccggggtggcccacggcaggccagtgtgcggtcctcaagctgctggtgacaaacgcaaggggcctgctgccctgtcccctcgggcgggcgccacttccttcctgcatgttcctgttccgcattacagattgtttttatggcccccactacgtgagatcctggggcaggggctgtgggggctctagagtgggggtgaacgcacgtctgaggctcatcagggactcagcgtggggccctggggtgggtttgccattgccttttctcgagggccccgtgactggacagcccaactgctctccaggtcagttttcttgtccagacccggggtcagggcggacactggatgagggggagtgtcagtgagggaaacagagaccttttagaaatgatgtcacactgacacctgtgtgctggacctcccacgttccccgcatctggtgctagtgacgtcccactgctggggtgagggaggttaatcacacctggagtttcgctcggtcactggcatgagaaaggaaatgtggaatcttyatggggtttatctgaagaaagattttattgacatcctaaaaacactctattttatgttgtagctctgaggaggcctccaggaaattgaatcaacatactcggttcttctcttttaatatttttgtataaatcattaagttttcatgtccagggaaataatcaggagatattatattcctatgacatttgtttgggcgatatgttcagatgagctttgttcttcttaaccttgaaaaagagatgtggaggtaaaaaccgaagagcgacgtggagtaggacgccacatcggccccgttagtgcgactcccaggcagagaactgccgcgtgcttcagctttgattgacactgagcatccccagccaccggcactgtcgtcagtattcagacagtgcagctcccgttcatcagaaacaccaccagaaggggattttggcagaggtcttatgccaaaatccattatttcaaaataagtaaaaccatgattctaaacattctaggtttgctgtaaagagcatgatgaaaagctccagctatctcaatgttccatacaggttgaggttttgtttccgttctgctttttacctgaagaggatctcgtgtgtgtgtgtgtgtgtgtgtgtgtgtatgtgtgtgtctacctacctactacctatttgtcatctatctataattgacaaaatatgattgtgtatatggagtaccatgtgatctatgtgtacattgtagaaagattaattaagctaattaacatagctatcagctcaccaacatcgtttttggtggtgtggatgttaaaaatctattctttccctgattttgaaacatgatacgttattgttaactggtcgccacgcagcgcggccgatcacgaacacgtccctccagtctaactgaaactgctccctttgatcagcacctcccctgcccgtccttgcccaagcccccagcccctggtaaccaccgtgctcctcccagttctggtgagacctccgtttccgattcctcgtgtgagtgaggtcgtgcaggacttgtcgttctgtgactggctgattatcgacttagtgtcgggtctaccacgtttgtctgtgatgttgccagtgacaggacttccttcttccttatggctgaataataacacrgcgttacgcaccgcacgctcgctatccattcgtctgttggtgggcacctgggctgcctccatcgtgtggctgttgggggtgatgctgcagtgaacatgggcgtgccggtgtctatttgacacactgatttcagttcctttagatacatacccagaagtgggattgccggaccttatggtagttccttttgttttcttgagacggagtcttgctctgtcgcccaggctggagtgcgatggcacggtctcggctcactgcaagctccgcctcttgggttcaagcgattcttttgcttcagcctcccgagtagctgggattacagacgcccgccaccatgccgggctaattttgtatgtttagtagagatggggtttcaccatgttggccagactggtctcgaactcctgacctcaagtgatccacccgccttggcctcccaaagtgctgggattacaggtgtgagccaccgccctgggccagtagttccatttttgacttttggaggcacctccagatggtttgtgtagtggccacactgattgacgctctctctccctcacagcgtgccaggtgccttttctctgcgttctcgtcaacacctgttacattcgtctttttgataatagccaactgaacggcatgaaatgacacctccctgtggcttcgatttgcttctccctgatggttaataatgccgaacagctcttcgttaacctgctggctgtcggtgtggctccttctgaggcacagccgttcgggtcctttgctgtttgctttcttgctattgagtctgagcccctttaccccgtggatgctgggcctgcatcgggcatgtggtctgcagggttttctctcccttgcgggtcgtctctttaccctgtcgttccctttgtcatgcagaagctgtttagtttgccgtaatcccagtggtctatgtttgcttttgtcgtgtatcttttttaaagctctgccatctgttttctccatggggaaaggtttgggaatatcgatgatgtcatcatactcctggctgcttcttgacattttccatgcccagcattgttctcagtgcgccccgggggtctttggttctccatagcctgctggcgtccatgtgtttttattctttctttatggttgaggaaactgaggcacagcttggaagcggttggcactggggttaggctccagtagtctcggcatgtagcagcaaatgtgggaggggcagcacaggggaaaggtgaggggagagtcaggagagaaggacgccgcataccagatgcccagaggccccggcggcctccatccaagcacaggcccaagcaccagctgcaagagccagaggacggcactcccgcgcctgccacgagcctcacgtggagagtggacagtggcatggaaacgccagagggttagaactgagcagcaggacggggtctgtgggtgcacgagaggaggcccttggtctggaacagcctggggtccccatgtgctgtcactgtgtggactggccacacctggtgtgccgcttcctttctcagtcatggccagctgccgaatgccgtaccagggcaggggcagtggagcaggtgtctgccctacattgctcatccttggtagtttgggtgatgaggttttgagacctggatgctggagaacaggcagacatgggtgcccggcacgccagctccccgagcaccagctcccctgccgagcaccagctcccatatgccagtcccctgagaaccagctccctgagcacgccagccccccaaggaccagctcccacacaccagccctctcaccgcggtgtgcctgtccccacctcccaagggcrgaaggaggggcctccaggcctcgtcttccttcactgtgcccatgctcagagatggtgacttcataagaggccacagaggctccgcaagtccccaggccgtcggctgcctggccctggcctgcgtggcagcgcaacctcgttggtagagtcaggaggctgggcctccactaggatgttatacaggcagcatggcttaggtgtcagagacgggaaaggacctggaagaaaagaactgtttcctttaggccccgtkgggtaaccagaaggtaagactaggaggtgtgcgatggtgatggggcggaggaggggacagcgggaacctgtggaggggcgggctcaagccctggtcgtgagcaggatgacattcagatagctgggagcacgaggaggccacgtgcccatggtggaggagccacagcacaaagcaagccacgccatgccacccacgtgctgccatatcacatcacgccacccacgccactcacacgccacccatgccacccacaccacctctacccctcacgtcaccgacgccactcacatgccactcacatrccattgacacgccacccacgccactcacatgccacccatgccacccacaccacctctgcccctcacatgtcacccacgccactcacatgccactcacatgccattgacacgccaccacgccacttacgccacccacgctactacccatgccacccatgtgccgtccaccacccacgccacccacaccactcacatgccacacacagaaccagtgtggaggctggacagggggggcttctcacctgagagcgtgaggaagcagtggggagcacctggcaattctggagagctcagccaagtcaccaaagtgccgtgccgcgctagcacgctttgctgtgcgggcatcggttgtgtcacacactgggccgtgtggtggccttgcgtggtgagggagcaggaggcaggctcaggacacaccacaaragcaaatgtcagagctgggacccaggggcagcaccctccagtagcagcacccagatcccgcctctctccagccccggggaggctgagccggggtccccagctgggagtgcccccaggcgcctggccctggcaggcatgaagccgttcaggaggagggcagggccagcataggccccacaatgtccccacagtttttacagtgagaagtggccttagaggtcaagtccaggagcggcctgcagggcggcctctgcacgcagtactgggcatcggcgctgctgcggagctcggagagacctgaggccgggcccacagatgctcacttctcggtaggggcattctggggcctcagggctgggtccgcctggcatttggggagtctgttattcagacatggaaagggaacgactctcccaggaagggatttttttttttccttatcacgagaaaggcagtgacccaggcgtggggcaggaaggacaacctggcttcatcatcacaggcggccacggaggagctcagactcaggcccacagcacctcagctactctggagattaaggagtggagaagcctcagccagggctcggggcttggggcagtgccctggctctccaggtgcgctaagcaaacagatcatgccaggctttttccctgatggcggctygagtcggaagccagagtgtagaacagtagcggagcccgcccagctgttcctaagcaaggcctaggccccactgcagggtcacacggaaggctcacatgccgcagccctggcccccacacctgcagctcgggcacccctggggacagccgtggtggtcaatctgctcacttcaaagagggggagccaaggccagagaagtcaagtgacctgccaggaccccagctctgcagcccaaagagkccaggactgaagcaaaagcagggagaggggaggacaatgcagccccagccccttgtgcctgacgtcacaccaggctggcaccaggcctccaaccccagccgggttcctcrgcctcccctagcagtggcgagcacggcattgtttaccgggggctgtggacttttctgtgggtgcacctgcagcgttcgtctgtctgagagcagactgctgtcctccgtggggccagtgcctctgccctcctggcacacggccacagtgcctccctccggaagaatggcctgggagtcaaagctgcaagttttagttgtctcctcatgtacaaggatttctccggcagaggaagacacagtgagagaatcaggtggcacgccggtaatgcctgtgttgaaagacctgctcgtgaatgagctctgyccctataatacttctgttctatcacagccgaaaagctcacccgactgctgcccacagagacttcagataccttggcaaaaacaagacatcctttccttttcccgaccgcagctcttggatggaggcgcagaggcctagtgcttctgagtggagccatgcctggcgccagcctggctctcccgtgtcagctccgcctaaagcggctcccaggcctctgtgcctcagcgaaaagggcttccctgtgtatttgcaactgcacggcctgtttccttgccctaaaatttgttaaaatcttcaagatgtgaacaagcttttttcctcttaaaaaaatgacatatttagaagtaggctgtgggtccctgggatgctggttcccccaagtatttttctctaatagaaatctttggttttgtttttaaaaggaattctccattcacgtactgttctgaatggtagccatgtttgctttaagataaaagaacaccccgcctgcaaacctgagtggggctggcactcctgggtgggggaacgttgaccctgtggcttcctgtggccctggagaaaactcaggcttgctgttatcacaggggtacccatgagtgacttttggattttgggaaatgcaaagcatgtagataagaagttggtccctagatatgtgtgagtcccaaaggcccactgggtggggcgctggtgaattgagctgaaagtagcagaatctgccttgagctgacctaggtgggaagccccaggggtcagctcctctacgctggcctttgcttggcttggcggaggcgcgcaaggcccctgactgtatctgttcctcctctgggccaccctctaggttgctttccactgcaggcctgtctccttgaggtgacatcgtggctgcctctgcaccagccatcacaacttgatacagataagtctgatgtcaggaaaagggagttttttttgttttgttttgtttttctggagacagggtctccctctgtcactaaggcttaagtgcagtggcgcaatcgtggctcactgcagccttgaactcctgtgttcaggtgatcctcctgcctccgaaagtgctggaattacaggcgtgagccaccatgcctggacaggaaaagggaaatttctttttgcaaccttttgtcaggggctgaaacctttctggaagctccaaaagactcctttctctctctcattaactatctctaaggcagtcattaggacgcatcccatgaarccagatgacttctgcatagccattgccttctatacctcaggcaggttcttgttagaagaagtgccaggcagaggttgtgtgggcagccagtcatatttgcatattttggggtgactgtgcagacagtgctggaccaaggaagttgtctgggtcctcgctgcagagggaggaggaagcagctcacacgcttgctgttgtctggtgggagggctgcatttctcctctctcccccactttctctctctctctctctctcacacacacacagacacacacacacacacacacacactcacactcactgttgggtttcttgggctgctaacaggattaaatgaatgtcttggttccatgatgtgcatgttacgctagagagctaagttagttaacatcgctcattgggatagaaggaacgtactgaggaacgtactgaggattagaagtcagaattcttgaatctgcaaatctttttttttttttttttttttttgagacagagtcttgctcttgttgcccaggctggagtgctcactgtaacctctgcctcccgagttcaagcgattctcctgcctcagcctcctgagaagctgggattacaggcatgctaattttttgtatttttaatagagacagggtttcaccatgttggccaggctggtctcaaactcctgacctcaggtgatccaccagcctcggcctcccacagtgctgggattacaggtgtgagccaccgtgcccggcctgcaaatcttctattttgttcagacactaactccagccctataaatagtcatccaatacttccagtaaatggtgcgcctcatattgatctgcctggttgccttaccgtgtttgttacattgctgtgtaacgagttacccacaaacttagcagcgaaaacagcagacatctattatctcacacagctgcggagggtcaggaatccaggagtggcttagcgggcgattctgggtgtcacgtggagtcacatggggtcaatgtgttggccggggatgcagtcacctgaagccttgtggggggaaggaggggctcccccaggcctgggaaggctgcggctgccccatcacgctctctcctccaccaggttcacaggttcacagaagtaaaggctgagcatgtcaggactgagctgagcggttcccacctctcagtccacagtttcccacagagcacgcaggggccgcaccagggctgggacggggctgcgaccaggctaggggagcatcctgggcaaaccctgcyggggacaggttckttgtgtctgatgccgtgggagatgcacgagcagtgactttcactttatcccactgtggccccgtgaccctgagcgagaatgcactggccgggcctccagggggcgctcccttaggaacaccccatccccgtccccgtgtgctgtcgagggcctctagcgggcgctcccttgataacaccccacccccgtcgctgttgttgtcgggggcctcccgcgccccaggaggtttcccagggcgatgctctggtccctgggtcctttgatctcatctccctagtttagcctttgaactccatttcagattgagaggtttcaggctggagtgacatggagggacgtgcctgacttctggaggataagaggcggcccaccccacagctcttccagcgtgggagctctgaacatgggacccggagcaccaccgtttagcaaaccttgctgcagtttggagagagtgtcgcgggcgcctggcctgtccggcaggctgggtggctgttctctgttgagcccacagccatgccccacatgcaggacgtttgcctatcacttggaggcctttcagggatcttgctagcccayggctgagcacagggtagacctcaccaactcacccacaacctggccccttgacacactggtgctgtgaggaggaagatgtgggcactcttaggtccctggtcctaggggtctgtgctggggtggggctcgttgacctgcatcctggctggccctgtgactctgcctgtttacagtgagcagctcctggccaaaagctgcttattggattagccggtgccccrayggcagagcccgcagctgtgcgcaggaggacgaacctgtgtgtatgtcctgcttcagcgcgctcctggggtcccttgagttggtctctgtgactagaaggacagtgctggccacgcaggtggcaccctgggggtgcccagcacccacttcctgctgagcagatgctctgggtggcaacggcccctgccaagcctgggcagctcaggccaggtcctaatccctccgcttgagctcggctcctcaccctttggccaggctgacacctgctccccgcaggtccttctcgccggcttcaggcagcacaggaccgagggctgaagatgctgagcagctacccggcctgcctcttctcagggatctgtgtggccctgctggcggtggctttggcctattacttctactggtgagtgaggccggggcccgggggcctgggcagtcctgggggcctttactgtgtgctcccctcctcttccagccctggaccgttctctgcatgtcaacaaaccctgcctagccctttgcaggggaactcctgggaggtagggaagcaggggatggcaggaactcattctgatccctcctggsgtccttgggcagctctcccatccttctgcaaaggggtttttgttcagaacattcctgaaggagctgagcggtttcataccatctgggcggtgtttgtagatgcctggcatgtcctgggacggacaagtgcctgatgtatgggcacagactcccactgccccccaaggcaggtgctgtaggatggctgatttacatggtgatctgcaccctgagcagaaaatgcgtagttaccatcaaagtggcgctgctctgtcacacccattgcctgatgggctggtttatggtgatcgcaggcgatttcccagctgcccttgaccagagtccgtgccggctcttactgcagaagccgagaatcagcaggtgtcacagatcacgctggcctaggatttcagagactcggtcccaaccccgctgtgtctccgggctgggattagatggggtgtttgtgctccaggcctccagtgctcrttggtaaaacgggacactgatgccgcctgctgtttctgcagagggtcaaagggcacaagatgcgtgccagcctctgtccatggggtgtgtgatgatggtaccaggtggtgcagggggcagctggggggacccaaaaaccccaagtctgggtgccaactttattttctagagccggagaacgrggtgatttcctaggaagagaccacagctcccctggaggttccacgctagaytgtgtttgtttttcttggtgcacacttggccaggagctgcttctctctgatctggaagctttctcttctatagatccgattaatgcacttccattgctaacagcggggagggtcactgcaggtgacacaggcaggaggatgcccagtcttccccatgactcagtttatgtaaaaacgatcaatactatttacaaagaggtttacccagagccaaaagacagaatcctaaggctgaggcaggaggatcccttgagctcaggaggtcaaggccacagtgagctgtgattacgccactgcactccagcctgggcaacagagcgagaccccatctctaaaaaacaaacagaacctaagtgtggaatttaggagacaaattagcttgggatttggggcctctgagagtttsagcaagggggtcggtcattggtgagggttccaaaaccccaggagcaaccgctcactcatcctcaacctggggctaccgcgagtgtgacgggggccatgtatacagggcaggctggccccagcgagcgggcgactctggcagcttccacggaccgttcctggcgcctgggcggagaaagggtatcaaatcatttcctgggattcgtggctgagctatgcagtttcacaaatgctcaaaatgatgaaagacctattaggtgttgggaaaagagcgcctctgtctgggaagagtgccgcattgcgcctgagcagctgctcgtaattggcttatgccaagcctctcagcttcagcctgctgaccaggtggcaggggactggctgtgccacctcctcacccacagcgtttccaaggatgtgcatttctcctttgccctcaggtcttcagtaagttagctgtggaattcgaggcctcaagtggtggcctgcgccgtggcagcgtacccacaggtgccatttagtggcacttgcagtacgacctgggagcttccggaacctgtgggcttgtgaggtccctgttgatcctgtttgacctggagggccacagaggcggcttggtttttttgtggggacagagacgttgagcgtcacggtgggtgctaggcctgtaataggagcgattctgcattgatggcaccacgggtccagggaggcctcgccagctccctcccagagcaggaaggcgggctggccactcaccaggagcctgggagtctggcgtccttcasgaggcgctcctgaagcacctctgcctaccctgcattcgccacacgtgcccaggtacctggcgacggacagcagggagcccacaatgccagctcttcctggagacgcccgcccctgcggtggccactggtgttcagtatgtgactctctgagcgtggggttctagaccaggaaccctctgtgctcggtccacatgaaaagagcascttctcgttcatcttcagagacctgttcttaatgggcagcaggggctccgaatgctgagaaaaccccacaggtggcagctgggtgcctggccctgcagccacgcctgcccgcggtcaccctagggtgcagcggtcaccctgggctgctgtggtcaggtggggtcttgtctttagcccccttcggtggctcacttggcgggaggagggtggcacggcggtgccattgcctcatctgggctcagggagacaaggcaggacctctgttctgtctcccgtcacctgtgttgtatacagagaaaaagccgtcctggcagccctcagagccccttgcctgttggggatggaggaagacaggcctcggagccttgttcatctggcatttccacagcagagggagggaggcccgctccccagggctgggtggccagggtgcatggtcatgctgggacatcattttctttttttcttttttttggtggggggcgggatggagtctcgctctgtcgctcaggctggagtgcagtggagtgatctcagctcactgcaagctccgtctcccaggttcacaccattctcctgcctcagcctcccgagtagctgggactacaggtgccggccaccacgcccggctaattttttgtatttttaatagagacggggtttcaccgtgttagccaggatgatctcgatctcctgacctcgtgatccacctgcctcggcctcccaaagtgctgggattacaggcgtgagccactgcgcccacccgggacatcattttctacttgtaaaccagaaacctccttcctccctcctgccgtcccataggattttatcgatcacctactgtataccaggcactggctaagccctgcacgcacagtggtgagcaggcagtcctcaccctcctggggctcgatttcccagaaccctcaagagaaagccagtcctcaggggtcagcaagttccacattcagcttcagctttcggccattcctgccgccaggccacgctgagagtctgccggggcacctcggttccctgcgcctggcctgccaggcctcagccgccacggcctgtgtcacggaggaagggggctgcagctgcacccccgggaggggaggttggagtcggggtggggcgggccgcgtgctgttggtgtagggtgggcgatggcagtagtggcagcttattaccacatcaggagaggccggagcgttttcagcaaggtcagaagcctgcgctgtgtttaaaatcagggcgagagggagacagggagggaacgttccgccgcctaaaccactttcccgccgcatctttcacctggagtggaggggcaagtgcctgggcccagtggtggcagcttcgggagggttccatgaggctgcctcgggaagcaagggtcccggcrgagctggrtgttctcctgggccccctcaggacagcagcatccacttcaggcgccgcctctctaaggagccacacctccctctcgggccaagtatggaaacgagccacagcaccacgtgtgctagggccccagcatttcacccacgtggcagaatctgtgccccaaatgtcacagcccctccccacctcggaaatgcaggctgagtggaggccccggccctcgccactctggagcgatggctatttcaggctccaggaggccgctgagtggttcccgggctggccctgcattgcggctgggcaggggccacacgtccctcccccgtgggccctgggtgcctggaatctggagcagagagagagagggaaggtaacagcgtggcctgtacatccctgcctgcaggcgctggccttgctgtccctgggtgctgcctgtgtactccagggcactctctttcctggagaggaggccgcgggagtcatcgcggggcagatcctggaggccagcaaggccgcccctcctcctaagtggcactgattgacaggggagaaagacagaggcttgttccccagaaaagcacagaaaaccagccttgttcctcagacaggagatgcatgtgccgggaggcaggcagggggacggctgtgctcggcctctgtgcagtgggattattagggacaaattccagaacaaaacttgggtttcatctaagctttttggggatttggggaaagcagaagaaaagagggagcccaggaggaggtcaatacaccgtgccaggaaatgaggaaaagctcagatgtgcagtgtcagcgcttttccatgaatcacctcttacctctagaacagcaagtgcgggaggtgtccaggtgcgggggggccacgtgccctcaggggcttccctccccagcccgcctggagacatcatcactgactcagctccggcaggcaagggtccctcggggtctaccactgggattgacgccagcaagtcggaccctttctcagaagcccagagggagggcagagccgtagccacagtttggaggcatctgctgggctagtgcatgttttaacagcacctatgacaaggtgaggcagcatgggtggccctgcaggtggcggtttgcatatgtgcacatccagccagctccgttttccagtctggggactatggtgacaggaagtaaaaagcctgcgatttggcctacggggtcccagggtcatcccggggtcgcaccttggctaccaggcttgagggttctgtgtgcgatttcaggagagacacacagcccatcgcacacctgacagytgtcaccctaaagaaaattcggctgaactgtgcacattsgggagcattttcattcacattacacatttcatttcacttcacgttttattggtttgagtaatggtttagaaactatcttttacttcaaaatgtttgtgcatctgagattttctgactttatatctggacagggcgccgtaatggtagacgatggccgaggttcagggaaccctgtttctgtggttcaggacaggtccagcctttytgagccctgtccccgcagagagccccctttccaggcacccgtgtcttgggtcgccgctggccctgtgaggtgacactctgcagctcttgcactgtccaggccaagggtggctgttctgaaacctactcggtttattccatcttgaatcaatgcattttttcaagtccgtgcctcagggtgcctgtagaatgacagatgtggcatttcaatcggtaaataatgagtacacctttaaggtccaggcactctttgtttagaacattgtggaatgcctacatcatctcatgcttgcacaggagcgtggctttgtcagaactcatccccaggcagccctgtgggcacctggtgggggctggacaggggtcacgaggagaagccagcaggagggtggtgggccctccaccttgtccccgcaggactcccctctctgcccagacacactcagcctccaccaggactcaggggttccagccaagctcctcttaccaacgatgccccgtgactgccccagggacgggagggctcaatgccattcccctgcaggccctgtctctccccagcttccagttggttgtcctgcagcctcaggtctctgatgggatgaagcaaagtcgagaacttacggtttgtctggctttattcttgtgagagtgggagtgacaagctctgtacatccccagcagaaaccagaattccacctcctacataactttgtaaattgcaaaatataatgaaaagtgcatgaggccaggcacagtggctcacgcctataatcccagcactttgggaagccgaggtgggtgggtcacctgaggtcaagagttcgagatcagcctggccaacatggcaaaatcccttctctactaaaaatacaaaaatcagccaggcgtggtagcccgcacctgtaatcccagctacttgggaggctgaggcaggagaatcacttgaatccaggaggcagagtttgcagtgagctgaggtcatgccactgcattccagcctaggggacaaaacaagactccttcttaaaaaaaaaaaaaaaagtgcatgagacattgatgaccagtttaatgaataagtatgcagcaaatatccatctgtttctatagagtaaaagtagttattataacgcgtagttcgttgtaagaaaattatgtctaggtcaacttagctgtgactgttttatgtgtgcatgcatgtatgtgtgtgtgtgtacatgggcgtgtgtgtgttttggagtgtggtccccacaaatctgccacccttggagaatgctcttctgccctggtgcatggctgtgccctagcatgggaagcgcctgctgtgtcctgcaggcccgcagacttgtcacaggtccattgtgcagtcatcaggccctgggagctttccacatccctccacctcccacccaacatcaccactctccggccagtgagaccrtcacagcaccccagaggagacaaattctggagctcagagagctggggtaggtgacgggagggtggggggctggaggtccttggccagcagccttcccatcctgggccaccagcaccctcatcctcccctcgtcctgcccagctccacctcctccctgccctcttcctgccagggtttgcagtttacactggcagtgatgcagtggcagacacaacttggggaaataactctaggaccctggtctttagttccgattccyggtgagacagtacctggcggggagcttctcgccctcttcagaagtggcctgggggccctggggctactgatccagcccaaagctgcagtcaggagagcgtgcagccgtgtgggtctcataagagaggccgaccagggctgcccaagcggagcttctgtttggcctctacctgctggagtgacgcccccggcatctccagcgaggcctggaaacgtcgcagtctcctcttcactgagtccaaagtcacttccatctcgggcccgtccagtgtctgtcggggccttgattctgagatgagattgtttgctgaartgctccatggactctttcaggagtgacgttgttctttcaggaactgtaaacggaggtggcatgtaaccagtgtggactaagaagccatgctgctgtttcttttcttttcttttttttttttttgagacagagtttcaaaaaaaactgcctcccgggttcaagtgattctcctgcctcagcctcctgagtggctgggattataggcgcctgccaccacacccggctaattttttgtatttttagtagagacggggtttcaccatgttggtgagaccatcaccatgatggtctcaagctcctgacctcaagtgatctgcccaccttggcctcccaaagtgctgggattacaggcatgagccaccgtgcccagcctatgctggctgtttctcacaaatgtatattgaatacgagccattcgcttagaaaacattgatcaagcatctgtattctatgccaggcccacgtgagtaagagtaatagctgttgatgatgtaagctgtgtttttggccaaaggtaacagagatagtgatttaaacaccgttacctcttgtcttccccgcctcttgaagagggcagctgctggtgtgacctcagctgctccccagaccctaaggggatctgggaccttccaccttctaccaacggtgttggtcttctgtcctcacgcctatggtttcacgctcccacagtggctcctgcaccttcagacactgcctcctcaccgagggagggaagaacgacaaaggtgatgaccagaggtatttgtttcttgtcttaggaaagcaaaagcctcccttaaagcccccgcagacttctccctggctggacccagggcasatgcccatcccatccctggatcacttgctcaaagaggggatgggattacctttatggcttagatctggggctgggcttccctcccatatccaagggtgagcgctgccataatagcaggaggttctgttaccagcaaagggggtagtggcaggtaggtaactcacagtgacttgcatgttgcaaaaggcggggttctgttatccggaattggaggagtggttttaggtatgtcatataattatgcctttaaatccattggttgagaaaacaggcaatgctaaaagattctcatgaacctagcagcggttttaattttgtattttatttattttatcagtatctaaatacaatagaaatataaatacaatagaaatggaatggatcatgtgagatgtgtgttgttgacgaacgtgtagtcagtgcttcatgcacatgggatccaagtccccaaacagtggctgcagatccacaccctgctccaggtgctgaggtgccccagacagctgctcctagtcagtgaagcattgactctttagtctcaattgttggtctgcatgtctactgataagccggtactgtgctgttttaattattgaggctttctagatgttgtagtgtattttagggctattttcttgttctttttcatgattttcctggcttttcttccctgtttagttttccatatgaactatagaatcagtatgtctagttctggggctgggggggagcttttgctattttaattaggattcagttatatatttaggtttatgtatcatttacatattactatctaacaaaccacctcaaaatgtatcaatttaaaacaaccatcatgtcggggggccctcaattctgtgggtcagcaatttgggttgggctcagcaacatggttcttctgctggtttcccctggggtcattggagtggctgtcgtcagctagagctgcctggagaacctcaggtggaatggcccatttctggtccatttctgctccatgtgggaccaccttctgtcagactagcccaagccaccacctctgatggccacaagggtgtaagggagtggcaacgctctaaagactgtcttggaagtcctgtgacaccaatcccaccacattctattgatrgggtgagccctgaagtcaacctgggttcaaaagggtggggagtagactccatgtcttggcaggaggagctgcacgttactaagggcatgtgttcagggaaggggtggttgcagcctggtcacacggggtttttccatttgttcagctctgcttttgtatctttcaagatgttctgtggtttcctcatagaggctttatttcctctgaagcttttgtttaggtattttctctttcttattgcaatctgcgctctccttcaagacaccttctgcttttgtgtgttcctgtggaggggtggtctgctgggcccctctccttggctcctgaacacacaaggggatcatatatccatatcctcccaagctgtaagcacttgcgctgggctgcaaacttgcatcctacttgccgtagaggacagcccttcccctaaacttccagtttccccctctcccacctgcctgaaaggcaccagccaggcagtcttggaagcctcgtgttgaaggtggtggagcccccagagcctgggcccagatgaccatgtgggacagagctgccagtgacctagagccattaagagagcaagagataaactctgtgattgtcttggtctcttctgactgattcggaggccactgcagtctgcatgttgtacattattcctgttagcatcactatcaactctagttcctgttgtagtagatttggattctcctgggtattgaggctacacaatcgtctgcacagactgacagtttcacctcctcctgccagacttttagtctcctgctaattccaaatgctgataaggttgggctggcaacaatttcatatttttcaggcttatgaagaggtaaggtggtctctgtaagtgaatttacccaagaactgaaatttgccctttaaacctcaaaataggatkgtgtttgtttcatctaaaattttagttgaatgcttagtagtatcttcgctgcttaccagacttctcagataatgtggtaactgtgacgccgccctctctcagcattcggacgagatcagcgtgggccacagtcaccgcattgtgccctcatgcgtgatgtcagagagcctgcaaccgcgcccccgctgctcagtggcctccaaggggcctcaagtcctgggctcgtttctgccccaggtagtgctgtcagcggcatgcctgccttctgcaagcccctcttccctgttccccagcccgcacttccaatgagctgtgggccaggaaaccagcccgtcacacttgtccacgctgcgtttaaagcrggaggaaggaggacccaatgcagggcccgaaaggtccactgtgagtgaagtctttttccttatgggacacctaggctggcttctcagaaagtgtgtgcagtttatttccgggttcttggcggtgttctgaatagtaaacgttgccacctaaatgaagaccctttgagatatcrctgcgtctctactgttcctgatggtggactttctcctccagcgtctgctgacagtaacagtggagctttccccagcacccaagagcccggggctcaccgtggtcccctcctgtgcagccagcacacaaggccctcccgtgccaccacctcrcaggggccaggtctgctcggcccactacaccagagcccttgggtgcggggtgggcgggacagagaagaggaaggggggaaggagggagctgacagccgtttctcagttccccattatggacttggatttggatcactgaaatccatatggaactaagaagttatctttatcccacaactcaaaactcctgtctagagcatcagaaatgatgtgcttttggcatcctgaaatgtctttctcctccgccaactgctgtctgctgagagctagccttgctctcggaagggcrgcttgggcagggcaaagggagaattccagggtttgggagcatctgctgatcccagaatagttgccagtggtgacatcttcttcctggaccccaggacccaaggacagcaggtcccatcccagctctgcccagctcctgcccctgcacagagcaggacgccagctggggtgggcactctgtggcgttttgggaagatagtgctatatttcagaggctgtgccatctcctctgggggatttcagcgctggtgacagaggcatgaaaggctcatggatagacaaactggtgtttacccctcatagaaacgaagttgccgtcctatgtgtgcagagaaaaccagggactcctctgttcagaaggaagaaatggaggggcctggtgggcctggcagcggtgcggaggtggtgggctcggaactgtagtttccattccataaaaaggcgtcttcggaaaggttggggattttggcaaagaaggggggtctctggggagactgcatgtgggtgagatcctctgcctggccggttttggaggaagagggtcacagggaccagcgacggggaggagggtccacatgctgcagcgaaggacctggggcaggcagggggtgggctggatggcggaacacggggatgggcccgtacctctccagaactacggacctgggatgaggcggcctgtgagtgcgattgggctgtgtgacggcaccagaggcggggctgcagctgcaggcttttgtcgtcctgtggtcctggaggctgcaggtccaaggtcaaggattccttctgaggcttctcacccgggctctgactgcaggcggtctccctttttcataaggacaccggtcagatggaatcagcgcccaccctgatgatatcatttaacttaattactgtgttaaaggccctgtctccaaataaggtcacatttcgaggacctgggcattacctttgtggaaggaactcagttcaccctaacaaaaggtggcagaattgggtgtgggcgtgtggggctgggctctgattggcaagcagtgctctggccctgcccaggcagaggcagcctcgtgcctcacctttgctcccctgatctaagaaggtgcacaccccggtagcttgtgcaggggccaggacaaaacccaagaagcagccatcacgccccaggaccaagatgtgctggcgccaggcttccgggcaacctaaatctgttgtttaatgaagacgcgctggcaccaagcttctgggcgacctaaacctgttgtttaatgaaggggctcagaagcaactcagtgtcctcagtgtctcggtggcatctgagcagccatgaaaaggtgccatggggactggagaggcccactgtcacacctcccagccccagccccagaaatcagatggagccccagaggtcccacccctgaggtcccaccctgtgtggctcttctatcccaggcgttctccaaggtccccagggtgctgggggctgcccaggctatctgctgcggtcagggtgtcagtggtgccaccataaccaagtgaggcgaggttccacatcgccggccaagtggctttatgggcctccagtgggatgtggcaggaagtacccagcggctctgccatgcattcttgaccagaaatgttgaacccgagttaattgtgaggaaacggacaaatccagggtgtggggcacgccgcagagagctgccttagccgcttcaacaccatcaggccagagtaggcggggagcgtctcggggaaaggggacagagagacgtgccatccaaatgcatgtgtgtcctccacggggccctgcatccccgcagctaggaaggtcatctggggacagttggtgaaatggaaacagggacgggatgttcggcagtattctgtcggtattcatttcttgggtgtgctcatggtgtcctagtgagcaggctgtcctgattcgtaggagatgtggacggacatggagggagtgcygtgacgtagcccaggagacctttttagcttaaagcctgtgcataagaaatakgcaagtgagttttagatgttcatacatatttcattgcagaatattagtttagggtgatcaataaaagactttcaagcctaatgttaagcaaaagagacttttaatatattccacaatgataaaatcctgtggaagaagggcagtgggaatgcagattccaggagcaagtggaacgaagccagctgtccagaagagctttttttgtggggtttgaaaacaggtgccaatggtggctgtcaaatcatgatggcatttaggttctactagctacattggagagaaagaaaaacactatgctttacagagtcaaaatctacaatatgccagactttacaccccttgcatatttaaacttgggcttaaaaatgtagaagctggctggttgcagtggctcatgcctgtaatcccagcactctgggaggctgaagccagagaatcacttgagcctaggagatcaaggctgtgtgagccatgatggcrtcgctgccctccagcctgggtgacagagtgatattctgtctctataaataaatagatgaaaaataaaaaataaaaatgtagacgtcaacttcacattgtctggggatgcataatttcctaaaaatcgctctcatgggctcacgagcaaatgctctagggggccactgagtccaggcccctcccaatgctttcctgctctgccagcccaaaggactttgaagctggaggcggggaccggtgtggccaagcagggcaccttcctcaccgtcacccttctgcagggagggaggtggcctctgcctgctgccattggaggtttgtgcagtcaggtttatcaaggaggtccaggcgggctgggtgtggggaggtggaacagggtacctgcgaggtctgtgagtgaaactacactgctggctggacagagacatggcaatgacccagggaaaccgtgttgagcgctctggtgggggcaggcgggcgggagaggcccctgagttccgctagctggaattaagcaggtgaacagcagatgtttcttggaatggagtctggtccatagtaagtgatgaagatgtgttttgactccgtatctaggacctccaggacgtagaggttgatgatccgggcaggtggccttcagcgagggagcacgtcaaaaggctgtgggccgtgcagacagctgggggacaccgtcccgggtgtgaccttgggccacacggcagggtggtggacttgctcctagaattgggctccagggctgaagccagcccctctgatctggcactggccggctccattcaccctttttggggcttactgccgcagagacttcctttgaggagagctggacccaagacgccagagttccgggggcactgagtgctgtgtggcacccgggccaggagaaacatgtgccagagggcaggcgtgggctctccggggagtctctgcgtagactttctagcccagaggttcaggtgatggaccagagactggccgctttgtgacaccgaggacggttgataaagtggattctcgaggggaagctgcatccacacagaggctgggacgtgaatgtgcatcacggctctatctgtggcccccaaaggctgggtgccagctgcctgtcggcagggagcgtatcaccgtggcacgtccatgccgtgggggtcactcagcagccacggatgcgccctgggtgctgtcccggggccgtctcagaagcaccgcgctggaccggctgggccagatgccatgggattctgtgtttgtgaacctctagaaaaggtaaattaacctatagagctggaaagctgacctgcattgtcaggctgggtrgggaaggacttggatggaaatgttccctgttgcagtgtggtggggtcacaggcggcttagcttgtcaacacccataacgctatgcacggacactcggcaaacccatcttaatcgtgtgttatttattcctggatgaagttcttttcttttttgagatggagtttcactcttgtcacccaggctggagtgcagtggtgcgatctcagctcactgcagcctcctcctcccaggttcaagctattttcctgcctcggcctcccaaagtgctcagattacaggtgtgagccaccgcgcccggctgagaatctgatttttaaaaataaacgtcatgactgggtgcggtggctcacacctgtaatcccagcgctttgggaggtcgagttgggcggattacctgaggtcaggagatcgaggccagcctggccaacatggcgaaaccccatctctactaaacatacaaaaatttgctggacatggtggtgcatacctgtggtcccagctactcgggaggctgaggcatgagaattgcttgaacccaggaagctgcagtgagccaagatggcaccacagcactctaacctgggcaacagtgagataatctgtctcaaaaaaaaaaaaaaaaatcagattcctgtactttgcgccgtagcaacggaatcagcaggtctgctgtggagcccgggcatctgcttctcggagcatcacagctgatgtgctggccctcaagcaggcttcttgggaccctggttcttctgggccagtgtggagtgatgtgtgcccctgggtgaggaccacctggtctcctggggctctgctgtgtgccaggtgggggccaggtgatgggctgcagggcggcccccaccctgtacaactcaggatctggtcgaatatatcgtctctagctcaagaaaggcgttctgaaacagcaagcctggtctgcccagcgtgtctgaggctctgctctaaggggcccctgcccaccctgggggggctgcagtgtgtctgggcgagcactgacttctgagcctcgctrtctggactggcactggctctactgctgactccctgtgtggccccatatgatgcacgaagcctctctgtgcttctgtttgctcacctgtcaactggggcagtgatggcatcctgctggggtcatctgagagtctggaatgcgtgagaggtgttcaacacagaccgtggaacaagttaagcccataaaaagtgtttttgttgcccccttgtcttttctgtcctttctgtctagggtattaatttcctgttgctgctttaatgaatcagcccacagtgtgggggcatcaaacagtacaactccttaaccccacagtgtgtggagtcagcaattcaggagcgacttagctgggtgctgtggggttgcaggtgagctgaggccagggctgggctcatctgaaggtttgaccagggccagagggcctgcctcccaggtggccccctcaggagtaggaggtcagccccttccgcgcaggaaggacctgccgctcacacatccttgtgatgtggccrtcctgggagcagagccaggcagraactgtcctttttgtgacctagccttggcaatcacgtagcacatttctgcaaggctgttcatcagatgcaatgaccaagtccaggccatagtcagaaagggaagaagacccctccacctttcgaggggaggagcgaaagtgtttcaggcccattcctaaaccatgaccagagctcttgtccccacggtttctggggagccaagggcccagtgtctgggagaggtgacttttaatgccccataggttgagaacgtccaagggtggtgggagtgacactggcatctgtggcccccgagtgccattcaaggcagcgcctgcaaatccctgagaggcagagggtgggggcctgtatggagggcgctctgtggagtcgggacagggggtttcatgggcggrtggggtgggcgcccatggagagccttgctctgggtgcaagaatggccacagtgggggcagctggcggtgtggaacaggggccgccctgggaatgtggaaggccagctggtgccactccagagcccacccctttgccccatgggagtgcactcagtgcccttccagaggaccaagtcaggggttggcagcaccgccagcctgactgccagggtttcccctccacacggggggtctcgggtttcccctccacacggggggtctcgggtttcccctccacacgggggtctcgggtttccccctccacacgggggtctcgggtttccccctccacacggggtttccccctccacgcgggggtctcgggtttccccctgcacacagggatctcgggtttccccctccacacgggggtctcgggtttccccctccacaggggggtctcgggtttccccctccacacgggggtctctggtttccccctccacacggggtttcccctccacacgggggtctcgggtttccccctgcacatgggggtctcgggttttcccctccacactggggtctcgggtttccccctccacacgggggttgtagggccgctcagtaggagtgctgccaagagtggaggggggccaccggcttccctgctgaaactgtgagacgtgcgtagaaggaaagggggagccggtggagcccctggggagtcgctccttttgtgcaggaaaccagaacagaaatctttcacgcttcaaatacgcacacgagtgtgggagtgaaaagcattgattcccacactgaggggtttgtgaggcctcctggctctgtttgcagagattgattgtgcagtttggatcttttaaatgagatactaaatcaaataaaaattatgatgccttcaccacragttaatcactatcaatatttgggtgtatttcttctagtcttttcgttttttctttctggtttgcatgggagagtgtgtgtgtgtgagtgtggcatgtttatgtgtatagtgcttgttgtgtgtgtgagactgtggtgcatatgagtgtgcatggggtggggggatgtgttgcagtgtgtggtgtgtggtacaattgtgtgtgtgtggtgtagagtatggggctgtgtgcagcagtgcgtgtgggatgtggtgtatgtgttttgcactgtggtgtgtgtggtttgtgctacagtgtgtgtggtttgtggtatggtgcttgcagtgtggtatgcaccatatgtgtgagcgtgtgtgtcgtttttggtgtgtggtgtaggtgtggtttgtggtgtgtgtggtgcgtgtggcgtgtgtgtggtttgtggtgtgtgtggcatatgtgtggtttgtagtgtgtgtatgtggcgtgtatgtggtttgtggtgtggtgtggtatatgtagcatgtgtatggtttgtggtgtgtggtgtgtatgtggcatatgtgtggtttgtgatgtgtggtgtgtgtggcatgtgtgtggtttgcagtgtgtagtgtgtgtggtttgtgatgtgtgtgtggcatatgtgtggtttgcagtgtgtgtagtgtgtgtggtttgtgatgtgtggtgtgtgtggcatgtgtggtttgcggtgtgtgtgtggtgtgtggtgtgtatggtgtgtgtgtgggtggtggggtggtgtgtgtgtggcatgtgtgtggcttgtgtgtgtgtggcgtgtatgtggttttgcggtgtgtgtggcatgtgtgtggtttgcggtgtgtgtgtagcatgtgtgtggtttgcagtgtggtgtgtgtggcatgtgtgtggtttgtggtatggtatgcgtggtgtgtgtggtttgtggtgtgtgtgtgtcatgtgtgtggtttgcagtgtgtgtgtgtggcatgtgtttggtttgcggtatgtgtgtggcgtgtgtggtgtgtgtggtttgcagtgtgtgtggcgtgtgtggtgtgtgatgtgtggcatgtggggtttgtgatgtggtgtgtgtgtggtgtgtggtttgcggtgtgtgtggcatgtgtgtggcatgtgtggggtttgtgatgagctgtggtgtgtggcgtgtgtgtggttgtgtgtgtgtggcgtgtgtgtggtatgtgtgtggcatgtgtggtttgtggtgtgtgtgtgacgtgtggtttgcagtggtgtgtgtgtggtttgtggtgtgtggcgtgtgtgtggtttgcagtgtggtgtgtgtggcatgtgtgtggtttgtatgtgtgtggcacgtgtgtggggtttgcagtgtgctgtgcagcatgtgtgtataagcgtgaggcatgtgcggggtgtgcagtgagcagtgccccggtgttcctgtgagggtgtgggcgtggccaccctgacgctgtccctgtccctgtctttgcaggacggctgtcctcagygaggggccgtgcacccgctcctgagcagcgccatgggcctgctggccttcctgaagacccagttcgtgctgcacctgctgrtcggctttgtcttcgtggtgagtggtctggtcatcaacttcgtccagctgtgcacgctggcgctctggccggtcagcaagcagctctaccgccgcctcaactgccgcctcgcctactcactctggagccgtgagtgtctgctgggccagtccctgccgcctggggctcccgtgggggtggcgcrcgaccatgcacggggcagccgtgggctctcaggcaggaagtgagggctatgcaggaggtgccgaggccatctggctggcaggctgtcggaaggcacctggctacctctttttcttagcttgagctgtgtgacgtgccactctcaccattctgacccatagcaatggcagcttcccacggtttaccagagcatatgggaatgtttaaacaaaagtaaagagaatgttgagttctgtttacccgttaccaagctccaacagctccctacatggcccctcgtgtgtcctgcccacactgcgccaacaccagagcatgctgacgcgtatttcagcatgyatccctgaaagaaaaggtgtcctgcctccctgcgtatcaaacacatgtgtagctgtgtgtctgtccgtatgtgcctctgtgcrtatgtgtattatacatagagaaaccgatctgtacctgtcatgtggacagagactcagaggcttggtaacaacacccactgtggacaggtaaccgctcacaccgggcgtcgtggggacatgaacaggcgcatctctggagggtggtttggcagtggccgtcaacagtttaagtggttgcaattttcaactcagcaattccacagaataacatgcaacctacagagatgtgcaaaagtatgcaactggacaggtgttctcattttatcacaggtattctcattattgtattatttttatagtagcacaaaactagaagcaacccaagcacctgtcactggagactaattatgcggcacccatacagggaccctctgcggccatcatggagagccttcatcttgcccgtacagttttaagcgaaaaaggaagtatacaacaaagtccatagtatgctatgattcattttgtgtcttaagaaaggatgctgtgtgtgtggtgtgtacatgtgtggaaaaatcccagaaggggctgggcatggtggctcatgcctgtaatcccagcactttgagaggctgaggcaggtggatcacctgaggtcaggagttcaaggccagcctgagcaacatggtgaaaccctgtctctactaaaaatacaaaattagctgagcatggtggtacacacctgtaatcccagctactcgggaggctgaggcaggagaactgcttgaacctgggaggtggaggctgcagtgagctgagatcacaccactgcaccactccagcctgggcaacagagcaagactctgtctaaaaaaaaaaaaaaagaaaacaaaaatctcagaaggatgcccgagaaaactgcgtgatgctgatatccagggagtggggaaaggaggggattcttacgttttatttcacactctcatgctgtttccatgtttttgcatgagcgcatagacacttcgtctcatatgggaaacggtgagcgcatagacactttgtctcgtgggaaacggtaagcgcgtagacactttgtctcacgtgagaaatggtgaacccacayacactttgtctcatatgggaaacggtgagcgcatagacactttgtctcatgtgggaaagggtgagcacgtagacactttgtctcatatggaaaacagtgaacgcgtagacactttgtctcgtgggaaacggtgagcgcgtatacactttgtctcatatggaaaacagtgagcgcgtagacactttgtctcgtgggaaatggtgaayccacatacactttgtctcatatgggaaacggtgagcgcgtatacrctttgtctcatgtgggaaatggtgagcgcatagatactttgtctcatgtgggaaatggtgaacccacatacactttgtctcatatggaaaacggtgagcgcgtatacactttgtctcatgtaggaaatggtgagcgcatagacactttgtctcatatgggaaatggctggcctgtaaccttgtctscacgatctccttccagttcaggagccggtagcactgctgaaaaggctgtttatgtcagctaacttttcatgcctgcgacaccccactgtctgcagagagactagtaacccagcccttagactagcttgtcttaaatgtgttatagcttcagttcctggtttgttttttctctttttttttttttttgagactgagtctcgctctgttgcccaggctggagtgcagtggtgcgatctcggctcactgcaagctctgcctcctgggttcacgccattctcctgcctcagcctcccgagtagctgggactacaggcacccgccaccactcctggctaattttttttgtatttttagtagagacggggtttcactgtgttagccaggatggttttgatctcctgacctcgtgatctgcccacctcggcctccgaaagtgctgggattacaggcgtgagccaccgcgcccggccagtttgtttccttttttaaatgaaaggctgctgcttttttctgtgggaagggagaattggaaatcctataatataaaatatacaaatgagttattcatgagtataactggataagatgaatacatacaaaaagggcaaatattaactgatgaaaactaaattacagactcctactttctagcagtattctgaagctaaaatactacaaaacagctaaatcctgcctgaaactggctttttaatgcatttctgggctcacagtaaggaaacaaaaacctctcagctccacccttccaccaaatccctttagcaaaaaccggggtgtgcagaaatggaatgtcagcactgcctttcaggagcctaacccttgggcagctgtagcagagggcgctgaagctaaaccaggactcttgagcgagggcgcgagacaagctagggttaacagtgacccttgggtttcagcagaggcaaacgaaagtacactctggagaaagtctcattcaggcctgaagaatcccacagattaaggaaaattaaatatgaattcataatcaagaatgacaacgtaaacagcagatgtggactgaagatgacccactgtgccccgacttgaaagagaaccaagtagaactgctctcagtgagaactgtagatattttaaagcaaaaacttacagacrggttttgtatcagattagatacagttaatgagaatgggtacagaaccaagtagaactgctctcagtgaaaactgtagatattttaaagcaaaaccgtatggatggattttgtatcagattagacacagttaatgagagaatgggtacaccagacatcaatgtgaagaaatcatccagtgacagtaaaggaggtgaaaaatgtgaaataggcgtgaaaagatgtaaggacagaatgagaaccttcataaaatagggctttggcccccatccccaaaggagagaacaggagaagcctcctgggaagagaggatgcctgaggacctcctgaactgatgaaggcacgatttttcagatacaggaagcacatgtagaccaagcagagcgaatgcacagaaatccacacctaggcaggccctggggcatcacagaccatcagagacaaggaggagccgggcgcggtggctcacgcctctaatcccagcattccaggaagctgaggcaggaggatcccctgaggtcaggagtttgagaccagcctggccaacatggtgaaaccccatctctactaaaaatataaaaattagctgggcctggtggcacatgtctaatcccagctactggggtggctgaggcaggggaatcatttgaacctggtcggtggaggttgcagtgagccgagactgcatcactgcactccagcctgggtgacagagtgagactctgtctcaaaaaaaaaaaaaaaaaaaaaaagataaggaagtcttcgaatccccggagaggaaagctggagaaccacgctggatggtcagcagtgaggccgacagcagatttcttacggcaggcagcagtggcgggagaaggtggaagatcctcaatgtgctggaaaatcaccaacctagcaccctgtgttgttcaagagtacaaataaaataaaaaggttttggtaaacaaaaaaatgagagcttttactgcccatagatcttcacttcaatattttttaaggatgtgtttcagtaagaacaaaaattataaaagtagggtmtaattttcaagaaagaatggtagccaaagaaattaggagatggatgaatctaaaccgtatgtaaaataaaaacagtgctcagccgggcgcagtgggtcacgcctgtaatcccagcactttgggaggccaaggtgggcggatcacctgaggtcaggagttcaagaccagcctggtcaacatggtgaaaccccatctctactaaaaatacaaaaattagcctggcatggtggtgggcacctgtgatcccagctcctcaggaggcagaggcaggagaatcgcttgaccctgggaggtggaggttgcagtgaggtgagactgcaccacgctcagctaattttttgttttgtatttttattagagatggggtttcaccatgttgcccagactggtctcaaactcctgacctcaggtgatccgcccacctcggcctcccaaagtgctgggattacaggcgggagcgcccagcccaggttcagattttaatggtaactttgttaagtatagggtaggaaaaaagagagatcaaacatagcttccaaagtattagaaaaagataaagaaaaaaaggtaaatctcttttgttaatgcaagaaagtagaaagaaaagcattaaaataagaaatattgaggtatacattaagatcaatataaaattcccagatacttgggatgaccacaaatacacaagaaaagcacttcagtaagaacagaaataatcggcctctccatctgctgggcttgcgtgggtatgtgaattccgtctgtgacttgttggatttgggatgttctccacttagatttatttccatgaatatgtttgtgggagcctttctgcagtcagaggtatgtggaagcctttgccagttcaggggcgcatggtgagagcagacctcacagtgggtttgtttatgtttgtttgtttttgagacagggtcttgctctgtcgcccaggctggagtgcagtggtgtgatcttggctcactgcaatctctgcctcctgggctcaagcagtcctcctacctcagcctccttgagtagctgagaccacaggtgtgcaccatcatgcccagctaatttttgtattttttgtagagacagggttttgccatgttgcccagactggtctccaactcctaggctcatgtgatcctcctgcctcagcctgctgggctgctgggattacaggctgagccaccgcaccagccacagtgttttctgatgaccctgaaccacggttttattttcaattcttcattcctgttctcattccttaatgctgggtgccttcttgctgcccattttgaactcactgccagtgtgtctctgctgtcatctgatgtgcagagctataggtgctgcggcgaagggtgcaggtttggagccgtttaaacaacctggcccagcctcctcactccctgctgaccttggtcaaggcttcagtctctaaacctcagctttctcatctgcagagcacagacaaaaccacctgcctttgagctgtcttataaagcctaaatcaatgcgcacagcaggtacacagcaatgcttgataaattgttactattattgggtgaattttaggttttttttgttgttgttgttgttttgagacagagtctctctgttgtcctggctggagcacagcagtgcgatcttggctcactgcaacctccatcttctgaggttcaagtgattctcgtgccccagcctcccaagtagctgggattacaggtgcctgccaccacatccagctaattttttttatttttaagtagagatgggcttttgccatgcttccccagctggtcttgaactcctggcctcaagtgatcctcctgtctcggcctcccaaagtgctgggattacaggcttgagccaccgcacccgtccagaattttagatttttttaaatccgtggttgaaaaataggctatggctggcttactcattgtgctttagggaagcatgtatttgagtgaaggaaatgataaaaggaatttcatrtcgggcccaggcgccgcccaccctgcaagacagtttacagatgcctgccctgacagctgtctgcagttagccagcgtcagccgaggggtcctgagatccgctgaaggctgcctttgcatgccgacrgcaagggaaaagtgccacatgtccctgggcttgccacaggtgacctttggatgggaccattctccagacagcgcagctcgtctttccagaacactcatggggagtgtgcctgtgtctggctggctgtgtgggctcccattcagttcattccccttctccagcctttaggcatgaccctaaaggcagaggtctcaagcacttgccaggggtgagccagcggtgggggcgcccctgccagggcaggcctgctgtgggggcttggtcagcgagtcttctccccacacgcaggatttcctcccgtccactgcctctgcccacaggtgacctttctcttttaaaggaattggggtcccttggtacccccacaaaccctgagttccctctctcctttctgcgtcctttctgctcgcctgcatgtgcctgcagcatcatgaccgctgggaagacacttccctgcacctgcacgctgtctgcaggcgtctctggccatcctgggctgagctgcgtgatctcgggtagcggccctttgttcacccgtgcaggatgtctttggaattggtctctagtgtcctttataaataactggtataaaagaaccccgggcaatggccttgcagaaagcccacacttcagagctgggctggtgtccagcgcgagaagcctgaggccgtcctgagctggaagccgcgtcctggttctgtggggccatccttcccggacaactggctggggggcacaagactctggtggccgacaagaggcccacctgcttggcctccctcttgtccttccccacatggccctctgaacaggactaactccctctgaggcccacgtgtgacaaagatgcaccgttctcaccacggaactcttcagccctgcagttctcccgaaggtgaatgagggcatcccagagtccccatcaggagacagacgatgctgcgttcccagcagccccagagccctcccaggcgtgcaggtctcctgccggcaaacagatctcccggcacgagcccctccacacttctgggaagagtgtcttcagctcaccaggccggagccaggggaagagaccaagggaggaggctccaagaacccctgggtgggggggacaagcactcaaagccaggactggcacccctcacatgccagcacccacggggtcaggtgtgccctgctgtctctggggaccccgcaggcctctggccacctgcccagcagcaagccccgtcgagcacccccagccggccttcctgggggcgggctaggcctcacatggcttttttttaaatatggaaaaccagtgtaaccccaaagcaagttttaggagaaaatataattcctattactctgtcgtctataattccattctgctcttaactcttcattttttcccactgtctgttctgcagacatacgatggttgttttctgcttcctaatcatctagtgacatttttcatcttctgcacctctcacggggcgtggctgtgcggtactcggccacaccaaggtgcacgtgagaagcgtaattgggcgtaaagatcagcgtctccatgcagagtggcggttctctccctttctgctgctaccttccatctgtctcctcccaactgttgcttagagaaagttattgtaatttcataaaacgtactcagtgtaagtcatcaaaactcatgtttagcagagacttcctctctggacaaaaatactgtaggtgtctcctgtgggcgctccctgaccatcccaggaggaggggtcctaccagtgccaacgccctccccctgtccgcagaactggtcatgctgctggagtggtggtcctgcacggagtgtacactgttcacggaccaggccacggtagagcgctttgggaaggagcacgcagtcatcatcctcaaccacaacttcgagatcgacttcctctgtgggtggaccatgtgtgagcgcttcggagtgctgggggtgagcggggacctggggagggccacgggtgagcaggagggtcccggggagggccgggggtgagcggggacccagggagggccggggtgagcagggggtccctgcagggctgggggtggggtggtgactgggagtgagctgggcggggtcccaggagggctggggatgagcagggtggggtggtcctggggagggctgggggtgagtggggggtcccagggagaggctagggtgagcaccttccaggggaggtgctgggagtgagcggcaagggtcctggggaggatctgggggagtaggcgggtgctggggtgagcaagagggccctgggtgggggaggtactgggtggagcagtgggggtcccagcagaggagctgggagagccttgggtttcccagggaaagggctaggggagcaggggactccctgaggaggtgccggggaggcccctggggtccgagtccctgggtgttcctcctggggcgtctctttgagctcggcagtggtgcctggctggttgaggggccctggcccgcagggcctcagctgtccccgagctgtgccctcctttctcatcatggcctttgcctttgagatgaccccacctgcgtccctgcagaaccacttccgttagctaagctgcctcrgatgaaacctaaactactccccgatgctggcagaagaatttcattgcagtcaaagcccctgtgtgaggcagcacccccaggccaccccccggaagcctggcagcctctgcatccggctcatccaccttccctgagggccctcccagccaagcctgagcctcagtttcctcatttctggggcgacccactcaccctcagaagccgggtcctgcttcacagcagaccccctgagccacaaagccgtgactcctagagcgacaccacacaggagctgggtgcagcgggagcctggccaagcccctggcctctgtccgacgctgaagtgccaggtgcccctccttctcctccctccagagctccaaggtcctcgctaagaaggagctgctctaygtgcccctcatcggctggacgtggtactttctggagattgtgttctgcaagcggaagtgggaggaggaccgggacaccgtggtmgaagggctgaggcgcctgtcggactaccccgagtacatgtgggtgagtgcgcggagcagcccgataccctgcatgcctggaggaggccacgccaactcctgatgcacggctgcccacatcccaggctgggaaaccccatgagrgcctctgcacatggggtgctgtttccatggggccrtgactcccccatctgagctgcaggcgtggaggcttctcttgggccacctgcytgctactcgccgcaatcccagctctgaccaggccatcctaaggggatctggccgggggagggggcagagcagggtgcccccagtgagccctggctctgcccgccctgctcagtgtgcatccccattctttttctgtcccttcttcctggtctgtcttggaaaatgggctgcctgtgctgttagcatttctgtttttttgttttcttgttcgttttgttgtgtgtgtttttgtgtgtgtgtgtgtgtttgaaacggagtctcgctctgtcgcccaggctggagtgcagtggtgcaatctcgggtcactgcaaccaccacctcccagatttaagcgattctcctgcttcaggctcccaagtagctgacattacaggtgcgtgccaccacacctggctaattttttgtatttttagtagagatggggtttcaccatgttggccaggctggtctcaaactcctgacctcaggtgatccgcccaccttgacctcccaaagtgctgggattataggcatgagccagcttgccagcctgctgttagcatttctttttttttgttttgagacagagccttagtctgtcacccaggctagagtgcagtggcatgatctcagctcactgcaacctctgcctcccgggttccagcagttctcctctctcagcctccaagttgctgggattacaggcactcaccaccacgactggctaatttttgtattttcagtagagacggggtttcaccatgttggccaggctggtcttgaactcctgacctcatgatccacccgcctcggcctcctaaagtgctgggattacaggggtgagccaccacgcccggcctgctgttaacatttctaactcatgctgtggcaagtcgatgaaaccctctctgttttcacactgctcagaggctgctgccccaacacaccttcatgtttcacttctttctggaaagttctttctggagagctctcctgtgtgaatgaacgtgtgtgactggagtgcagactgtggccctagaataaaagaacctttcagtcataacccatgctgctcgctaaagcggttccaagatttccacaaattcagccacaacctttgctgcctgtcagagaggcaggcctggcctggacatgcacccaccccagctgctctgtggagtgaccctgtctccgtgttgatcctagtttctcctgtactgcgaggggacgcgcttcacggagaccaagcaccgygttagcatggaggtggcggctgctaaggggcttcctgtcctcaagtaccacctgctgccgcggaccaagggcttcaccaccgcagtcaagtgcctccgggggacaggtaggccccagactgcccgagccggggccaccgctatgctcacggaaaayagtgatttctttaaaaaaaaaaaaaatgagtgcattccatgtgaaacacagaagaacagaagtgcaaaaggaatcaagtgagggggtcggcgccgcaaggttcccgcgtcaggttttgaggtgataaaatgctaattcatgagaaacaattaaaataataaaaaatacataatgcaaaaccttatgaagggaaaataatcattattgtatcttattaatccaaaaggagtcaaaataaaagaaagggacaaagaacagaaaacagccagacagcagggtcacactcacagcgtcagtacccatgggaaacgtcagccactaaatgccctcaccaacagagaatggggaaaaaagagggggaaagaaaacttagagaagaggtcctggtgtgttctccccagracggggccagacccctcacgcgttctccccaggayggggccgggtcccaggtggaacttgcttttccctctggcagtgaccatgcagccgcctgggctgggtcattcaccctcccrtctcctcccacagtcgcagctgtctatgatgtaaccctgaacttcagaggaaacaagaacccgtccctgctggggatcctctacgggaagaagtacgaggcggacatgtgcgtgaggtgaggccagaccctgtggctctcgcgccgccccccataccttcatgagcttgcgctgggcagaggccaggagggtggctgggtccaggccccacgtcccacagccccgcasggtggaactcacacggaaggcctgtctgcagccctgccctgctgagcagacacaggagaggccctgcaggactcgtccggggcttgggttgcaggccacggagaggacatggagacacgggggatgtgtggggagactcaccattgcccacggtgtgtttcattcctttggggaaatcattgacctggctttcgaggccacctccatcctctccttctgcctccttgggaagcccctgtagttccctctgtaagatgctctgtcccttygtgggctttgtctcaaaccccactgggctccataagtctcctggggcccacagtcacacgacctggggggcatacggtgctgacttctcaccgaggggtgaaacccaggcaggtctcttggtgggcaggacgggaccacctgcggagcccctggcctgaagcagcgctggtgatgggagtggctttctgctggccctggtgatggcagccgcagcacgcgagggaccgcagtgtctgaaggagacagtggtgaagggaaaggaagagcctgtttgatttttttttttcttggagacggagtttcaccccatcgcccaggctggcatgcagtggctcaatcttggctcactgcaacctccgcctccccggttcaagcaattctcctgtctcagcctcctgagtagctgggattacaggtgcccactacctcgcctggctaatttcatatttttttagtagagacagggttttaccatattgtccaggctggactcgaactcctgacctcaagtgatctgcctgcctcggcctcccaaagtgctgggattacaggtgtgagccaccacgttgggccgaagagcctttttcaaaccctgtcttgagagttggggcttcagtgctatggggccccagtcctgtcccaatgaaataaaatgggagtggcgtgtctagaccccaggaggagcctggggcttgctctgcagggtaccagcggctttccttggggcagtgtgtctctttccccacacagtcagggctgtgggtgccgccaccaatccgttgctgcccttggactctccaagcttctctggctcacatagaggagaaaatccacccagaaatcctgttgacttaaaacacaggctggggttgtgaccttgattccagcacaaatcatcatttcaggcaggcctttgaggcacgaagaaaccgtgcgctggatggcccttgttgagcttgtcagtctctggtttcattcaagtgtgtgcggaaaggcagggccctccttgccacatgtaaagctgcacagagcggtcactatatgtgtttccatatttgcaatccaaccaccaccaactgagtgtgcgtcctgrtcagccgagcctgcccacggtggccacaggccctctacattctaatctcgagagcctgagcatgtacaaattaaacraagcaaaacgacaccacccagttctggccgtactataggaggtttccaggaagggtttgtgaacataaacataagctaggtaacactcctttctgaagttcaaggactggctgattagaggcggaggcgttcttctcccgacccggggtcagtgggsccacgagctgagagttctctcccttatgtgcctaaaacccctgggagggagctctgagccactgtggaccatggaggctgcggtgactgaccggggccctggacggtccagatggcaggctgggacaggacatgagaggggatgatagcagctggtggccctgtgccagatcctggccacagctggcctcagtcatcttcacgagaggagcccttgaggcacgtcttgctctcatccttgggtggttagtggtggcttgaggctgggtggtcagagtagctgtccaaggtcagcactggccatggaggagcccggccacccgccaagctgcacggcgcctccgcctcgggtgccacacagccccccacggagagactcctcatccgccatcctccctgccgctgcctttattttgcccgatcatattttaataaatactcgctttgaacttgtaaggcttcggctgttcaggtcactcaccgcttcgctgtttgaggagcagcagtgtccccgcgcgcccctgcagccgagccatcacagcgccaggctccccacagcatggggctggccctctttcctcctgctttggtggcgatgcccagggccatggggaagcagggccaatgtgtgcaggacggctgcagggctctcctgtccccagggctggcccctgggccgagggccttcaagtggcttgagtcagctccaggaggcagatgctcagggtgacaccctggggtgcagaaaaaaaatagaatttttatttatatttactttttatcttatttttaattcttatgtttatatgtttcataatgtatgtaacagacatacgataaaacctgtatgtggggcatgtgtgggtgtgtgtgtgttcatgtgggatgtgtatgtgtggtgtgtattatgtatgtagtatatgtgatgtgtgcatgtgtggtgtacgtatgtgcattgt[450 bp omitted]gtgtgtataaattatgtgtttgatatgtgtggtgtggtgtgtataaattataaatgtgtgtgtggtgtgtgtatatgaatcagggttggtgtgtgtggtgtgtataaattgtatgtgtttgatgtgtgtggtgtgtacgacatggggctgtgtgtgtcagggaccacagccagccagtgtgggcctctgggcaggcccctcccctcactgtagacaaagaagcctctgcgcctcggttgttcctcacatggcgtctgtggcaaatcctccccatgccagttgaacctggggccaatgtgaagctgcttttatttactgggacgtgatgttgtcttcatagccatctgctcaccagcatgcggcagaggcttgtgaacactgcatgtgtgctggtgtgtgctgtgtgctgttgtgtactggcgtttgctgatgtgtgtgttgtgcactcgcatgtgatgtgtatgtgctggcatgttgcatgtgctggcatgtgccagtgtgtgcactggtgtgtagtgtgtgctggcatgtggtatgtgtcgaggtgtgctggtgtgtggtgggtgctggtgtatggcatgtgctaacgtgtggtgtgttctggtgtgtgctggtgtgtggtaatgttttggtgtgtgctggtgtgtggtgtgttctggtgtgtgctggcgtgtggtatgttttggtgtgtgctggcatgtagtgtgctggcgtgtgctggcgtgtggtatgttctggtgtgtgctggcatgtgtgtggcatgtgctggcatgtgtcggtgtgtgcactggtgtgtggtgggtgctggtgtatgacgcatgctggcgtgtgcttgtgttgcaacgagactcagctttcacttctgatggggtgaggatccataggtggaatcctcatacaccaaagctttgggttcctcagttcctagacagaagtgtgaggcgcgtgaccctagagcgtggagacctgcctggctgtggaaacctcacccatgggccccgcagctcaagcctggtctttcctgctctgaggtgcgtcgtcgccccctcctgggcgctgggagcactgcggttgcccgtggacagcaggttcctacctgtgtatcttaattttgggttttttttgtttgtttgttttcgtttttgtttttggcttacaacgcagcgatttgcttctccctcataaaggtccacgatgagcccagacagtgctcggggcagcccagctgtccccacctggtggcacggggccgcccttccttagcaaagtgattctctgacggccgtcgcagggaagaggcagcattgagcrcccgctgttaagatgctcccttacggaagcgacttgtgggaggcagggatgtgtgtttttcttttccttttttttttttttaagagaaaaccacattttatttttgttaatgttgaagttaattttcaataaaattttatagaaaatgatttttattttttttttttgagacggagtctcgctctgtcacccaggctggagtgcagtggtgcaatttcatctcactgcaacctccgccttctggttctagcaattctcctgtctcagcctctcgagtagctgggattacaggcgcattccaccatgtctggctaatttttgtagtcttagtagagatggggtttcaccatgttggtcaggctggtctcgaactcctgagctcgtgatctgcctgccttggcctctcgagtagctgggattacaggcacattccaccacatctggctaatttttgtagtcttagtagagatggggtttcaccatgttggtcaggctggtcttgaactcctggcctcgtggtctgcctgcccctcggcttcccgaagtgctgggattacaggcatgagccactgtgcccggctgaaaatgaatttaattttaatcagtttgactgtaaggcaagattttatgaatttcgtataactttcataattgttttgaatgaaagagtacattcacgttctaagaaaactcttcagacacatgagccaaattttgttcttatatcagtgtttttaattttattgcttaatttatataaacaacctgtttatataaattaatagcctgaatagcctgttttgaatagtagccaacttgttcagatatgtgtttttcttaactgcccagagggaagggagaactgggcaccagtgaaaacaggtcacgcctacctgacgtcttgccgtgtggctcagtgacgggcgctgtggacgtggcagcccctgaatcccagctcccgtacacacagtatcactgctgccttagtcaccaccgtcatcctagctggcaaacttggtgttcttattaaattgtaaaagtatttaaaagattttaatatatcatatgtgagcggcttaccctgtgtacttactcaaattccaactgacttttaaaataagagctgtaacatgttactcatttaaaattttccgattagatttgtccarttaggtaatttgtaattaccctgcttatcttaccaagtagaggtgtcaacttgtgggctgctaatccatttggtagattagcacttaatcttggtagatttagtatgtaaataaatgagtgtccagacagaaatcagctatttcataatggagatgaaaatgcctacatttttaatacttttcatatttgaagcaagtggatttcatttgtgaaataatctttgcctaatgaaagacactctcagtcatgactgtctctgaagaatgaacatattaagaaagaccagaactctcgggagcgcacacatgaccacccttctcatgggaccaggggcgtggcctgcccggttaaatcactcgtgggcascctgggggttaatgctgccgccaccctgcacagaaggccacatcctggcctctcgccgccatgccacgctgactgtgtactcagggcggatgcctgaggagaagctcatttaatgtttgtttttagaaattgagagtgagaggctgggcgcagtggctcacgcctgtaatcccagcactttgggaggctgaggcgggtggatcaygaggtcaagagatcgagaccatcctggtcaacatggtgaaaccccgtctctactaaaaaaaaatacaaagaaaaaaaattagctgggcgtggtggcgcatgcctgtagtcccagctgctggggaggctgaggcaggagaatcacttgaatccgggaggcagaggttgcagtgagcagagatcgcaccagtgctctccagcctggcaacagagcgagactccatctcaaaaaaaaaaaaaagaaaagaaaagaaattgagagtgagatgtgacagaaggagtggggcccataggccaccctggcacacgacatgttcccctgtgccctctttctagtgtgaggtcatgtggtgattcaccctaccttgaatcttcttcataaaacaggagatttcctctggaagacatcccgctggatgaaaaggaagcagctcagtggcttcataaactgtaccaggagaaggtaagcaggctctgctcccgctcagrgtcccggtctcctgaagaggctgtggaaggggtgctggcgagcaggcaggtgacacgtgggaactccgtgggagacaggagtgccacccaggtcctaaatactcctgatccttctttcatttcttctttctgttgttttgttttgtttttgtttttgttttgttttgttttctgagacagggtctcactttgtcacccaggctggagtgcagtggtgcgatcctggctcactgctgccttgacctcctgggctcaagcgatcctcctgcctcagcctcccgggtggctggagctacaggcgcaagccaccatattcagctaatgattcaaaaaatgtatctttgtagaaatgaggtcccactatgtttccaggctggtattcaactcctgggctcaagcaatcttctggcctcggcctcccaaagtgctgggattacaggcatgagccaccacacctggkcccttcttcttaatgtttgagaaattaacaaactacagacaagtatgaagggtaacatgatgcctgtataattatggctggtaacatttggtcacatttgtttcattttcttaaaagacattacaggtatgtaacagacatagatggtcactagactccttgtataayagaaacaaattagggatgttagagcattgctttgaaaaccacactcagttcttatttctttcccccacggcttactcagcccaagaactactttctctttgttttatacgcacaaatgcatggggcattcgatttccactgtyggccttgtgggagaggagataaccaggaaatcctcccaggatgtaaaaaatatmatcgtaaatgcattgatgggctctcaagaaaataagggaaatcggtcgggtgctgtggctcatgcctgtaatcccagcactttgggaggccgaggtgggcagatcacctgaggtcaggagttcaagaccagcctgaccaacatgggtgaaaccccgtctctactaaaaatacaaaaaattagctgggcctggtggcgcatgcctgtaatcccagttactggggaggctgaggcaggagaatcgcttgaacccaggaggtgggggttgcaggagccaggatcgccccattgcactgcagcctgggcaacagagtgagactccaactcaaaaaaaaaaaaaaaaaagaaagaaaaaaaaagaaagaaaaaaaaaaagggaaatctccaggactgaaaagggaggtggggctgagactcggtcctgggcctgggagccagcagcaccatgcccacctggtgctttctgcctgccccatcccctgaagtctcgtgctgtgatgcctacatggaaacagaagataaagatttcccctcattcaaggcgggacgttagaaccaaaaaccccacatgatgctgggaccctctaagaattggaccctcaggaaggttaaactggaaaagaaaattacctcccagcacagagaaatggccttgaaacctgcctttctcctcttgggctcaagaaagtcttcctgggaattcataattacaggcctgycctccaacaggcttgaagtttgaatttatacaaacaacatagttcaagaagcacacagccaaaatgtgtgtgccaggacactcggggacattccggaggcagggagctgggtgctcaggggtggccaggacacgatgacacctgcctttgcacggacacagtgtgtggctggcagggggcaccccaaccccagtttccagcaggaagctgagaaccatkaagagatcaaagagatcaactagaaaaaatatcttgaagccagtgagctcagtgataacagtctccaaccatctttaaaagagagcgggtcggccaggtgtggtggctcacatctgtaatcccagcactttgggaggccgaagtgggtggatcacgagatcaggagttcgagacaagcctggccaacatggtgaaaccctgtctccactaaaaatacaaaaattagcgcagtagtgggcacctgtaatcccagctactcaggaggctgaggcaggagaatcgcttaaacccgggagacagaggttgcagtgagccgagatcgtaccactgcactccagcctgggcgacagagtgagactccatctcaaaaaaaaaaaaaaaacaaaaaaaaacgagagagttkatggtgcccttcactacttcccaagcatcctagagtcccacgggctgccccgcccacgggcagtggctgcggagtgtctgctctatcaggcatggtgatttcctgccagcctgtgcctttgacattcccaccagaggcagaaccttctgcaggtggccctggccaggctcctctctcctcccagctcctcattagcctcctttgccaggctaggaaaccgaggtatgcgaggttaaggaactttccttgggccgtgcagctgagagtgcgctttgcagggatttgcatccaggccgcgggactcacacaggccacacctgccacccccactgcctctggctcgtgggaggtgtgggatgtggcgggtggccggggcagtgctgggcaggcaggtgttggtattcacaacgttgctttcttgaccgattattttcctgggagacttcctcagtcaaagggttgatatgcttgcgagctctcgatgcacgctatcagattctccaaaaacgtacagscagcttcgcctgcacctgcagcttctgtgatttgtgctcttaattgacgtggcgctttttttaggttgagtcrtttttcattgccaacaatcttctcctgcattgaaataatagcttgtaaagaagcctcacgcttcctttttctctgttgactcttctaggacgcgctccaggagatatataatcagaagggcatgtttccaggggagcagtttaagcctgcccggaggccgtggaccctcctgaacttcctgtcctgggccaccattctcctgtctcccctcttcagttttgtcttgggcgtctttgccagcggatcacctctcctgatcctgactttcttggggtttgtgggagcaggtaatggacactgtcgctaacagctcacactctgacgggcctcacagtatcagccacagggtccgggacctggtgactcatcacagtggctgtgggaggcaggggcctggctgttatggaccctggagccaggatccccccacggcctgcgggcytcagagcctggattcttgcactgagctgagggtcgcctccccagagagccgaacggccgccacctggcgccatccccactgcagccccactggctggcgcccttgaggatgccgacgagagggtccccgagagggtccccagcccccctgtctgcttttgggctcttaggggtcaggctgggctggccattcgggaggtttaagcaggacatcatcattcagctcctccccattgacccccagtgacttccccactgtgtgcccaccccaggcacaatgccaggcccaccacgactcatcagctagcctggggccgaacagacacccagcctgtccctgtggtgagctccggcgcccacccacaccccgtaattgaggggtctctgtccgtggagacacagtccgtgtgcatcgccccgtgagccgactccccaggcccagcagctgggccagctcctcccctgctcctgccgcccctgccaggggccttggtgggaggggtcctgagaggcagtgactgccaccagcctctcccattggactacgagatgacttgaggccacccacagaggacaggatgtgacctgcttacatccgagggtcctgctcgtccacctctgtcacctgttgggtttgcaaggccgagctgttagaatgccccgaagcccttctgctcccaccagccaaagacccagaggggcaggcagggcaaggtccacgtgtccacctgcctcggacccagccggtcagaagacgtgcccctcacccctgcctgagcagaccacggtctgagagggctgtctccccgcgggccacacctactcactgacagcagaggccactgggtgcggggcagagggacagggtctggggcagaggaaggaagccccagtaacacgttttacagcaaaaaggcaaagtcatccgtctcacctcttctctctctctcctgtcttgaaagcttcctttggagttcgcagactgataggagtaactgagatagaaaaaggctccagctacggaaaccaagagtttaagaaaaaggaataattaatggctgtgactgaacacacgcggccctgacggtggtatccagttaactcaaaaccaacacacagagtgcaggaaaagacaattagaaactatttttcttattaactggtgactaatattaacaaaacttgagccaagagtaaagaattcagaaggcctgtcaggtgaagtcttcagcctcccacagcgcagggtcccagcatctccacgcgcgcccgtgggaggtgggtccggccggagaggcctcccrcggacgccgtctctccagaactccgcttccaagagggagcctttggctgctttctctccttaaacttagatcaaattttttggtttttaatcagttatcttgggaacttaacctggcccctcacctcttctgcaccccccgcccccgaaactgtctcgtaatgaatttctgctgtcctcctgggagtggacggccgggtcccgtccyccgggagcatcgctcggctcagcaccttggctcccagtgggggccccgtggagggcgcccgtagtgataagcacaccggcaygaacrtcaggtccattcctcgaagtcggagccctcactctgccctgtcctggggctggctgagggcgaacgccccacctcactttctagagccctgtctgtcctagctcctatctgaccttgtgtgtaaatacgtacatctgtttttaaagtggatgggcccctgagaactcagtgaaatgcagagttctccatgcacctaaagctcctttgtcgctctcatggctgtcagatcctggtccctccacactgggtgctggggagggaggaccctcggggctaccgcgcgcccccccatcccacagatcaggagccaaggagggagaacagggcagcctgtgggactctaggatgcttcagaagaagcgacggcaccgtcaaccctctgttttttaaaggtggttggagactgttaacrctgagctcattgacttctagagattttatttttactggttgatctcttggtggttttcaacttcctgctggaaactagaggtggggcaccccccaccccccagcctcgcactgtgtccttggggaaggcccgcccccatcctggccggtgtcactgtggcccggccacccctgagcgcccagctccctacctcctggacgtctctgagagtccaggcagagcagagggcagcgctcggccggtcatgctggctcccttggccttgcagcgagcccctggcccacgccgagcgagggatgcttctccctacagcatgtccactcccccggcatggccaggtggggcccctggggcaatggcagtggtagaacgctcaacttggttgcggtaccatcagcccacctgcatttggctttcgacttgcttgttctaagtcacagcgccctcatctttttagcaaggtaaaaaaaccaaaatgggtgttatctctgatatcttgaaaccagcgttctgaatagaggtaggttgagttttctaggggaaaacaaatggagaaaagaggcatgaagaaaagtaaaccgagaacataattaggcatcgggcctaagtgtcctggggagattggaggggacggcagcgttctgcatgatggaggcgctgccgggccccgggtctgtgggggccgtgctctcagggcgtgtgcgggacgccacctgtgcacacctgctcagagcacggctcctcgcaggggtgaaggggcagaccaacgaaaccagatgagaccaacgacaccatgcgagacacgcttgcagacactgttgttttggaaatgtgcttccctccatctgaaatctcatccctccacccgcccactcgggcagctgtgcygtgggcagggcatgcgctcccctggctgagcaccccagagattctcctgcaccttcctcatgccgcacgctgctcatccgtctccatgtgtgtttagatccatgccattcactgactcactaacacctgcaaaatctttaaggaaaaaagctgaagggtacgaccatgcacatatgtgacctggaaaatgcaaatttagatcttttatgatttaattrttattgtttcccatagaagttccctccctttgaaattaatatataatgtataaattctgcactgagccatggcggagctgggcagcccctaggttagagtggagacggaggcccaggcgcaggggtcacacctcatctggtttccttcccatctcacagcttagcttgtgcttctcaacaccaagtctttaagagcaataaaaactacaccatgaatgtttgaattttttttttttggsggggggagggtggattttgcttttcatccagaaggaaaaggggaggagagctcctttacattttttaaattaaattcataaatcccagaacagtcttttttttttctttttcctttacaccctacttctgagcttaattcagttgatgttatgtccaaattcaggctgagtgctcaggctgaagcaactctgtagcccacagtccgtgctggccactgtcggggtgaggcacattctaggcctggcatcgctgatgccctctgcacccrgtccttgagycaggccraggacaggaagggcattgctggcctgtagctcctgttacccacccagagccaggcgccacactggaggctcccaggcgggagggcccaggcccacccacgggcgtctggcmggtcaagctcccagcctgggccgtggtctcctggggacgccgctggcctcccagcttaggcccaggtgccaggtgtcatggggwctcctgcccatcttcccaaggatgccattgctgtcttcatcgtcttcccccgtgtgagacactggttgtctggtactcggcgacagtgtaccagacgcgcaccctatgtgaggtgctttaaggtccctgtcctcaggaagcgcagtctggtggaagagatgagcgctgaacaaatcactaaataacacaaaacaacaatgtaagcagcactttcttgtgtaaaaaaaaaaaaaaagcacgtcctgtcgatgaattttgagtctctctgccttgcctgtcccgactccctttcgcgcaccgtggcatgagaatctttcctcacgctgttcgttgcggtattgctgagcattgatgttgatttgaaggaaaagccgtggttggacccagctgtgtgtttcactcacgtgcaattgagtagctgttgccaggctgtccatgcctgttgtgactaccggttggggtcagatttggggtgaagaatgagtaastttctgcatgctttgtctctacctgagacacttctacaacaagccaagtataatctctccagccctgcagattttcacctgacttgttcagccccatgcgtagactcccgctgcaggcctctggcctgtggctcactgcatgcagcccctggcgtgcaatactagtgctccacggcgcgatgtgcttctagcccttgcactgcacctaggctcagggttcaaacggccagcccgaaaagcctgcctgccttctttytggaaacagcacgtccccggccgtgtgcctgcccctttctctactgagctagtccccaaaccaaaggcaagccccctcgggcctcgggggatggggccggccacacccctgactccgccctggctctgccccatacccctgccgtggggccgacctgggggatgcagacatccggctccgtattcctgcctatcggggccaggatgcaaaaacaatttttgcgtaaaagatgtcacactgatctgctggagtggggtggacacatgaattcagttttatcatgaacactcgcsactggctgcttgttaattcagggataatggtggcattcttacaaactgctcgggaaatagaatgacgggaacacttttagggagcccaggaagttaccagggacattggtgtcgccggcccaggcaacagcagcgtacgcttttcaaagatcattgagttgtcttagaatttgaagctgtgtaatgacaatgtcacctggagttcgtctccatttcttaactttttgttgcacaagtatttggacagaagtcgaactgtgaatgagatactgaaatgcactaaattgtattacattaaactggagttacttgatacaatgaaraaatgcatctgatctacttgtatttattgtctcagaattgtacgttgtgacaatcraatgttacttgcctaaatgccaggaaattcaactggccttttaatcagcaagatcgccagcaagtactgtaactgtaaaggaaaatctctctctctggagaacccacacaaaccattgacctgagtgcgcatgacagccactggcttctttttctatgattgaaaatctgccatcgctgactgttggccagtttcaaagggacccattgtatacagggtgcaaatgtattatacggatgtttccttttgtacacttcatttttacaagttttgctactcacaagctttatgtagtggaggatagaggtatttttggtctttagaagmttgtcggggtgagggctgctaacttacacttcagaggcctgtgtcccaaaggcctggctgcgtttgccgtgctgtgcgaggacctgtgtacacaggcaggtgtgcgcctgcccgagcgcgagtagctcttgtgtagtggtgaaatgctgcaggcatctgtttattaaaattgctgctgtgaaagacagggataaaatatccacaatataagagaaagcgactccgtgcctccttctgtttcttcgtttccagtctgcatagatgtctccaaggggaaaccagggccaccaggcactcctgtcccatggggccacccaccttcagagcccactcccacgggctctgtttccttggaggccatcctgccgatggcacttttcaaggccctcccttccctacgagttgctttctgggaggggaaattgaaaaggagagcggtcacctggcaaaaacacaggggaaatcagccagtccacaaaaatacgcaaaatgacctgatgatgtccaaaaaagggttttaaaagcgatcaaggacaaaaggttttcctaagtggcatgtatacatccaaaactactctttttttgtaaaaacattcatctgtggagaaaaccaaggaacccctttctcttctttattaaaaagcaaaacaaaaactcttgttagaaccaaaagatattccgagttctcgtttcgtgtcttctaaaaataagctaagctgaagagtctgggtgtccacatgctcctgggaatggccctggcaaccttggtgacatgctctctgctccggggctgcctccttccctaatggcatcagtgagggtgacaggtccatgctggtgcttagcccagctcctgagaagctgggaaggcctggctcaaagtcctgcgtccagatgccatttattttttaaaatatatcctgaagtcagagcacccagaattttgcatgatgttctgttgttttctcgggagatgaaagtgaagtgcctggtgccacttggtatggggatgtcatgggtgggtcaggccttgccctctaacaagagggactgacttgcctgaaccccacttcgcctgtttgaacacaagtgctcacgggcactggggggcagccatgcagaccccttcggacttcatcacccccagcatcacaggcatctggctcacccaggagaggggccaaggttaaccatgaggcccattgcctgcctttattggcccagatcccacctccgcttcacccagaagctcagtacgtaggagtcagtccctgccacctgacattctgggacatgtgagtgtgtacacatgtgcatgcatgcacacaccatgtgtgtggggaccttcatagccatacgcatgcacacatgtacacacgtcccagcacacacacgggcacacctgaagaataaggggcagcgttaggaagtgggcttgggaaaccatcctcttcatgtctcttcttgtttgtttgtttgtttttgagacggagtttcgctctgtcacccaggctgtggagtacaatggtgtgatcttggatcaccgcaacctctgcttcccgggttcaagcgattctcctgcttcagcctcccaagtagctgggattacaggcacctgccaccatgcccagctaattatgtatttttggtagagacagggtttctccatgttggtcaggctggtctcgaactcctgacctcaggtgatccacctgcctcggcctccccaagtgcttggaatacaggcgtgagccaccacagctggccttcttcacgtctcttctgagcatagtgcctgagaacccggaattgtccaggtggctcacacagcagcagggttcatggagataaaagcccttcttgaagaaagtggccccccagggctaaggaacttgatgaagaaaccaaacagtcccgtgacgtcttagcaagctagcaacgtggcctgagctttgctttgctgttggatgtgagctcttccactgcaggcggcctgcacctgggctgggcaggaacaagtccaaccgcaggtaccctggacgtgagccttgatcgtcccacgtgtggccagggggcctgtgagggtgcacgtgcacacacatgcacacacagacacacacgtgcacgtacaccagcaggtgcatgccctgccgctgaacccctgggggagggacaggcccagtcacaggggcaggcaccagaggacaaggccacggagggctccgcatggcttcggctgctgccctgcagtcggtcccagcctcatagcacttgccaggtggagccgctccgaagtcttaggatccagggatgggaaatgccagcaaggtcacatgtgtgacctcacttcacagctgctggcgcagcctctgcttgaacccagccagatcccagcgtgcctctactgtctgaattggcccattccatcgatcacagatggggagcacaagtgtgtttccgtgggacagtgtgttacgggggaggcttggatttgggggtctggaggcctctagatgaaaacccaaaactcactccttaggacctgtgtggcccaggccaagaaggttcttagcctccatgcccttccgtgttctagcctgtaaggtggggatggtcatcaggacgatcagcgtacctcctgggcttaggccgtgacaggtgctcagcaagtggctactgtcccggcagacccgggggcatcccaaacctgcatctgtcctgggccctgcctgtgccagcatggaggggaggggctgtggtagtggcctttgcttcctctccccttggaacctttcatgagcccccagtgtctcctcctccccatcattcatcttttcctgtcacttctttctttttttttttttttttttgagacggagtctcgctctgtcccccaggctggagtacagtggcgcaatctcggctcactgcaagctccacctcccgggttcaagccattctcctgtctcagcctcccgagtagctgggactacaggcgcctgccaccatgcccagctaattttttgtatttttagtagagacggggtttcaccatgttagccaggatggtttcaatctcctgacctcgtgatccacccacctcggcctcccaaagtgctgggattacaggcgtgagccactgcgcctggcctcctgtcacttcttaaatccttttggtctgggtgcagtggttcacacctgtaagcctcacactttgggaggccaaggcagaggatcacttgagcctaggagttcaagaccagtctgggcaacatagcaagaccccatttctaaaaaaaaaaaaaaaaattttttttttaattggccagaaactgtggctcatgcctgtaataccagcactttgggaggctgaggtgggaggatcacttgagcctaggatttcaagaccagcctgggcaacatagcaagaccccatctctacaaaacaaaaatttttttttaattggctgggcaccgtggctcatgcctgtaatcccagcactttgggaggccgagatgggaggatcacttgagctcaggagttcgagaccagctcaggcaacatggtgagaccccatctctactaaaaatatatatatatggctgggcatggtggctcatgcctgtaatcccagcattttgggagcagaggtggacaaatcacctgaggtcacgaatttgagaccagcctggccaacatggtgaaaccccatctctactgaaaatacaaaaattcgccaggcatggtggtgggagcctgtaattccagctactcgggaggctgaggcaggagaatcgcttgaacctgggaggtggaggttgcagtgagctgagattgcactactgcactccggcctgggcctcagaatgatacaccatctcaaaaataaataaattacatatatatatacatacatatatatacatatatacatatacatatatacatatatacacacatatatacatatatacacatatatacacatatatacatatatgtgtgtgtgtgtgtgtgtatgtatgtatatatatatatatatatatatatatatatatatatatatatataaaatagctgggcataatggtgcacacctatggtcccagctacttgggagaccgagatgggaggattacttgaacccagggggcggagtttgcagtaagccaagattgtgccgctgcacttcagcctgggtgacagagcaagatcctgtctcagaaacaaaaaatccaccaggtgtggtggcgtgcacctgtagtcccatctacttgagaggctgaggtgggaggatcacttgagcccaggaggttgaggctgcagtgagccatgatcgtgccactgcgctccagcctgggcaacacagtgaaattctatctcaaaaaaagaaaatcacccctttttgctgggctgggcctcctttgcgagtgcagtgcggttcatcccttagcatctctgaggtgtgtgccccgccgtgtccctccacaccgctgtgacactgctgctcttctgcagagttgatagcacggggcatggtgaccgacgtcatcccccccagtaaaggcgcacgaggagggcgggctcctgaccggcctcagcaggactgtgtccaccagagcaacacacccaaagccagggttctggctgcagctcctcagaccagtgggaggtcattagacccgcaggagcgcacgtgactccgggaagtgggatgggaccgtgttgccggaaaagccggatgagcaaaggcgggcaagcccaaggtgttcagacccggccggagaggtgggagacggggaacacggcagctgcacagctctcccggggagagtccgcgtgtggtgggagggacccagcccgactccctaggagctggttttcatgtttggggcccacgaagaccttgagctgccttcaggaaggattgtcacgcggggcagggtgtgtaagcagatgagctgcgctgtgccagcctgtgctcctctgcccacgcagcaggccgtacattccgcacccgggatgcctgggacgcccacaggccttggccaggctcggcttgtggagtgcagagcaagggctggtggagctcctcgggcgcttggagccagggagtgtgcgcagtggcaaggggggaccttagagacaagcaaatgctaaatgatctgaaatcgggattggagatggggcaggggagagtcggctctagacaggcatgtccagcctgtttgcaaaacccctgcaagatctaaggacatccaggggacagacatcgtgagcatggggttcggctcccatgtgcctcttgtcatggagggacttgaagtcctgagctatgccagaggtcagaggacctagaaggacccacggcatgtctgtcctgggtgcctgcagagctgggtgggccttgcccgcagtgtgtccgggaaggggctgcagaactgggtgggccttgcccgcagtgtgtctgggaaggggctgtacacctgtccccatggcttcccttcagcttctctgcgattctcagtcgcccgtcgggaccagaagggattctagagcatactttcccctcaagcagttgtttgtttgtttgttttttggagacagaatctcgctctgtctcccaggctggagtgcagtggcgtgatctcagctcactgcaacctccgcctcttgggttcaagcgattcttctgcctcagcctcccaagtagctaggattacaggcacgcaccaccatgcccgggtaatttttttttttagtagagacgggggtttcaccatgttggccaggctggtctcgaactcctgacccctcaggtgatccacccacctcggccttccaaagcgctgggattacaggcgtggtcaccgtgcctggctcaagcagcttttaaatgcaggacttccgcccccgaaattccaactcacacagctgtaattacatggtcagttccacctgcccaggactttatacgaaacctgacccccctcggccgggcgcggtggctcatgcctgtaatcccagcactttgggaggccaaggagggtggatcacgaggtcaggagattgagaccatcctggctaacacggtgaaatcccgtctctactaaaaatacaaaaaattagccgggcgtggtggcaggcgcctgtagtcccagctacttgggaggctgaggcaggagaatggtgtgaatgcgggaggcgga

SEQ ID NO: 94582 - DNA, 134598 bp, Homo sapiens
  misc_feature (1)...(134598): n = A,T,C or G
aaaagacaaacttgtcacgattggctttgatagcgataaaggcgactaacaaattcattgaaatgttgtttccctccggtaacctgaatctgtccttagcctgcacagaaaggggaagtgcgagtggagttggggaaatgagacggcgaatgtcaagtgcttaccacgtagtgcagactcaggctgacagggggccacagaaatgcaaatatgtgagcagtgtgggtaactgcatcctggggaggaagtcctatgtgctggaataccacaagcacccatttctgccctgtggtactgcgcagcgttggtgtgaagcgatacataggcgtgaagtcccgagaacgcaattttcctggttaaaggacagcaacgtctacatttcttccaagaggcctactttgttggaacttcacttcacttgtgaaattagggtgttgggcagtgagtgaccactaactcagctcccttcttgtgaatcttggcaacagaaaacttttcgtttgtattactgaataaagtgtgtttcttacaaactgtttttttacaggcaagaggcagagggaaacacttgcacatcaggcctgagtttgcattctcatctctgccacctcctacaagctatggagagttagtctattgattcttagttttacctgtgaaattgcgaagatgatataacctgctcatggggcagttaagattaaacaggataaggtgggtaaaaaaccatatataacccataaagctgctgagcctttttaagcctatacagagacacgttgcaggtgataatacagatgttattattttaacaatcaagctgtttttggaatccaaattcttcctaaagctgtgggaaacaggtctaatcccctttagtgtcttggagactccctggagtagtggagaaggcccgttctttgaagctgctaaatcctgaccctgccaattagtgtgaaacctgagccaggcatttcaccacctggatctccctttcctcatttttccgaaagggatcgcagtatacctactttttaggcttgcagagggaattaaagataacattaaaaacactgctctggttattttattttgggggtgatgaagtcttgctctgtcatccaggctggaaagcaatggcacaatcatagctcactgctccagcctcagcctcccaaatagctgggactacaggctcctgccactacagcaggctaatttttaacgattttttgcagagacgggatcttgctatgttgctcaggctggtctcaaattcctggcctcaagtgatcctcctgcctcagcctccaaaagcactgggattacaggcatgagccaccacacctgagctttcttgaaaaagaaaatactagaaacccggaaattatggatttctggttacctactgttacgtaacaaaccaccccagaattccaattatattttgctctcaaatctgcaaaatgggctggttcctgctgggacggctggtttctgatccattcagcaccagtgggggcagcccaaaggctggggctgagggtcccgtaaaagcgtacatgtctggtggttgatggtggctgtcagctaggacctgggaccattagagctgtccctggaacacttacacatggcctctccctgtgtctgagcttccttgaaatatcagggctggattctaagggcaagtgttcagagagcgaacaagaaagccatatagttgctgtattgcctttcctaacctagccctggaatcagttctaccacgtgccacattctgttccttagaaaggagtcagcacggctaccctatattcaaagcaaaggaacttagactccacctctatgtgggaggaatgtcaaggaatgtgtaggcatgttttaaaccaccacaagccatacatgatatcagtgcccagggcattgtagctatcatgatttgatagctggaactaatttcctgagccctctggtctatcctacttaggacctacttttccactaggctcctttaatgtcttgtagaactttggcctcaactcatttcttacctctcaaagtctcactctgtccttatagaagaagatggttattacctaggaaaaaaggtaataatctaagggaggcttccctaaacttctttcacctgtgcctggcaaaagctagatgcttacaaattgcaaattcttgtttcattgtagtttttgagtgttactctccttggcaggataatttttatttttattttttattttttgagaaggagtctcgctgtatcgcccaggctggagtgcaatggtgtgatcttggttcactgcaacctctgcctcccaggttcaagtgattctcctgcctcagcctcctgagtagctgggattacaggcgcatgccaccacgcccagctaatttttgtatttttagtagagacaggatttcaccatgttggtcaggctggtctcaaactcctgacctcatgatccgcccacctcggcctcccaaagtgctgggattacaggcatgagctaccacgcccggcctgataatttgtaatttttttttgagacggagtctcgctctgtcgtccaggctggagtgcagtagcgtaatctcggctcactgcaagctctgccccctgggttcaggccattctgcctcagcctcccgagtagctgggactacaggcgcccgccaccacgcccggctaaattttttatttttagtagagacagggtttcaccacgttagccaggatggtctcgatctcctgacttcatgatccacccgccttggcctcccaaagtgttgtgattacaggtgtgagccaccgcgcctggcctataacttgtaattttttgagaccaagttttgctctgtcgcccaggctagagtgcagtggcacaatcggctcactcaacctctgcctcctgagttcaagcaattctcatgcctcagcctcccaagaagctgggactacaggcctgtgccaccacacctggctaacttttgtatttttagtagagatggggtttcaccatgttggccaggctggtctgaactcctgacctcacgtgatcccccaaccttgggctccgaaagtgctgggtgtgagccatcgtgccaggccaataatttgtaattctaaatgcccccttctgcaactaataaccaattttcaagtatcagcttgggaaagctctttgagagagaaattattctagttctttactaaatatgtgtaagatcttggtttaggtctaaattgttggcccaaagtttggcataaggggtctcaaaggttcagtcagtcggggaaattagcagtccaagaacagcagagaagcaaatgaaaataccagaaactggccggacatggtggctcatgcctgtgatcctagcactttgggaggctaaggtgggaggatcacttgagatcaggaattctagaccagcctggccaacgtgaccaaaccccgtctctactaaaaatacaaaattagctgggcgtggtagcatatgcctgtaatcccagctacttgggtggctgagctaggaaaattgcttgaacctgagaggcggaggttgcagtgagccgagatcgcgccactgcactccagcctgggtgacaaaagtgaaactgtctcaaaaaaaaaaaaaaaagaaaaaagaaaatactagaaacccagaaattatgagagcacctgtgagagagtttaatgccaggccatgacctttcagcagcctcatcacagaaggctggattgcacctctctaaatgggctttttcctactcagtttttcttgctccaagagtaacccttagatttttttttttttcgagacagagtctcgctctgtcacccaggctggagtgcagtggcaggatcttggcttactgcaaccgcccccaccaggttcaagcgattctcctgccccaaccccccgagtagccgggattacaggctcgtgactccacgcctggctaatttttctatttttagtagtagagatggggtttcaccgtgttggccaggctggtctcaaactcctgacctcaagtgatcacccaccttggcctctcaaagtgctgggattataggcgtgagccaccgcgcctggtcaaattttttatattttgtagagatgggcactatgttgcccaggctgttcttgaactactgggctcaggcaattctcctggctcagccttccaaaatgctcagattacaggtgtgagccaccgtgcccagcctctaagatgtccttgtcctagctattattatgtactattatcttctaatctttcccaacaggactattttcattgtaactcaaatggaaatgcctttcatccctcctaaatttgtcaaagctgaggatggtaaatgcacataacaggaagaaagcattaggaaattagctcaaatcatctagaaagaagtgcttattgacttatcctaaatatataatttatataaatttacataattacataaaagtacttaggctaaattacagtaaatatatttttgttatactgttaattacaaccttgaagcttactaaattattttaaaactacttggccacattaagttcagataaaagttgtccctaaaacattagcattgatgtccgctaaagtagaactccctttaaattattattattattattattgagacagttttgctcttgttgcccaggcaaatgcaaatacacgatctcggcccactgcaacatttgcctcctgggttcaagcgattctcctgcctcagcctccccagtagctgggattacaggtgcccactaccacccccggctaattttttaaattttatttttagtagagacgaggtttcaccatataaaacataatttagggccaggcgcggtggctcatgcctgtaatcacagcactttgggaggccgaggcgggcggatcatctgaggtcaggagttcgagacacacctggccaacatggtaaaaaccgtctctatcaaaaaaacaaaaaaaaattagccgggcgtggtggcgtgcgcctgggaggctgaggcaggagaaacacttgaacccgggaggtggaggtggaagtgagcccagatcacgccactgcactgcagcctgggctacagagggagactccttctcaaaaaataaataataaatgttttaattgcaaaaattagcatgtagaaaatagggcaaaaatacaaattgtctgtgatgctaagcccgagacacccaacaagttaattttcctgtttttagcgtaaaatctttcaaataaataactactgcttttagtctctgcaccaggaatctcacgtgctttcaaatgttttacaaagcacgtaaaaaagtatttgaaaagtcccacttacccctcccactcctatttttaagattattaggatcggcccaaatttaaaaatttaacaaaaagagtgcttattaattacattttaaaatgaagggttacaaaaagagatgagcctggcatttctaattcgggggccttgggacctctcccctccaagtgcaagttgtagcaacctgccgggtccacgcatgggcgggtcatactccacgggttccggtttccactccctgtgaaccaaaagccagagaggcccacgcacgastccggaagtgagggagggaggactttcgtacgcagccgcctcccagctggaacctcatctttagtgctcggccgcgggcggcgtaactcggggttccgcctcggaatacctcccacttctcttgtctaagaggagcagtagcaagctgagctcagagcgaagctggcgagccaaggagataaagaaccctcggtggggatgcccagagggtgcatgctccacgcccctcgaaaccgattctcattgctgctgctgcaaagcaacccgaagtgcgccacctacccgactgaggctgcgcaagccccggggtctgggcggggtggtcctcgtgcgcgccgcgtcgccgtggagacgagggcgggcccgcgcgagactggcgtctagaggcgcgcgaagcgctgaggcgggcgtggaccgcgcgggagttaagaagcaggtcccggatcgccgtataccgccgggttttctcccaacgtcaggcccgatggctcggcttccccaggtacgaggcccggccctaacgtccccaccctcttctgggctcggcctttccggcagtgagcccggcaaggacctcagtcgggttcctccgagcccggtgaaatctgtccgagcctccgcttcctcccctgaaagtgcaggtgatgttgtctacctgcgggtctgtggtgcgggaatggaggaagtgcgacaagagggcgcaggacggggcccggagcctgccatcctctcccgccgcgtcttctcggcttcttgtcttccgccctgggggcaccgcatcctcccaggcgtctagtgcgctcctggccggtgctcgagtccacgcaatgccccttagcgtgcgcggatccaaatcaggggtttcctcctcccggctccgtggcccaggagcggaagggctggtatatgggcgaccttactcccactgagcccgcagggagtaacgcagtaaacaaacctggaagccttccccgcgtgggaggtgggtacctgtttttatgggaggctgttcaggtttcttaactgctgtgtagatgtgttgtaaatatttgttgaatgaatgatgtgagggacttgagtacagccatacctcgctttattgcacttcacagataccgtgttttttacaaattgaaagtttgtagcaagcagccctgcaccgagcaactattttttcaacagcatgtgcccacttcctgtcacttacactttggtaactatcgctatatttcaaactttttatttcaggtgcaccgttacagtgatctgtgatcagtgatctttgatgttgttattgcaattgttttaggtggccacgaacctcactggtataagacagcaaacttaagtgttgtgtctgactgctccactacctgccagttccctgtttctctcctccctctcggtcctccttgtagcctgagaggcaacaatattgaaattaggccaattaatagccccacagtggcccctaagtgttcagtgaaaggargagttccatgtctctcactttatatcaaaagctagaaatgacgaagctagaaatgcctatgctctgtaaatgcaacaacaaacccaggatgaccacacatctmtttactgaatgtctttacatcatatttacagtgtggtttactgaatattttaagcctactatcgagacctactgttcagaaaaaaggattcctttcaagatattactggtcattaacaaggcacctggtcaccaaggaactctgatgaagatgtacaaagagattaatgttactttacatgtctgctaacacagtatgcattctatagcccatggttcaaggagtaattttgactttcaagtcattatttaagaaatacattttgtgggctgggcatggtggctcatgcctgtaatcccagcactttgggaggccgaggcgggtggatcacgaggtcaggagtttgagaccagcctggccaacatagtgaaaccccgtctcaactaaaaaatacaaaatattagccggatgtggtggcgggcacccataatcccagctactggggaggctgaggcaggagaatcacttgaacccgggaggcggagcttgcagtgagccaagattgygccattgcactccagcctgggcgacagagtgatgagactccatatcaaaaaaatatatatatattttgtgacsccatagctgccataggtagtgattcctctgatggatctgggcaaagtaaattgaaaatgttctggaaaggatttctaggtgccattaagaacattcatgatttgtgggaaggggttaaaatatcaattccagcctggccaacttgaagaaaccctgtgtctactaaaaatacaaaaattagctgggtgtggtggtgggcgcctgtaatcccagttactcaggaggctgaggcatgagaattgcttgaacccaggaggcagaggttgcagtgagccaagactgcaccactgcactccagcctgggcgacagagcaagactccgtctaaaaaaaaaaaaaaatcattaaaaggagtttgaaaaagttgagtcaggccgmcatggataactgagagactcaagacccgagtggaggaagtaactgcagatatgatagaaaaatcaagcaaactggaattagaaggggagcctaaaaatgtgaccaattgctgcaacctcatgataaaacttggatggatgaggagtggtttctttttttctttttttttttttttgagatggagtttcactcttattgcccaggctggagtgcatggcacactcttgacctcctgacctcatgtgatccacctgcttcggcctcccaaagtgctgggattacagacctgagccactacatgcccggctttgtttttacttttgttttcagacagggtcttgttctgttgtccaggctggagtgcagtggtgatcatggctcattgcagacttgaacttctaggcgaaagtgatcctcctgccttagcctcctgcctcctcagtacctgggtgtgtaataccatgcctcgctaattttttttttgagatgagggtcttgttagttgagcaggctggtcttgaactcctggtctcaagcagtcctcctgccttggcctcccaaagtgctcaccacaacctccgcctcccrggttcaagtgattcttctgcctcagcctcccgagtagctgggattacaggcatgtgtcaccacgcctggctaattttttgtatttttagtagagacagggtttcactgtgttagccaggatggtctccatctctcagcctcccaaagtgctgggattacaggtgtgaatcaccgtgcctggtgaaagtggtttcttgagttgaaatctacacctggtgaagatgctgtgaacattgttgaaatgacagcaaaggatttagagtattacataaacttagttgacaaagcagtggtaggatttaagaggattgacttcaatttgaaagatgttctactgtgggtaaaatgctattaaatagcattacatgctatagagaaatctttgatgaaaggaagagagtccatcgatgtgacacacatcactattgtcttattttaagaaattgtcatagcactttgggaggctgaggcgggcggattacctgaggtcaggagttcgagaccagtctggccaacatggtgaaaccccgtctctactaaaaatacaaatattaccaggcacggtggtatgcgcctgtagtcccagctactccagaggctgaggcaggagaatcgcttgaacccaggaggcggaggttgcagtgagcattgcaaccactgtgctcyagcctgggcgacagagtgagactccatcttaaaaaaaaaaaaaaaaamaacattgaaaatgccacagttgccggatgcagtataatcctgcattacaggctcatgcctgtaatcctagcactttgggtggctgaggtgggcgatcacttgaggtcagtagttcaagaccagcctggccaacatggtgaaaccctgactctactaagaatataaaagccagttgtggtggcggrcacctgtaatccccactatttgggaggctgaggcaggagaatcgcttgaacccgggagccgagatcgcaccacagagtgagactctgtctcaaaaaaaaaaaaaaaaagaaaaaataaattgccatagccattccaaccttcagcaatcactaccctgatcagtcagcagctattaacatggaggcaagaccctctactggcaaaaatattacaactcactgaagaatcagataattgttagcattttttagcaataaggtgtttttatttatttttatttttatttttgagacagtttcatctcatcacccacggtggaatgcattggcatgatcttggctcactgcaacctctgcctcctgggttcaagcgattctcctgcctcagyctcctgagtagctggaattacaggcacctgycactacacccagctaattttgtgtttttagtagagacagggttttgccatgttggccaggctggtctcaaattcctgatctcaggtgattctcccgcctgggcctcccaaagtgctgggattacaggcgtgagccattgtgcctgcccaataaagtggtgtttttgtgtgtgtgtgtttgttttgtttttgttttttgtttttttttttgagtctgagtgttgctctgtcgcccaggctggaatgcaatggcgtgatctcggcttgctacaacctccgtctcccaggttcaagcaattctcctgcctcagcctcctgagtagctgggattacaggtgcccaccaccaccaccagctaatttttgtatttttagtagaacggggtttcaccatattggccaggctggtctcgaactcctgaccccgtgacccacccaccttggcctcccaaagtgctgagattacaggtgtgagccactgtgcccggccaaatatttttaaattaaggtatgtacattagttttttagacaatgctattgcacacttaactacaagtgtagacataacttttttttttttttgagacggagtgtwgctctgttgcccaggctggagtgcagtggcgtgatcttggctcactgcaagttctgcctcctgggttcacgccattctcctccctcagcctcccgagtagctgggactacaggcgcccgccaccacgcccggctaattttttgtatttttagtagagacggggtttcactgtgctagccaggatggtctcgatctcctgacctcatgaccgcccatctcggcctcccaaagtgctgggattacaggcgtgagtcaccgtgcccagctgacataacttttatatgaactgggaaatcaaaaaattcatgtgactggctttatttatgtggtctgcagctgaactctcagtatctctgaggtctgcctgtactagtcccagttcygccacttgttagctgggaaccttgagccctccagctgtaaaatgaagttgataaccacttgctgaggtagttatattaaagtaggtagttcatgaaaagtgcttagcactaatgcgtagcagagtaccttatctatagatgttattttgattatagtctatacatttttgattgtgtggtactctcaacattttgttaaaacataacattgataagaaaaaatygattctggatgggtccactgtctgtctgtagttggcacattcctcatgcctatgtgggtttttgccggatgctctgatttcctcccatgtccccacgataagcacattagcttcattgacatgtctaaatgatcctagtgtcagtgagtgtgtgtgtgagtgtgcaatgccatgaatggcttcctgtccagggtggcatccccccttgtgccctgagctgccaggatacactctagccaaccttgaccctgaactggaataagtgggtaaataattatcttacttgttcttatgaatcttctgtacatatatgtatagctcacatttatttcagtgtttaatattaaaagggtttggatctttatttagaagtttggtgatgttttctgaccagaaatatgttacaggaacttaaatcttgtttgtatcaactaccttttatggtaaaattggtctccttatacatcattttgcttaaagttgccgtttccaagaacctatcaatgacattaagtgaggacttactgtacttagttctagatgaggctggatgatattcaggttcaatttttttttttttttgagatggagtttcacgcttgtcacccaggctggagtgtaatggcgtgatctcggctcctgcagcctccacctcctgggttcaagcgattctcctgcctcagcctcccaagtagctgggattacaggcacctgccaccatgcccggctaatttttgtatttttattagagacggggtttcaccatgttgtccaggctggtcttgaactcctgaccttaggtgatccacctgcctcggcctcctgaagtcgtgggattacaggcgtgagccactgcgcccggccaggttcaattttttagcaagatttcatcatgggtggtagcacttcatcagtgctttgttgggtttattttggtctcttttttatttgttggaggtcttttctaaatgttttatgattctcaattgtctgtttatacttaagtgtaactgagagattatggccgagcgtggtgggtcccacctgtaatcccagcactttgggaggctgaggcgggcagatcacttgaggtcaggaattcaagaccagtctagcttagccaggtgtgatggtactcaggaggctgagacagaagaatcgcttgaacccaggaggcagagtttgcagtgagccgagattgagccactgcactgcagcctgggcaacaaagcgagactctgtctcaaaaaaaaaaaaaaaaaaaaggtgtaactgagaaattagttggaagctccttgtgtctgagcaggacttgtgagttcaggggcttcactttagggtaatctagggacaagtctgctttttcattgatggagagtaaggcacaggtctcagaatctggagatgtgttagtttttattgttttctgagaagacttttccagtctcctgcctgagaggtaccatctagctaccagaattttggaagcgggacagcagaagtggcgtgaataccctgtctgacagggttggaattctgtgtggtccactttcctttggtatccactctgaagtttttcatttcctcaaacctgttaggccacttcattttcctttcttgtaaaacctgtggaaatccctcatgtcctataatcgcttctgtcatctctttaaccttatggttcgttcctttgtattctttgctgccaccttagaaggtcaatctacatgtttaactgggagtcaacacctaataatttttgtttttcttggactgttttttttttttttttttttgagatggagtttcgctcttgttgcccaggctggagtacagtggtgcgatcttggctcactgcaacctcygcctcctaggtacaagtgattctcttgtttcagcctcccaagtagctcggattacaggcattcgccaccatgccaattttttttttttttttttaagtagagacagggtttcaccacgttagtcaggctggtggcgacctcctgacctcaggtgatccacctgcttcggcctcccaaagttctaggattacaggcatgcgccactgtcctcggccatgttttgtatttgattatcattatattcattatattccaacttataagcaagtttatattcatacatgtccttattgaaagcaaacctgtgtcctagtttttccagtatatgtgtattttatctgtgaggttacagacgttgttttagaggctggagatagaatggagagaagatcagatgtgattcctgtttccatggaatttatattttagtggggaaggcagacatgtacaaataggtagaatgctggtatagagtatataacagaagggagtccttgaccatgaaggacattccacaggatcattatgacagaaacccaaggcggtgacacattgattatagcagtatttcacgaaaaatcactatttgaatactccatttgatttatttatagaaataatcacttatgatgacctctgttacttggagtgtagtatcagaaaaactaggacatcggtttgatgtaagtaaggattattcgttttgtatggataaactggctaattccttgtctgattgtcattgaaatatgtgaccttgattataagggtgacttcattcttttagaatgaaacaacttgtaaatgcatcaccgttactcaacacaggatgtgttcaccctgttagcttgcctccaccatttacttaaatcttactcttctgtcttactacttgtattagtttcctagggctgctgtaacaaagtaccacaaaccgggtggcttaaaactaatagaagtttattctttcacagttttagaggctagaagtctgaaatcaaggtgtcatcctctccctgaaggctcaggggagaatctgttccatgcctttctcttagcttctgatgttgccagcaatctttggcaattcttgtagatacatcactctagtctctgcctctgtcatcacattgcattctcctctttatgtgtatctgtccctgtatctcttctcttttaagaaagacacaaatcgtgttggattatgggcccaccctactcccatgtgacctcatcttaacttacatcttaattacttctgcaaagaccctgttttcagataatgtcacattcgcaggtagcaggggtgaggatttcagcaaatcttttttggggaacacaattcaacccacaacactgctattcctggcactaaaagaaaaatagtaataataataataatttaaaaaactatgccataatttattcagttcctaatgaatatttttgatacaaattatcaccaattgaaaatgaaaaatgggctcaggcacagtggctcacgcctataatcccagcactttgggaggccgaggcgggcagatcatttaaggtcaggagtttaagaccagcctggccaacatggggaaaccccatctctactaaaaatacaaaaagtagccagttgtggtggtgcattcctgtaatcccagctacatgggaggctgaagcaggagaatcggttgaacccgggaagtggaggttgcagtgagcctagattgcaccactgcattscagcctgggcaacagagcgagactgtctcggaaaaaaaaaaaaagaaaaagaaaaaatgaaaactaggcaaggtgcagtggtgcctgtctgtagtcccagctacttgggaggccgagacaggagaattgcttgaggccaggagtttgagattacagtcagctatgagaacaccactgcactccagcctgagtgacagagtgagaccctatctctacacacaaaaaaaggcactttgggaggctaaggtggatagatcagttgagctcaggagtttgagaccagcctgagcaatatagcaagaccctgtctctacaaataataaaaaataagctgagcatggtggcacatacctgtggtcccagctacttgggaggctatggtgagaggactgcttsagcatgggaggttgaggctgcagtgagccgtgatggtgccgcagtacttcagcctggataataacatgagaccctggrtgacagcgtgagaaagaaaaaaggccaggcatggtggctcatgcctgtaatcgtaacactttgggaggctgaggtgggaggatcacctgagcctgaggaggtcgaggctgcagtgagctgcgattgcactgctgcattccagcctgggtgacagagggaaatcctgtcttttttttttttttttctgagacagagtcttgctctgttgcccaggctgcagtgcagtggtgtgatctcggttcactgcaacctctgcctcacgggttcaagtgattcttctgcctcagcctcctgagtagctgggattgcaggtgcccaccaccatgcctggctcatttttgtacttttagtagagatggagttttcccatgttgggcaggctggtcttgaactcctgacttcaggtgatctgcccgactcagcctcccaaagggctgggattacaggcgtgagccactgtgcctggccagaaattctgtctttaaaaaaaagaaaagaaagaaaatgaaaactacacacagtaacactgataaccataaaaattaatctgaggaaaaataagaaatcttggcctctactggtgtttttgtgaagggaagttgaaggtgctgaagcatctagacatgaagaaagaaccaggcacaacttctgagtgtggctcgctctcctctcagtttccttcattagaaaataacattttgcagatgacatgattctgtatctagaaaaccccatcgtctcagcccaaaagcttcttaagctgataaccaacctcagcaaagcctcaggatacagatcaatgtgcaaaaattgcagacattcctgtacamcaacaacaggcaagcagagaaccaaatcatgaatgaattcctattcacagttgccacaaaaataataaaatacctaggaatacagctaacaagggaagtgaaagacctcttcaagtagagctacaaaccactgctcaaagaaatcagaggtgacacaaacaaatggaaaaacattccatgctcatgtataggaaaaatcaatatcatgaaaatggccatactgcccaaagcaatttacagattcaatgctgttaccattaactaccattgacattcttcacagaattagaaaaaactactttaaaattcatatggaacaaaaaagcatgaatagccaggacaatcctaagcaaaaagaacaaagctgcaggcatcaygctacccaacttcaaactatactgcgaggttacagtaacaaaaacagaatggtactggcacaaaaacagaaacatagactaacggaacagaatagagaacccagaaataagactgcacacctacaaccatctgatctttgacaaatgtgaccaaaaccagcaatggggaaaggagtccctatttaataacaggtgctgggagaactggctagccatattcaaatattgaagctggaccccttctttacaccatatataaaaactaactcaagatgggttaaagacttaaatttaaaacccaaarctataaaaaccctggaagaaaatctaggcaataccattcaagacataggcacaggcaaagatttcatgatgaagatgccagaagcaattgcaacagaatcacaaattgacaaatttagtttaatttctaattaaactaaagcacttctgcacagcaaaagaaactatcatcagagtaaacagacaacctacagaatgggagaaaatttttgcactctgtccatctgacagaggtctaacatctagcatttacaacattatgagataaaaacagccccattaagaagtgggcaaacaacatgaacagacacttttcaaaagaagacatatatatggtgaacaaacatgaaaaaaagctcaatatcactgatcattagagaaatgcaaatcaaagccacaatgaggctgggtgtggtggctcaccactgtaattttagcactttgggaggccaaggtgggcagatcacttgaggtcaggagtttgagaccagcctggccaacatggtggaatcttgtctctactgaaaaatacaaaaattagttsggtgtggtggcaggtacctgtaatcccagctacttgagaggttgaggcaggagaatcgcttgagcccaggaggtggaggttgcagtgagctgagatcgtgccactgcactccagcctgggtgaaagagcaagacttcktctcaaaaaaattaaaaaaaaaagtaatttaaatataatattttaagtcagagacctagcccacattcatctagtgttgaattaaggagagcaggagactaggagctggcatntagttcagaaatgtggctcctgagaggctgcaaatcattttctctcttttttattctctttttcttgtagttagaaggggaagataaaagactttgattcatgaagaatctgctcactgagaagtgtatatcaagccacaatttccatcaaaaagtgattaagcagagaatggagaagaaggttgattccaggtgagtgatgggacttgagaaaaaaatataactggaatgatggttcatataaaactaaacattttgtgtatgaaaaaattataaattatgagtgaggtagtaactgtgggtaagttttttttgtcattgatatttcaaatttttcatctataagataatacacatttcgtacattatgttacagtcaaaaaacattctgagtagtgcatggaaatatcaatcattaaaatttgattctgagcagangtgagtattattttcctgagctttgaagttatatcatccaggttggctggctctcgtgtcttctacttttgatcatggttgctttcagacttttaccttcagttgactgtatctctccaatgaagctctcggcaccttataacgtggcagcctctgtataactctccctttctgggttttggtaattgttccctcccctcatctctttgggcctagaggtagtaccaccttagcttctactggcttcaggttcctgcactgtttcttgtagttcctctatacccacaagtttgtaaatataccatcttcaaattatcctatttttagtatgtcatctattttcttgtgacctttcataggttttatcgtgaatgttaatggattttgtcacatggtttttgtacatttattgagataatcatgtggtttttgctcttttttctattaataggtgtattacataaattgatttttgaatgttaaatcagccttgcattcctgggataaatcccacttagtcatggtgtttatatggcatatagttgtgttagtcagggtcctctagaggaacagaactaataggatatatgtgtatgtgaaagggagtttgttaaggagaattgactcacacaatcacaaggtgaagtcccgtgataggcagtctgcaagttgaggagcaaggaagccagcagtggctcagtccaagtcccaatacctcaaaaatagggaagccaacagtgcagccttcaatctgtggccaaaggcttgtgagcccctggtaaaccattggtgtaagtccaagaatccaacagccaaagaacttggagtctgatgttcgagggcaggaaacatccagcatgggagaaagatgcaggctagaagacttagctagtcagcttctcctaccttctgcctgcttttcctagtggtgctggcagccgttggatggtgcccacccacattgtgggtgggtcttcctctcctagtccactgactcaaatgttaatatcttctggcaacgcccagatacacccagaaacaatactttgcgtccttcaattcaatcaagttgacacttaacattaaccatcacaatggtttttatacgttgttggatttggtttgctactattttttgaggatttttatgtctgtagtcacgaggtctattggtcttttatttttctttttggtaatatctttgtctttgktatgatggcgatactggtctcaatgaatttggaagtgttcctctattttctggaagagtttatggagcattgttttgatatttatttatttatttatttatttttgacatggagtctcgctctgttgcccaggctggagtgcagtggtacagtctcggctcactgcaatctctgcctgcccagttcaagcgattctccatcatgttggccaggctggtctcaaattcctgaggtgatctgcccacctctgcctgccaaagtgctgggattacaggtgttgagcgatagtgctcggcctattatttctttttaaatctttggtagaattaatcactgaaactatctgtgcttttttttgtaggaaaaattatttattttagagacagggtcttgctctgttgcctgggctggagtacagtggcacgatcacagctcagtgcagtttctaactcctgggctcaggcaatcttgctgcctcagcctcccaaagtgctgggattacaggtgtgagctaccaagcctggcctctttgtaggaaaatttttaattactcatttaattttttttacttgttagagatctattaggtttctatttattgtttttgtttgttttttgagatggagtctcactcttktcacccagactggagtacggtggtgtgatctcagctcactgcaacctctgcctccctggttcaagcaattctcctgcctcagcctcccgagtagctgagattacagatgcatgccaccacgcctggctaatttttgtatttttattagagatggggttttaccatgttggcctggcttgtcttgaactcgtgacctcaaatcacccacctacctcggcctcccaaagtactgggattacaggcatgagccactgagcccagctgtgtttcttcctgagttaattttggtaatttcagtttttctagaaatttttccatttcatttatgttgtctaatttgttggcataaagttaattgtatgcccttataatacttttaatttatgaagggtcagtggtaaatgtcctctctttcatacctaattttggtgatccatgtcttctctcttttctcattggttgatctaggtaaagacttgtcagttttaatgagggacccttatggttacgctcttttttttcttaaactaatttgaattgggttcctgtagcttgcaacttagggtgctatgaatatacagaagtttcttatagaatccactgggtcttgggcaaagtgggagagagaactgtttgagacctattcagcaggtattatggacccttcttcctgagcagagccatctttgtgcttcaaaatttcatcgtgggagaatgaatttggttgatccagcaagggtcagttttttcccccagtgtaatcaactaggacttggaggaaggtcattgagttcaagcatagctgctgagatcctgcccctgttgatagacgttctcatagaaggagtcctcgtaagctgaaccagcaccctgacagtgtttactacatggtccgcagagtactctttaggcctgctttatttcatcttctcaagcaaattaacgatggccttaatatgaagctctgtggsctctaactctggcatagtttctgttttttttttttttttttttttgagatggagttctgctctgtcgctcaggttggagtgcatggcgcgatctccgctcactgcaacctctgcctcccagttcaagcaattctcctgcctcagcctggtttcttcaaataccctgctgctttaggctggggaggctaagaagggaatgtatttcctttaagttttttgtttgtttgtttgagacagagtcttgctctgttgcccaggctggagtgcaatggcgtgatcttggctcactgaagcctctgcctcccgggttcagtgattctcctgccttaatctcccgagtaactgggattacaggtacatgccaccacgcccaggtaatttttttatattagtagagaaggagcttcgccatgttggtctggctggtcttgaactcctggcctcaagtgatccgcctgtcttggcctcccaaagtgctgggattacaggtgtgagtcaccgtgccccagccttaggtgttaaatttgcagattcagaaaggtatgggaaaatgtatcatttaagatatcattttgaaacaaacaatgtaaccataacgcaggtaaagaaataggttattggccggcgcagtggctcacgcctgtaatcccagcactgtaatccccacactttgggaggccgaggcgggcagatcatctgaggccaggagtttgagaccagtctgaccaatatggtaaaaccccatctctactaaaaatacaaaattagccgggtgtggtggcacatgtctgtaatcccagctattggggaggctgaggcagaagaattgcttgaacccgggaggcggaggttgcggtaagctgagattgtgccattgcactccagccagggcaataacagcgaaactccatctcaaaaaaaaaaaaaaaattacatggtaagaatatttcagtttatctattttgctgatgggcatttggactgttttcagtttttaaattcctttttttatatattgacaaattatagttgtatgtatttataggatacaaagtgatgttattatttatttattattactatttttttttttgagacggagtctcgccctgtcgcccaggctggagttgcaatggcacaatcttggctcactgcaacctccacctcaggggttcaaacaattctcctgcctcagcctcccaagtagctgggattacaggcacccgccaccatacccagctaatatttgtattttttttttttgagacggagtctagctctgttgcccaggctggagtttagtggcgcaatctcggctcagtgcaagctctgcctcccagsttcatgccattctcctgcctcagcctcccaagtacctgggactacaggcgcctgccaccacgcccggctaattttttgtatttttagtagagagggggtttcaccatgttagccaggatggtcttgatcttctgaccttgtgatccgcctgccttggcctcccaaagtgctgggattacaggcatgagccacagcgcccagccagtttttgtatttttaatacagatagggtttcaccatgttggccaggctggtctcaagctcctgactgggattacaggcgtcagccaccatgcccggctgatgttatgattttttaatacaatgtaaaatgatgaaatcaagctgtttaacttatctgtcacctcaagtatttgacttttttttttcttttgagacagggtctcgctttgttgcccaggctggagtgcagtggtgtgatcatggctcactgcagcctcagcctcctgggatcaagcaatcttcatgcctcagacccccaagtagctgggacttcagtaatgcaccaccatgtctggtgaatttttgtattttttgtagaaatggggtttcaccacgttgcctaggctggtcttgaactcctggcctcaagcaatctgcccctcccaaagtgctcagactacaggcgttagatgctgcacccagccttgacattttttgtgatgagaagatttgagatttactctcttagggatactgaaatatatagtactcgggcgtggtgactcgtgctggcaatcccagcactttggtttttcgttttgttttgttttgttttgttttgttttrttttagacagagtcttgctctgtcgcccaggctggagtgcagtggtgcgatctcagctcactgcaacctccgtctcctgggttcaagcgattctcctgcctcagcctcctgggcagctgggattacaggtgcacaccaccatgcctggctaattttttttgaatttttagtagagacagggtttcaccatgttgatcaggctggtctcaaactcctgacctcgtgatccgcccacctcagcctcccaaagtgctgggattacaggcatgagccactggcccggccaatcccagcactttcagaggctgaggcgggtggattacctgaggtcaggagttggagaccagcctggctgacatggcaagaccctgtctctgctaaaaatacaaaaattagtctggcatggtggcatgctactataattccagctactcgggaagctgaggcaggagaatcacttgaatctgggagttggaggttgcagtgagccgagattggagattgtgccactgcactccagcccgggtgacggagtgaaactccatctcaaaaaaagaaaaaaaaaaaaaaatgtagtactgaattgttagctatagtcaccatgctgttcaatagatattaaaaatcaactggccgggtgcggtggctcatgcctgtaatcccagcactttgggaggccaaggcagtcggatcatgaggtcaggagattgagaccatcctggctaacatggtgaaaccctgtctctactaaaaatacaaaaaaaaattagctgggcgtggtggcgggcgcctgtagtcccagctacttgggaggctgaggcaggagaatggcgtggacctaggaggtggagcttgcagtgagccaagattgctccactacactccagcctgggcgacagagtgagactctgtctcaaaaaaaaaaaaaaaaaaaaaaaatcaactgtatttctcctatttaactgaggctttgtgtcctttgattaccatcttcccaattctccctactcctagcctttggtaaccaccattctcctctctgtttctatgcattcaattattttagattccacatataagtgagaacaggtcatatttgtctttgtgtgtttggagtatttcacttaatataatgttctccatttccgaaattcaygttgtcgaaaacgacagaatttcttcctttttttttttttttgagacggagtctcactctgtcgccaggctggagtgcagtggcacaatctcagctcactgcaacctctacctcccggattcaagcgattcttctgcctcagcctcttgagtagttgggactacaggcgtgtgccaccatgcccagctaatttttgtatttttagtagagacagggtttcaccatgttggccaggatggtctcaatctcttgacctcatgattgcccacctcagcctctcaaagtgctgggattacaggtgtgagccactgtgccgggctaaccatctgtatttctagtaagttcccaagtgatggttatgctgttggctttggtatcacactttgataaccactgttctatggtatccacctcagaatagattgtggaccaaagattatgggaatcttcaattttgctagataatgattttctgaattgtttgaaccagtttatactcttgctggcagtgtatgaacatgttcattgacttaccaacactatactaatctggtaggtatgtctcattgttcgtgtgtgtgtgtgtgtgtgtgtttcttttttctttttcttttttttgggacaggatctcattcttttacccaggctggagtacagtggcatgatcatggctcactgcagcgtcgacctgccagctcatgcaatcctccttcctcagcctcccagctcatgcaatcctccttcctcagcctcccaagtagctgggactacaaatatgcatcactgtgcctggctckgtgtgtgtgtgtgtgtgtgtgtagacagggtcttgcttggttgcccacgctggtcttgaactccagagctcaagtgatcctcctgcctcaccctcccaaagtactgggattataggcatgagccatgtgccagcctcattgtgattcctattttcatttcctgaattcctgttgtggcttagtaccttttttttttttttctttttttgagatggcgtctccctctgttgcccaggctggagtgcagtggcgtgatctcggctcactgcaacctgcatcccctgggttcaagcaattctcctgcctcagcctcccaagtagctggaactacagtcacgcaccaccatgtctggctaatttttgtattattagtagagacggagtttcaccatgttggccaggctggtcttgaactcgtgatccacctgccttggcctcccaaagtgctggggcttagtacctttttatgtgtttattgggtatctggattttctctttttgaagtacatattcaagtcttattcctgtttttctcatgagttgtatattgagtatttgtactaattaatatataggaggttttctrtttttgaatatgaatcttttgtatgttttatgtgtgataaatatcttctccctctgctctcttcatcatttgatgaattaagatgttttaaattttaagccgggtgccgtggcttacgtctggaattctagcactttgagaggccaaggagggtggatcacttgaggtcaggagttagagacaagcctgaccaacatggcaaaaccccgtctctactaataatacaaaaattagctgggtattgtggtgtgtgcctgtagtcccagctacttggggggctgaggcaggagaattgcttgaacctgtgaggtgggggttacagtgagctgagatggcacccctgcactccagcctgggcaacagagtgaaactctcaaaaagaaagaaagaaaaaaaaaagaaagccaggcacagtggctcaacccctgtaatcccagcactttggaaggccaacgcaggcagatcatttgaggtcaggagttcaagaccagcctggccaacatggcgaaaccccatctctactaaaaattaaaaagtcaggccaggagtggtggttcatgcctgtaatcccagcacttcgggaggctgaggtgggcggatcacctgaggtcgggagttcgagaccagcctgaccaacatggagaaaccccgtctctactaaaaatacaaaatttgccgggcatggtggcacatgcctgtaatcccagctactcgggaggctgaggtgagagaatcgcttgaacctgggaggcggaggttgcagtgagccgagattgcgccattgcactccagcctgggcaacaagagcgaaactcagtctcaaataaacaaacaaataaataaaaataaaatcagccagatgtggtgtcgcatgcctataatcccagctacttgggaggctgaagcgggagaatcacttgaacccaggaggcagaggttgcagtgagccgagatggtgccactatactccagcctgggtgacagagtgagactctgtctcaaaaaaaaaagaaaaaaaaatttaacttagtaaaatttgtgtcttttcctttataattaatatgtgttctctcaggtttaaggaatctatttcttccctgatgtcatgaagatattctggtttttgttttttggagacagggtctcgcactrtcacactggctggattgcagtggcacaatcagggtcactgcagcctcaacctcccaggcttgagkagtcctcccatctcagcctcccaaatagatggcactacaggcatgtgccaccacacccagcgaatttttgtattttttgtagagatgggctttcatcgcactgcccaagctggtgtcaaactcttcggctcaagcaattcgcctgccttggcctcccaaagtgctgggattacaggtgcgggccaccatgcctggcctaagatattctgtatcatctttaagaactcattattttgctgtttacattttattgtccagacctcctgaaattgacttttgttgatcatgtgagttagggaccctatttctttttttttcacatgggtatgtaattgtcctagcacagtttattgaaaaaactgctctatagtgccattttaatcattactcaagtgtccattaaggccaagtctgtctcttggctatgtaccttgttccttcggtcaatttgtttctgctatacaaaatcgtgatgtcttgaatatgtagccttgcgataagcctgatatctaagtaagactgcttatctagtacttttaagaatgtctaagctattcttggtcttttgtaattctatgaaagcttcagaatcaacttgtgaagtcctctccctccccaaaatagaatctattgttgttggtttttttgtttgtttgttttttaagacagtcttcctctgtcgcccagcaggagtggcacaatcttggcgcactgcaatgcctgcctcccaggttcaagccattctcctgcctcagcccccagagtagctgggattacaggcacccaccaccacgcctggctgttttttgtatttttagtagagatggcatttcaccatgttggccaggctggtggtcttgaactcctgtcctcagtcaaggtgatctgcccgccttggccttccaaagtactgggtttacaagtgtaagccactgtgcccagccctctattgtggttttaattgagattactttgaatctatagatcagagtgggaaaaactgacatctgtattgtactgagttctccattttgcctataaaattattagatttactcctatrtttgatatttgtgatgccatttgaaaatagtatataaatatatataactattttttccttattgctagtttatagaaatatagagttgaccctcatttatttggttttctctcttcctggtcagtttcactggctgtcaactgtattagtctttttaaggaaccagcttttctctttgatcttctctgttatgtttgtcgtccctttgtggctgctgttcttagaaaataactgcttacaaggctgacccttggctggtgtctggaaacttagatttcagaagggttcccaccattcyctaactgatgaatagttaactggacctacactgttgtgtgttcatgcaatgttgtttatgctgaatactagcactccctctaggagtctggaattttggtatgtgttaggcagagggtacctgtctgaccagccctcagtaaaaacttgggtactgagtctctaataagcttcattgatacacaacacttctcacgtgttatcacaattcattgccggaggaattaagagtgtcctttgtgattccgctgggagaggattcttggaagcttgcgcttgatttcttccagactatgccctgtgcccctcttccctttgttgatttgctttgcatccttttgcataaagattgaagaaaaaatcgtaatggaagttagcaaatacgttgtaatgctcataaaaatactacatatcaatatatgaaatacaactacagtcatgcttagaggaatgtatgatgggtttaatgcatttaatgtatagcattaaatgcatgtattataaaggaattaagactgaaaaccagcgaactatgcatctatcattttttcttttattttccatttttttttttttttgatacagggtcttgctctgtcgctcaggctggtgtgcagtggcatgatcatagctcactgcagccttgaactcctgggttcaagtgatcttcctatgtcagtctcccatgtagctgggagtagaggcatgcatcatcacatctggctaatttttttttttttttccgagacacagtcttgctctcccgcccaggctggagtgcagtggcatgatcttggctcactgcaacatctgcctcgtgggttcaagcaattctcctgcctcagccccccgagtagctgggattacaggcgtgtgccaccacgcccagctaattttttgtatttttagtagagacagggtttcaccatgttggccaggctggtctccaactcctgacttcaggtgatccacccgccttggctttccaaagtgctgggattacagccgtgagccactgcacccggcctaattttttaattttttgtagagatggggtctctctgtgttgcccagctgatctcaactcctagccttaagcaatccacccaccttggcctccygtagtgctgggatgataggcatgagtcactgcctggccaaaagtttttttattttaaactttyaattaattaattttgagactgggttatgacactggctaatttttgtatttttggtagagatggggtttcacctgttgcccagggtggtcttgaactcctgggctcaagtgatccacccgcctcagcctcccaaagtgctgggattacaggcatgagccaccgtgcctggccaaaaattatttactgataaatataacacaaatacagaaaacggcatgaaacaagtgggtgccctagcgaattattatatggcagacacctttgtaatcaccacctgtttaaaaaaaaaaaaaaaaagataagaccttggcagtcatttctgaacttccttccaaacccactgactgcccctcagagagtaaactactagcttgacttgaatggtaattactttctcacttttcttcacggttttattacccaactgtgtatccttaaacactgtatagtttagctttgcttgtgggttttttgagcaggattataagctactttcattgttttcattatagttaccaacatttttcagatttcctaaaatggttctatattgcttttttatttttaaaattcattgagatataattcacatactacacaattcattcatttcaagtgtgcaattcaatggcttttctaatactcacggagggttggttttttgttttttgttttagtttggggtatgacttctattgccagagggaaagtaatatatgtacaaaaccaaatgtttgttgatataacttctgcatcataattaaaatccagggagtatctaaaaaaatagtcatctcaatcaaaatccactacttccatttgggcatggtggctcaggcacttataatcccagaactttgggaggttgaggtgggaggattccttgagtccaggagttcgagaccagcctgagcaacatagtaagaccccgtctctacaaaaagtaaaaaaaaaaaaaaaatagccaggtgtggtagtgcttgcctgtagtaccagctgctcaggagtctaaagtgggaggatcacgtgagcctgggagactaaggctgtgtaatttgtgattgttccactgcattccagcctgggcaacagagccagaccctgtctcaaaaaaaaaaaaaaaaaaaaaaaagtagagttcaagaccagcctgggcaacatagtgagaccttgtctttactaaaaaaatttttaaaaattagccaggtgtcatggggcatgcctgtattcccctggaatcaccaacactgttagagctgttagattaattagagacctgagataataagaaatacaggcatcctttacatagtcttctgttgttctttcttcccaatcagagacttgcgaatgtgtggaatgacaccatcaccagcaattgtagccttgatgagagagtccaattcttcttcttcactaatagcaggttgcaaatgatgaggggtaatagctttacctttaaatcttttggtgcctttgatgtcacttcaagtatctctgcagtgaggtatccaaggatggctgcactgttcacrgtggcagtcacgcccctacacatccatgactggtcgtcctacatttgaggtgtctgtctatgaatatggcccacccggaactgtaaggaggctctctgtgagcgggaaacaaccacctttgttctggcctttccagtgtcctgctcagccttaacgccacccttgcaaattctgtcaaagctcaaacaaggcagagaaagggctagtcagacacacagtgagatcctaccacctactgcttcatggcacggtgattgaaactgcccagagagtttatgttttgtgtgtgtgtggtaacgtatacataacaaaaaacttactattttattttaacctttttttttctttttttttgagacagtctcactgtgttgcccaggctggagggcagtggcgtgatcttggctcactgtaacctccacctcctaggttcaagtgctgcttgtgcttcagcctcccaagtagctgggtctgcaggcatgcgtcaccatgcttggctaactttttgtatttttagtagagacggggtttcatcatgttggccagactggtcttgacctcctggcctcgagggatccacctgccttggcctcccaaagtgctaggattacaagtgtgagccactacacctggcctttttttttttttttttttttgagatggacttttgctctgtcgcccaggctcgagtgcagtggcacaatctctgctcactgcaacctccacctcacgggttcaagctgttctcccgcctcagcctcccaggtagctgggattacaggcgcgtgccaccatgcccagataatttttgtatttttggtagagacagtgtttcaccatgttggccaggctgctctcgaactcctgatccacctgcctcagcctcccaaagtggtaggattacatgcgtgagccaccacgcctggcctattttaactgtttttaagtgtacaatttagtaccattaagtacattgacaatgtgtaaccatcaccactatccatacccaaaacttttcatcatcccatgtggaaattctgtattcattaaatggtatctcctcattcctcctaccctaaccctttataacctttattatacttttctgtttctaagaatttgcttgttctaggtacctcatgtaagtggaatcatacgacatttttccatttgtgtctggcttatttcagttagcatagtgttttcaaggtttctgtatcagaattttattcctttttttcttttgagatggagtctcgctctgtcaccaggctggagtgcagtggtgtgatgtcagctcactgcaacctctgcctcccgtgtttaagcgattctcttgcctcagcctcccaagtagctaggactacaggcgtgtgccaccatgcccagctaatttttgtatttttagtagagacggggtttcaccatgttggccaggatggtcttgatcttttgaccttgtgatccacccgcctgggactcccaaagtgctgggattacaggtgtgagccacagcacccggccttattcctttttatagctctataatattccattgtgaactgtacgccattttttaaatccattatcagtttatgaacatctgggttgtttccaccttttggctattgtgaattatgctgctgtgaacattgtgtacaagtttttctgtggacatatgctgtattgcttttataataagaaaataaatatttttaaagcagaaaattcaggccataggatacatatctcattgtagtaatagataattattttctccttcacattccttctactgccagtaaatacaatgatattttctttttataatgtaatttcctgtacagattgtcttgttaaggagggccatttacaaatgaccagtatttggccagagtctcacccaccttcagtgtaaatgtataaactgatgatgttatgttttagaaattagaaaccactttcccaaatcaggaggaaaaaatccagttttaatttccaagttaacacaattaaatatatgtattgtggttccataaatttattttatgaagttgagcctgaagaataagccagtctatcatcacaccttagaaattcaggtatctgaatagtaaacagtttgtctttagagtgtgaagtccgttatctcttttgattcccacaaccccaagcaatgttatttccatttacaggggaggatactgagggtaggaaaaatcaagtgatttgccataaacttcaaatctgtgaagtccattatctcctttgattcccacaaccccaaacaatattatctccatctacaggggaggatactgagggtaggaaaaaatcaagtgatttgccataaacttcaaatctgtggaatcagggtgtttttttttactccaaatcttgatatatttctactattctactctttaattggcaattataagtgttccttgtagattaagcaagtgatttttgtattaaacctaagttgcaacaatagcacaccatggcaaggactactttttttttttttttttttgagattgtgccattgcactccaggtcagggattcgagactagcctggccaatatggtgaaaccctgtgtctactaataatacaaaaattagccgggcttggtggcgtgcacctgtagtcccacctacttgggagactgaggcagaagaattgcttgaacccaggaggcggaggttgcagtgagccgagatggcgccattgcactccagcctgggcgacagagtgagattccatctcaaaaaaaataaaaataaaaagtgttcccttttctctgcttccttgccagcatttgttatgttttttggtctttttgacaacagtcacctaacaagtaagatgacacctcattgtggttttcatttgcattttcctgatagtgatgttgagcatttcttcgtatatgtgttagccatttgtatgtcttcttttgagaaatgtctattcagagaatttgctcccctcacttttttttttttgagacagggtctcactctgtcacccaggctggagtacagtggtgggatctcagctcactgcaacctctgcctcccaggctcaagctatcctctcagatcagcctccggagtagctgggactacaagcacacaccaccatgcttggccaattttttgtagagacaggattttgccgtgttgcccaggctggtgttaaattcctggaccgaagccatctgcctgtctcagcttcccaaagttgccccttttttaattggatttttttttttttttttgctgttgagatgtttgagttctttgtatattctgcatattaatcctctgtcagatagtttgcacatattttttataatatttgtaatcccatttttttttatggagtcttactctgtcacccagtcaggagtgcagtggtacaaatttggctcactgcaaccaccacctcccaggttcaagcgattctcctgcctcagcctcccgagtaactgggattacaggtgcatgccaccacgcccagctaattttgtatttttagtagagatggggtttcaccatgttggccaggctggtcttgaactcctgacctcaagtgatctgactgccttggcctccgaaactgctgggattacaggcatgagccaccacgcccagcctgtaatctcattctataggttgtctttttactctgttgattgtttcctttgctgagcagaagtttttgagattatcccattttgtttacttttgcttttgttgcctgtgcttttgatgttttattcataaaatcttttcctagacgtttgaagtatttcttctcgtagctttctagttttggatcttacatttaggtctttgatccattttgagttgatatttgtatagggtgagaggtggggagtctagtttcatttttctgcatgtagatactcacttttcccagcaccatttattaaggagggtgtcctttccccaatgttcttggagcctttgtcaaaaataaattggcactgggtgcgatgggtcacacctgtagtctcagcactttgggacaccaggacaggcggatcacttgagcctgggagttcaagaccatcctgcgcatgtggcaaaaccccatctctacaaaaaattagccaggtggtagcatgtacttgtagttgcagctcctcaggaggctgaggtgggaagatcacctgaatctgggaggtcaaggatgcagtgagccgtgattgcatcactgtattccagtggggcaacagaatgagactctgtcattcatagatagatagatagatagatagatagatagatagatagataaagtagcttaataacttgatactctctgttctgttccattggcctatgtgtctgtttttatgccagtaccatgctgttttggttactacagctttgtggtttattttgaagtctggtggtgtgatgcctccagctttgttctttttgctgaggatcactttggctatttgggatcttttgtggtcctatacaatttttaagatgtttttcctatttatgtgaagaatgtcactggtatttttatagggcctgtgtgcattttagcatgttcttctgtcctctgttctcaacctttttctgcaaattggtaactggatttagagacttaattagatttaagttttattttttgggagtagtactagataatcttatagaagcaaagcactgaacagtaccatactcaaatatgatacctgtattagagcattctcatgctgctatgaagaaatatctgagataagtaatttataaaggaaggaggtttaattgactcatagttctgcatttctagagaggcctcaagaaacttacaatcatggtggaaggggaagcaaacacgtcctttttcacatggcggcaggaaagaaagtgcagggtgaagtgggggaaagccccatataaaaccatcagatctcgtggaaacttactcactatcatgagaacagcatgggggaactaccaccataatctaatcaccttccatgaggtccctcccatgacacgtggggattatgggagctacaattgcagatgcgatttgggtgggggcacagctaaaccatatcaatacctatgttttgttgttgttgttgagacaagagtgtcactttgtcgcccaggctggagtgcattcagttcactgcagcctctgccccctgggttcaagtgattctcgtgccccagcctcctgagtagctgggactacaggcgtgtgccaccacacccggctaatttttgtattttgtatttttagtagagacggggtttcaccatgttgtccaagctggtctcaaattcctaacctcaggtgatccgcctgcctcagcctctcaaaatgctggaattacaggcttgagctaccgtgcctggccatcaatacctacgttggaactatcagggaattttatttttttctttcttcctgtcctgtcttgtcctgtcctgtcgcccaggctggatggagtgcaatggcatggctcaccgcaacctccgcctcccgggttcaagcgattctcctgcctcagcctcccaagtagctgagattacaggcacccgccaccacatccggctgacttttgtatttttaatagagacgggatttcgccatgttggccaggctggtctcaaactcctgacctcaggtgaccctcccgcctcggcctctcaaagtgctgggattacaggcatgagccactgtacctggctgagaacctgtctttaaaaaaaaaattagattgcttctaccttttggctgttgtgattaatgcttctaccttactttttatagttaccccgtgccctgcaaatatgttcactcttgactttcatttctttaaacatattcattttagcatatacagctgtgtgtgtgtaaagaaaaaggggtatgtgggaacagtctgttcgttcttcacaattttgcagtaaacttcgaattgttcttaaaaaacaaaatctaagagactgattgtggtagctcacacctgtaatgccagcattttggaaggcttagttgggaggattgcttaatcccaggagttcaagaccagcctaggcaacatagcaagaccctatttcaagaaaacaatacaataaaattttttaaaaagtatattaaactttgtgtgtgtgtttgtgtgtacatacgtgtgctttaccctcagtgcagatattctgaagcaagagatcaagaatgagatcaggccgggtacagtggtacatgtctgtaatgccacccctttggggggttgaggcaagaggattacttgagcccaggaatttgagactagcctgggcaatatagtgagaccctgtctctaaaaaaataaaaataaaaaattggccgggaacagtggctcaagcctgtaatcccagcactttgggaggccgaggtgggtggataacctgaggtcaggagttcaagaccagcctggccaacatggtgaaaccccgtctctaataaaaatacaaaacttagctgggcacggtagtgggtgcctgtagtcccagctactagggaggctgaggcaggagaattgcttgaacccgggaggcggaggttaaacgagctgagatcgcgccactgcactccagcctgggcaacagagtaagaccttatctcaaaaaaataataaaaataaaaagttagctggtcatggtggtgcatgcctgtagtgtcagctactcaggaggatgtggtaggaggattccttgagcccaggagttcaagaccagcctgggcaacacagtgagacctcatctcttaaaaaaaaaaattatcaggacacagtggcgagcacctgtggtcctagttgcctagttgcttgggaggctgagatgggaggatcacttgagcctgggaggtcgaggctgcagtgagctgtggtcatgccacagcaatccagcctgggcaacggagtaagaacctgtctcaaacaaaagaaaactgtgttaggcctaatgactccagggggtgccctccagctctgtagttcctgcctagagctgacccagcagtacccacctctagtggttggccaatatttctgtcagattgggctgcttattatccttgcagcataggtattgtcagtctcaatgagcttatctgtttaattttgcttgtatattaaaagtatttgcatcacatgcagagataactttattctctccttgcctctttcgtcctcaaatttaaggtattttaaggatggtgcagttaagaaaccttattctgcaaagacactgtccaacaagaagtcttctgcatcctttgggatccggagggagttacctagtaccagtcatctagtgcagtatcgtggcacacatacttgtacccgacagggccggttaagagaactgcgcatcaggtgagcttatgagtggccaccagtctatgggtactttgcttttgttctcctttcttggttaaaatgggggaatgattcttattcttccaccgcaattagtgggagatcttgatgcctgttcttggtagtagaatgttcagatgaaaaggatattcaggaacctgcagacataaaatctgtcattgagtgttttcatttctccacttgtgcctcacaatatgacrctatcaagattcttccagaaaaagtctaaacgtggtccaagaaagaaggaactactcttttttgctattctttttttccccccagattttctggtgaattctagaagagctgtaacacttctgctactctcgattagatatattagagacatctgtttcttcattcaaaaatttatcaggtcaggtacggtggctcacacctgtaatcccagcactttgggaggccgaggcaggtggatcacctgaggtcaggagtttgagaccccgtctccactaaaaatacaaaaaattagctgggtgtggtggcacatgcctgtaatcccagctacttgggaggctaaggcacgagaatcgcttgaacctgggaggccgaggttgcagtgagctgaaattgctccactgccctccagcctgggcgagagtgagactctgtctcagaacaacaacaacagatttatctggtgcttacccatgccaggtgttacgctagatgctgagcatataaagtgagtaagatcatcttggtttatgacttaatgagagtttaaaatcaggtaggcttgatagactcttaagccacaacaataaagtgagattagtgcaatgagaggagaaggatgtggtaccacaggcaaatacggcgagaacagccacactagtatagccagcagttactctctggaggaagtggagtttaagctcagccctgaaggataatgtaagaataagccagataaagggcaggagaaggtgtgttttaagttgagctcaaggtttaactctataagacaagccacctttggccgggtatggtggctcacgcctgtaatcccagcactttgggaggccgaggcgggtggatcacgaggtcaggagatcgagaccatcctggctaacacagtgaaaccccgtctctactaaaaatacaaaaaattaactgggcgtggtggcaggtgcctgtagtcgcagatactctctggaagctgaggcaggagaatggcgtgaacccaggaggtggaggttgcagtgagccgagatcacaccactgcactccagcctgggcgacagagtgagactccatctcaaaaaaaaaaaaaaaaaaaaaaaaaaaaaaaagacaaggccgggcgcggtggctcacacctgtaatcccagcactttgggaggccgaggcgggtggatcatgaggtcaggagatcgagaccatcctggctaacatggtgaaacctggtctctactaaaaatgcaaaaaattagccaggtgcagtggcgggtgcctgtggtcccagctactcgggaggctgaggcaggagaatggtgtgaacccaggaggcggagcttgcagtgagcagacattgggccactgtactctaacctgggcgacagagcaaaactctgtctcaaaaaaaaaaaaaaaaaaaaaaaagacaagccacctttgtgtgtataccagacactgtgctaggtactggaggtactataaagcaccaatttctgctttcaggggctcacagtgcagagggaatgacagacaccctgtgagctgatctctgtgatatggtgtcataacattacaggaggggtttgaacagagtgctgagagtacacagctactcactctgtttacattggagaaggttcaggcatttgcyggccattttaggcaggaagaataatatgaacaaaagaattattatgtacttcctgtacctcatttttgaagtttttaatctcttcactgacaatttatgttgaaaatattttttaaaaataatctgcttgattttagctttataaatctgccccatcctatgccctgtatgatgcaaaattagctatgataccgccttttgattcatactaacatccctctgctgagaccttaaaggcttcctttcctttccagaaaactgctgatgtaagccaaatggaattttaaaatatgtatatgctttttttccttctttcagatgcgtggccagaaagttcttatatttatggattcgaatgacttttggaagagtatttccctctaaagccaggtagtattagctcagaacaacataattgtgttgagttcattctagggttttcttttatattaagcctgtatataaacttcattatggcttgtgctgttacattcctccccagcctccagtaggtagaagcagtccctaatataaccatgtaatacagtggtaacttcatatctgttagttgactgcagctgcattcatggtgagctgtgaatgttatctacaaagtagccagtaaaggttaagttttagtgttcagtggtgtggcctttagctagctactgtggccttcagcttcaaagaaaaagaaagaaaaaaaaataacaagcaagtgaccaaatgaaagaatcaggcagggcgccgtggctcacgcctgtaaacccagcactttgggaggccgaggcgggtgaatcatctgaggttaggagttcgagaccagcctggccaacctggtgaaaccccgtctctacaaaaattagccgagcagccaggcatggtggctcatgcctgtaatcccagcactttgggaggccaaggtgggcgggtcacctgacatcgggagtttgagaccagcctgaccaacatggagaaaccccgtctctactaaaaatacaaaattagccggacgtggtggcgcatgcctgtaatcccagctacttgggaggctgaggcaggagaattgcttgaaccctggaggcggaggttgcgatgagccaagattgcacagttgcactccagcctcggcaacaagagcgaaagtccctctcaaaaaaaaaaaaaaaaaattagctgagcatggtggcatatgcctataatcccagctactcgggaggctgaggcaggagaaccacttgaaccctggaggcataggtggtggtgagccgagatcgcgccattgcactccaggctgggcaacagagtgaaactccatctcaaaaaaaaaataaatgaataaaaataagaataaaaaagaatcatacttaagtaaatcaggatagataagatctctctgggaaaagtgtttgcccaagagaagtaattgagctctttcagggcactggtgagactgacagattggcttgatcaagtgcagaacctgggggaaaaaattggctttggcaaaggaaatgaaattttagtgaggagcaaattcctctgtcatagcttcattttgtatagaccagtgctgcccattgctgtggttttgggttataattgctttagctgcagtgctaagagtggactgcaagagagagtcacaggagtcagggacaccatacagaaggcaggggagctggagagaagggaccagtgcgaggtatgtttccaaaggagaattggcagcctttgagaatgtaagcacttcttaaaaactgaaatgtcttgggttccctcctgctcccctcttccccttttctttcccttactgtaatctttcctgtttcattttttgacagtctgactccttcattcaatgtctctcaagccaacttggcctgtgtgtgttttctgaaatcttttctttgtatactttatgaggggccctgctgttccatctcttcctttttgtatgtttacagtgaagctcctgatgtggctatgttactggccaggtctaggtccattctgcccatgtgtggtaaatcaatcactgtgacacaggttttgcaaaagagaaaaaacttacttgcaaggccactgagcgaggaggtaggagaacaggtctcaaaccggcctccccaaagataagccttagggatatttgtgggttagggaaktggggtggtttaaggtgtggggaaaggtgattggcagtggggaaaatgcagtaacattcattgcacacaagtgtagtcagggttcatggcatgtcataggacacgtgtacagaaaatagaggcgttaacatgatccaagggtggagtttttggccctcaggcatcaaaagtccctctcgggctccttcacaggcccagttgaagggttggtggtctctatcagtttgaactgtacaggagctagcccaggtttcctgaagaataactgaagtgaccattgccatggtgacctatgaatgttatctacaaagtagccaatgaaggttaagttttagtgttcgggccgggcgtggtggctcctgcctgtaatcctagcactttgggaggccaagacaggcggattacttgaggtcaggagtttgaaaccaacctggccaacatggtgaaactttgtctctactgaaaatacaaagaaattagccaggcatggtggcaggtgcctgtaattccagctactagggaggctgaagcaggagaattgcttgaacccgggaggccgaggttgcagtgagccgagatcatgtgactgcactccagcctgagcaacagagaatctgtctcaaaaaagttgtagcgttcagtggtgtggccttcagcttcaaagaaaaagaaacaaaaaaaaaagaaacaagcagcgaccaaaagcaagcagggcagctgagctgatcatgttactcccttgttttcagctgtagcctgtcctagctgcaagtgctaggcattgttcacctctattttaccttcttctgaatcttgggcatgtcatccttcactgccttggtagctcttcagtgccttaaataaatttttttgctctgctttttttgttgttcattgggagaattgatctaaattgctattgtcagaattctcttttttgtttaatttattgcatattctattctccactgttagcttagaagttatattctgttttactcttcctttactgactgtccagataagttacaaatgtgaatgtgtattttcattcaaatacaaatgtatatttgtaacttaccagaatctaatgttaattggttctttaccctcttcctagataagacagagtccttagaatactttagctctgcccatctccctctctttgtgtatatttttaaatctataaagcattattactctcattttattttattttattttttgagacagagtctcgctctgtcgctcaggctgcagtgcagtggcacaaggttttaccatgttggccaggctggtcttgaactcctgatctcaggtgatctacccacctcggcctcccaaagtgctgggattacaggcctgagccactgtgcccagcctattattctcattttatatagccaatatttatttagatttattcacatatttaccctacttacccttcctttttcatttgtttttctttttttgccctaacattacaacaaatatttaccctttctgttgccttttttctttcttctcacatctccaggtttctatctgkgataattttccttctcctatcagaacgtcccagggtattctctttcgggtaggtctgctagtgagaaattctctcatattttgtctaattccatcttcaccttggaaggatattttcactgggtatgaaagtctgggctgctggttttttcccagcacctcaaagatattccatcactgtcctatggcttccatttctaagctgttagtctaatttttgctcttttgaagattcattgcttgtcttagttttcagaagcttggaatttattttcttataatcttttatctcattttgagattgtaaacaaggtttttttttttcttttttgtggacaaatcttctggcatacttgtgtttatatrtgtgttattctgctccttatcttctttcctcatataacttcaaatgcttttttttttttttcctgagaccgcatctcaccctgttgcccaggctggagtgcagtgccatgatctcagctcagtgcaacctccgcctcctgagttcaagcaattcttctgcctcagccttccacatagctgggactacaggcaccacacccagctaacttttttatttttagtagagacagggtttcaccttgttggccaggctagtcttgaactcctgacctcaggtgatctgcccaactcagcctcccaaagtgccgggattacaggcatgagccacggtgcccggcctcaaatgcttttttattgctttttttttttttttttgagacatagtgttgcttgctccgttgcccaggctggagtgcaatgacgcgatctcggctcactgtaacctctgccttccgggttcaagcgattctcctgcctaagcctcccaaatagctgggattacagatgcgtgctaccacacccagctagtttttgtatttttagtagagacagcatttcaccatgttgatcaggctggtctcgaactcctgaccttgtgatccgcccgccctcaacctcccaaagtgtttggattacaggcatgagccaccgcgcctgaccttttttttgttttttcttttttttctttttgctgagacagagtctcgctctgttgcccaggctggagtgcagtggcgcgatcttggctcactgcaacctctgcctcctagattcaagcaattctactgcctctcctgcctctgcctcagcctcccaagtggctgggattacagacgtgcaccaccatgcccggctaattttattgcttatttttatgtgaaattagttttcctgaattttagtttttaaatttatatgtctttatatattttttagagacgaggtctcgctgtattgccctgcagtggtgtgatcatagctcactgcagccttgaactcatgggctcaattaatccttctgcctctgcctcccaagtagctgagactgtaggcacaagccaccacacctgccttattatactgaacttttagagtgagtcaaggttcggttaagttttactaatttcatagaactccttcttctgttgtttttgtttagggttcaaaaatatagtggcttttttaatggggtatcctggttttgttcccttaccacacttggtctggattttctttttccttgtctcttttgaccctctcctgctcaaatttttttctacccgtggctgtttctcctccatatgaagccctgtcctagaagggtaccctggcagatgagttttgagattccctaggggctggactgctctagctgtttcagttcttatgtgagccctsgtgctggagaggataaaactcatagtttcagctgctggtcttaaattgggcctctgtaccttccaacaacagctcattggctattttagggttctcctgttgttaggttcctcagatgctactcggggatccaaagattgaaaactgtgttgctacctccactattttcctaaaatccgttttatttatttatttattttttgagacgaagttttgctcttgttgcccaggctggagtgcggtggcacgatcttggctcactgcaaccgccaccttctgggctcaagcaattctcctgcctccgcctcctgagtagctgggattaaaggtgcacgccaccatgctctgctaattttttgtgtttttagtagagacggggtttcaccctgttggccagagtggtctcaaactcctgacctcaagtgatccacctgccttggcctcccaaaatgctgggattacaggcatatgccaccatgcccggccctaaaatctattttttactcaattttatttatctatatttgacccatatttgactgggaacctcttttcaaataatgccttccaagtccttgggaaatgctgattgtatgttagaagtacattgactctaagagaaagcctaacaatggctgaaacaaattgagatttgttttttctgttttttgtttttttttttwaaattaactttttttttacctttagagacagggtctcactatgttttccaggctggtcttgaactcctgcactcaagcgatcctccctgctctgcctcccaaagtgttaggattacaggcatgaggggatttacttctttttttttaacaagccacctggagattggcagttactggtattgcttcagctgttcagtgatgtcgttttagactcaggcttctagtacctttctagttcaacatccttagcacattggccctttgtcctcataggtaacacttcgtagttgcaagatgactattctagctttacacaggaaggtgggggtaagggtggcgtcagtttgatctctttatcaggaaagaaaacttccctggaagttccccactgcattctgcttctgcctcattggccagagctttgtcaccggccacctttagctacagaggaggtttggaaagaaatctttctggcctctgtagtggatacttacgagaaaaagggcttggcagtgggtgttgggttagccagtgactgctagctaacctgctacattgctttaaaacattcgcattatgctgtttttcatgtcttcgctcttcagtggtaggcgggtgtagaggaaagaatactggactagaattaaggagacctgagcttcggttctaacccaggccctagctaattgtttgatctgaggatagttacgcctgtaggcctcagttttgcaaattacaaaatgatagagtgagaatatttgttttctaagcagctaccagaattagaattctgatactgtgtttccattgacttagaaatttgtgaagggatagttattttctaatatctatatatcaatatcaaatatcaatctgttaaaatcaagtaggttctttgttacttgggggaacattgggcatcctgatctttgtttttaggctttttccatactgagttatttatttctcaattttaggagtgttaggcgggaataatatcataccacaaactacagaataatgcctttatgtgcttagataatgttttagctttgttttttgtttgtttgtttgtttttgagaccgagtttcactcttgttgcccaggctggagtgcagtgacgcgatcttggctcactgcaactttcgcttcccgggttcaagcaattctcctgcctcagcctgccaagtagctgggaccacaggcatgcgccaccatggccggctattttttgtatttttagtagagacggggtttcaccatgttggtctcgaactcctaacctcagatgatccacccacctcagcctcccaaagtgctgggattacaggcatgggccactgcacccagccttaacctttttttttttttttttaagtacaatttccattttatttttctctggagaataatttttcttcagtccttaaggacacagtttcttaacgggttttagtgggagtcatggggcaacgcctgcaggtcgaaatggaggtgtgggtattcagtcctagcaggcttcatgagattgatttctaactactttgctgtgaatggcacaactcacatattaaggtagcttcatatatggcttgggtagcacctaggcatcaaagatcctcacttcagaaatgtccctgactgctgcagcctctactgtgtttcaaatgatgaatttctcctgtttttgttaaagtcactacatttgctaaaatcaatgatgaattcctaaactttctttaacttgacctaccaggtagcattagagagtccatcatttccttcttctagaatacctttcttctcccaggttctagttaccatcctcttgtgttttttctcctacctgtttgactgccccttctaactctcctttgttgattcttcctcatctgaatatcccaacacctagtctttgcactgcttctctagctgcctcacaaccaaaatctcattaaatctcacagtgattctcagatgtgtatgcccagccaagacctctgccttgaaactctggacttttacgtacgtgacaactccactgggtgtcacaccatagtatgcccgaaactgaaatcgtcatcctccccctctcagtgagtggaaactccatccttccaagtgctcaggtcagaaatggtgaagtcatccttcacacctcttgttctttcacaccccaatttaaaatgccatatgccaaaatcatgttgcttcaaccttcaaaatgcattcagaatccagccacttttcagacctccagtagctaccacccagtccaagccatcagcatctctcccccgagtgactccaatggcccctcattggtctcctgcttcctgtcttgcccctagtcagtatcttctcaggaggtagtctgagtaaatcaagtcacatcattctgtcaaacttccagtggcttcctgctgaaagtaaaagcccagagtccttactrtggtctataagaccaaccaactttttgtgtcacctattgagtttgtttttcatttctgctgtcatatttttaatttccgagagcttgttcttgttctctgcatgttccctttttaatttccaaaagcttcttttgttctctgcatgtttcctttctttttaatagtatcctggaggctcaaaattttttgaggataatgtggtttaagatttttatctgcttacactgtgtttcttctaagatccttttttctttgtatttttggtcactctgtcatgttggagcctttcctcaaatgtcaagagattctttattgtctgtttatatttaagagcaggaccctaaaaagcttattttagaagccttttttttttgagacagggtctcactcttgcctaggctagagtgcaatggcataatctcagcccactgcaacctctgcctcctgggttcaagtgattctcctgcctcagcctccagagtagctgggattacaggcatgcaccaccacgcctggctactttttgaatttttagtagagatggggtttcaccacgttggtcaggctggtctcaaactcctgacttcaggtgatctgccttacctcggcctcccaaagtgctgggattacaggtgtgagccaccacacccagccagaagcttttatatgtaagcatgaagacttataacttgaaggcttcactgtaggcttttggggcagatttcaccagggaatctagctgtctgtgtctctgaaggcctttccccttaggttgatcagttttccccagacaaaagagataccctctaactccttctggcacggggtgggggggtgggattgagatgaaggtggtaattttttaattttttaatttgttatttatttatattttattttattttatttatttatttatttttattttattttatttttgagacagagtcttactctgtcacccaggctagagtgcagtggcgcaattgactcactgtaacctccacctcccaggttcaagcaattcttctgcctcagcctcctgagtagctgagatcacaggtgcccaccaccatgcctggctgatttttgtgttactagtaaagacggggtttcaccctcttggccaggctggtattgaactcctgaccttgtgatccacccaccttgacctcccaaagtgctgggattacaggcgtgagccaccgcgcccagcctacattttttttttttttttaaacagagttttactctgttacccaggctggagtgcaatggcatgatctcggctcactgcaaccgccacctctcaggttcatgcgagttgcctgcttcagcctcccaagtagctgagaccataggcatgcgccaccacgcctggctaatttttgtatttttagtagagatgggggtctygccatgttggccaggccggtctcggactgccctcaagtgatccacccaccttggcctcccaaagtgctgggattatagacatgacactgcatccagctgaaggtgttaattataagcttggctgcaagcagggaaagggatggtgggtgtcattgttcagtttgtagacttttggtctaggaccatctcccaagctttgcctagtattctggagtccagttctcctctggctcgcctctccggagatatacctgagtctttgcttgagtgaatatgagtgaataatgggatccaggggcctaaccacttctgacacataggcttgcaaacagtcctgtgttttcatctcagtccacagctcctcgcctcctgatgcgtctcatttccacccctttctggggcctgtgccaccagctgggtgcttcttgtctcccttctccccctacaagaagacacttagttctctcctttatctggtgattcatctgccactctcttgcctaaaattgactaaaatttgttgacggctcttgtctgtcaccctttctcctattctcttggtctttttaggcttacacctttttgaatacatttgctgttatttaatgcggcgtggggaatggaaggaggtaaatggttatgttcattttaccatgtgcaaacggttcctttttattacaattttttagaattgtaggccaggcgtggttgtttgcgcctgtaatcccagcactttgggaggccgtggaagtggatcacaaggtcaagagttcaagaccagcctggccaacatagtgaaaccccgtttgtactaaaaatacaaaaattagccaggtgtgcctgtaattccagttactcaggaggctgaggcaggagaattgcttgaactcaggaggcagaggttgcagtgagccgaggtggtgccactgcactccagcctaggtaacagaacaagactccatctcaaaaaaaaaaaaaaaaaaagaattgtgaataaatctgttcaacagtctttcaaatattatagaaatgtacagtttaggctgggcatagtggctcacgcctgtaatcccagcactttgggaggccgaggtgggcggatcacgaggtcaggagatcaagaccatcctggctaacatggtgaaaccccgtctctactaaaaatacaaaaattagctgggcatggtggtgggtacctgtagtcccagctactccggaggctgaggaaggagactggcgtgaacctgggaggcggagcttgcagtgagccgagatcacaccactgcactccagcctgggtgacagagtgagaccccgtctttaaaaaaaaaaaaaaaaaaagaaatgtacagtttaggagccagtctcctataatctctcccccaccccccgagagagaaccactggcattagtttgatattctggagtcttttcaggcttttaatgtgtatgatgtaatcatttatgtatgcatacacacatgcttgtttatatgtacacaaatgtgtgtgtgtgtgtatatttgatgtattccaacatatgggtgctataaatacataaaaataggccgggcatggtggcacatacctgtaatcccagcactttgggaggccacggcaggcggatcacctgaggtcaggagttcaagcccagcctggccaacatggtgaaaccccatctctactaaaaatacaaaaattagctgggcatggtggtgtatgtctgtaatcccagctacatgggaggcttaggaaggagaaccgcttgaacccgggaggcggaggttgcagtgaactgagatcgtgccattgcactctagactggacgacaagagggaaactctgtctcaaaaatatatatataaatactattatttatttatttatttattcattctttgagacagagtctcactatatcatccaggctggagtgcagtggcctgatctcagctcactccaacctccacctcctgggttcaagcaattcttgtgcctcagcctcccaagtagctgggactacaggcatgcaccacaacgcccagctaatttttgtatttttggtagagatggggtttcgccacgttggccaggctggtctcaaactcctgagctcaagggatctgcccaccttggcctcccaaagtgctgggattacacgtgtgagccactgtgcctgacttaattttttttttcttttttttttttttgagacggagtctcactctgtctcccaggctggagtgcagtggcgcatctcggctcactgcaagctccgcctcccaggttcacgccattctcctgcctcagcctcctgagtagttgggactacaggtgcccgccaccacacctggctaattttttgcatttttaatagagatggggtttcaccgtgttagccaggatggtctcgatctcctgacctcatgatccacccgccttggcctcccaaagtgctgggattacaggcgtgacctaatttttttaaaaagataccatattatacataccacgcagtgactttattttttcacctaatcactttctgaggcatctgtcccttcagtacccttagctctgcttcattcatagaaaatgagcacatggcattgattaattgtattaacctgtcctcttttgatgggtatttgtggtggttcactcttctcttattattattataagcaatagtgaggtgaattaccttatgtatgtctttgtaagctagtttttaaaaaccgtgagtggaattgagcatggtggctcatgcctataatcccagcactttgggaggctgaggccagtggaccacccgagctcaggagttcgagaccagcctggccatcrtggcaaaaccccatctttactaaaagtacaaaaattagctgggcatggtggcacacgcctgtaktcccagctactctggaggctgaggcaggagaatcctttgaacctaggaggcggagcttgcagtgagccaagatcgcgccactgcactccagcctgggcgacaaagcgagactccatctcaaaaaaaaaaaaaaaagaaraaaaactatgagtgggttaggaggagtgacatgttagtaacctgcagaaccatgaaaagaaatttaaagtgattgacaggccagtgtggtggctcatgcttgtaatcccagcactttgggaggccaaggtcagcagattgtctgagctcaggagtgcragaccagcatgggcaacatggcgaaaacccgtctctactgaaatacaaaaaattagctcgtttgggtggcgtgtgcctggagtcacagctactcaagagactgaggcacgagaataacttgaatgcatgaggtggagattacagtgagcagagatcatgccactgcactccagcttgggtgatatagcaagactgtctcaaaaaaatttttaaaaaatcagcaccatctgtcactgcttttctgtgttccttattacctttttcctgactaatttctcttactcatcttttgctgttgttatgactcccctcttcagatttcagctaaattaatatcctgtgttcctgttaagtactaggaatattattaggcatttacttattttataagtttaatttcctatgtttgtaaataagacattactactttttagtaataaaaatatttttcattctggtgaatgaaaaaaattaaaaataataattttcaattcacttcatggtgtttgaaaagtcagattttgggagaccaagggaggaggatcacctgagctcaggagttcaagactagctagggtaacatagtgaaaccgtgcctctacaaaaaataaaaaattagccaggcatagtagtggagcatgtctgtagtcacagctatttgggaggctgaggtggaaggatcacttgagcctgggatgttaaggctgcagtgagccatgactgtaccactgcattccagcctgggcaacagagcgagaccctgtctccaaaaaaaagtcagatttttattttactttaacatctttaatcggtaaaatcaatattaaaaaatttttaacctcatttctagtttaagtagctctgagattctgacctgaaaaagccaaatatatctattttccctctttttaagtttttttgattgtttaagagacaaggtcttgctctgttgcacagaccagagtgcagtgacacattcacggctcactacagccttgacctctggggctcaagcgatcctcccacgtaagcctctggaatagctgacaccacaggtgygtgcctccatacttggctaactaaaaaaatttagggggggctggatgtggtgattcaggcatataatcccagcattttgggaggccgaggcaggcagatcacctgaggtcaggagtttgagaccagcctgaccaacatggagaaaccccatctctactaaaattacaaaattagctgggcgtgatggcacatgcctgtaatcccgctactcaggaggctgagtcagggaaatcgcttgaagccgggaggcagaggttgcgatgaaccgagatcacaccattgctctccaacctgggcaacaagagcaaaactccgtctcaaaaaaaaaagaaaaaaaaaatttgtagagctgggtacagtggctcatgtctgtaatcccagcattttgggaggctcaggtgaggattacttgagcccaagggtttgagaacagcttgggtaatacagtaagacattgtcacacatttttttttcttattttttgggtagagatggagtttttaatttaatttaatttaatttaatttaatttaatttaattttattttattttgagacgaagtctcactttgttgcccatgttggagtgcagtggctcgatctcggctcaccacaacctctgccccctggttcaagcgattctcctgtctcagcctcccaagtagctgggactactggcgtgcaccaccatgcctggctaatttttgtatttttagtagagatcgggttttactatgctggccaggctggtctcgaactcctgaccttgtgatccacctgcctcggcctcccaaagtgctgggattgcaggtgtgagccaccgtgtccagcttttttttttttttttttttttttaatgtatttgagacaggctcttactctttcgcccaggctggagtacagtggtgcaatctcagttcactggaacctctccctcctgggctcaagcgatcctcccacctcagcctcccaggtagctgggactacaagagcatgcccccgctatgcctggctaattttttattttttgtagagattgggttccaccatgtcacccaacctggtcctgaactccagcagtccaactacctcagcctcccaaggtgctggcattacaggcataagccaccacatccagccctagatggagtcttgctatgttgcccaggttggtcttgaactcctggcctcatgcagtcctcctaccttgacctctgaaagtgttggtattacaggcatgagccaccatgcctggcctctatttttaatctatcttggtgtttactttttcttttttttctttgagagggagtcttgctctgtcatcaggctggagtgcagtggtgcagtctcagctcactgcaacctctgcctcccgggttcaagcaattctcctgcctcagcctcctgagtagctgggactacaggtgcgtgccaccatgcccaggtaatttttgcatttttagtagagatgcggtttcaccatgttggccaggatctcttgaccttgtgatccacccgccttggcctcccaaagtactgggattacaggtgtgaggcactgcgcccgaccgatgtttacttttttttttttttttttttagtagagacggggtttcaccatgttagccaggatggtctcgatctcctgaccttgtgatccacccgcctcagcctcccaaagtgctgggattacaggtgtgagccaccacgcccggctgtactttttcatgagacrgcaagaatatgtgatttgggaagagatgttagctccaacatcatcatatatatatatgattttttttttgccgtagattttactatgagcagcgattactacggaaggtcttcgaagaatggaaagaggagtggtgggttttccagcacgagtggaaactctgtgttcgagctgactgtcactacaggtcaggtttcatgttacactccttcagttttactgatgcacattatcagatgattatttgttggcgtgtttatggtcaaaagaagcaaactttgggtcacttttggtttttcttcaaatcctttttggagttagcaagatcagagttccaaattaaacccaagcatgcatgcacatgctgggcacgtgcacacagacacacacacacacctcccacacctctaattcaggtaaccattatgtattggttatgctaatactttgaatgggattttcccaccgattttcatttctatataatttctcattctgaaagtattctgggttttttgtttgtttgtttgttttgttttgttttgagacagagtctcactctgttgcccaagctggagtgcagtggcacgatcttggctcactgcaacttccgtctcctaggttcaagcgattctactgcctcagtctcccaagtaattgggattacaggcatgtgccatcacgcctggctaatttttgtagttttagtagagacagggttatttcatgttggctgggctggtcttgaactcctgacttcaggtgatccgcctgccttggcctcccgaagtgctgggattacaggcatgagtcaccgcgccaggcctgttttttttgtttttttttgtttttgagatggaatttcgctcttgttgcccaggctggagtgcaatggcgccatcttgactcactgcaacctccgccgcctgggttcaagtgattctcctgcctgagcctccctagtagctgggattacaggcatgtgccaccacgcctgtaatggcgtgtaatgatgaggtttctccatgttggtcagtctggtctcaatctcctgacctcaggtgatcctgccaccttggcctcccaaagtgctgggattacaggcatgaaccaccacacccggccttgttttaaaaataataaattgtggccgggcatggtggctcatgcctgtaatcccagcactttgggaggccgagatgggcggatcacgaggtcaggagatcgagaccatcctggctaacatggtgaaaccccgtctctactaaaaaatacaaaaaacaaaattggctaggcgtggtggcaggcgcctgtagttccagctactcgggaggctgaggcaggagaatggcgtgaacccaggaggtggagcttgcagtgagccaagactgcgccactgcactccagcctgggcaacagtggagcgagactccatctcagaaaataagtaaataaataaattgttttaatttacattgattatgggagaaaatatatggggaaggccgagtgtggtggctcactcctataatcccagtactttgggaggctgaggcgggtggatcacttgacgttaggagttccagaccagcctggccaacattggtgaaaccttgtctctattaaaaaacaaaacaaaacaaaacaaaaattccagcctgtacaacacagagaaaccccatctcaactaaaatacaaaaaaaaaaaaattagccgggcatggcggcatgcgcctgtagtaccagctactcggaaggttgagacaggaaaattaattgaacccaggaggcggagactgcagtgagtcgagatcgcaccactgtactccagcctgggcaacaaagcaagactccgtctccaaaaaaaaaaaaaaaattagctgggcatggtggcatgtgcctgtagtcccagccactcgggaggctgaggcagaagaattgcttgaacccaggagtcggaggttgcagtgggccaagatcatgccactgcactccagtctggacgacagagtgagactctgtctcaaaaaaaaaaaaattcttttttaaatgaatgttaataaaatatttaaaactaggaaaatatgaagagatgaaggtcttaagatgtatagtgtatgtatcaagaagaaggaaaaggtgtcaatgagcatattgtagtgcaaacgagaagtgatgttttttacagtgtggatagttaagataattaggatgtgactgtcggccaggcatggtagctcacacctgtaatcctagcactttgggaggccagggcaagaggatcacttgagcccaggagttcgagaccagcctagggaacatggcaaaatccccctctacaaaaaaatacaaaaattagccaggagtggtggtgcgttcctgtagtcccagctactctgaggccaaggtgggaggagtacctgagcccagggagggctcaaggctacagtgagccatgttcacattactgtactccagcctaggtgacagagtgagaccctgtgtaaaaaaaaaaaaaaaaaaaaaaaaaaagacaagattgtcattccaaacatcatggatttttttttttttaattgaatttgagacagagtctcggtgtcacccgggctggagtgcagtggaacaatcttggctcactgcaaccactgcctcccaggttcaagccattctcctgcctcagcctccctcctgcctcagcctcctgagtagctgagactacaggcacatgctactacgagtggctaatttttatatttttagtaaagacggggtttcaccatattgaccaggctggtctcgaactcccaacctcaggtggtctgcctgcctcagcctcccagagtgctgagattacaggcgtgagctactgtgcctggcccaaacatcatgaatttgtggatgatgaaagtgaacttattcttggagaagtcaagccttttcttcctcagtgacactttaaggtatagagaatgactcttcttcaaagagaatagagttcattgtgattgtaggaaatgaaattttagctttggtgcagatatggcttttttttttttttaatcagaagcgtccctgttcatttcttctgagtatagaacagacttggtgtgttgggttaggagttgttttgttgttgttgtttgtttgtttgtttgtttcttgagacagagtcttgctctgttgtccaggctggagtgcagtggcatgcgatctcggctcactgcaacctccacctcctgggttcaagtgattctcctgcctcagcctccggagtaggtgggattatagacgtgtgccaccacacccggcacacggtatttttagttgagatggggtttcaccatatcggccaggctggtcttgaactccttgccttggcctcccaaagtgctagggttacaggtgtgagccaccgcgcccggcctgttattttgaagaaatgccatttactttttttggctcctcaggtattacctgtacaacctgatgttccagacgtggaagacctatgtgcgtcagcagcaggaratgaggaacaagtacattagagccgaggttcatggtgagaaaaagaagtccatgtctgaagaagatgcccacatttactttgcagaaggtcataggaaggacaaacacattgtctcagagagagaggaactctaggccaaaggaagatttgtttgattctctttcatatttttcagaaagtgtgatctctgagtgggcacctgtatgattgatccctatggttttctccatatggcatggtttgagcccttaaaactcatttaatcagaatttgtgtgaactggctgttcctggcctgctggttcagtgggctggctgtgactctcctgtggcacctggggctgccatctatcttgctgcgtcaagttgcccagagactctggagcagagctgcagtgctcttttctgatctgctttgctcaagttgtcccttagtgatactgtggccactttaggtctggtcagagtctggtttctcttgtgaattgagcccagaaacacatggagagtctaagggaaaaagacctagagtttcaaaatgataatacaggctgcattagcagcagaatgtcctaaaggtagctcaaactctgcaagtcacaagtacaacctgtcaactcccctaccacttacacctgctgttcctttgactcttctgtctaggaagacttacttaggaatggtgtccattcctcatgcctcatgtcatcacttacctaatcttttaagaaggccctctgaggcatcacttgcaatcatcgttgcattgctactgcctgagagtaatcctcatctttttcccagagtgttgtaagtgccacttcattaatctccctcatttattttttcgtgcttctcattgtacacatagctgcaagagtggtaagacatagataagatcatgacactcctttacgtaaagttaaccctgcttggtatgtcgtacaaggtcttcatttcttctgctttgcaccctctgcccttgacacactggatgtgcacttctttatctttccatctttgtccctgtagttcttccttcaggcccatttaaatgtgtagctttccttgatctcccccagcccagtgatctttcccctgtctgtattcccaaagtatgagaagctcttacccaagcctcatgattactgcaccaaatgcactgtttcactggtaagtaacttacgctgtttgttgtttatttttttaatacatacagtaagattcattctttttgaagttcagttctaagactttgatacacactaccacatacagctaaatttttgtatttttggtagagatgggcttttgccatgttgcccaggctggtttcaaactcctggactaaagcaatccacctgcctcgctctcccaaagtgctggcaatacaggtgtgagccactgtgcctggccttaagtttaattctataagaaactggcaaggttttttatcatggctgtgccattttgcattcccaccagtaattcacgagagttctacttgctctgcatcctcttgacctctttgtattgtcattaaaattttttctttggccatactaataggtgtatacaggcatttaattgtgggtttttaaaaattggtgttacatgagtatactgcataatgatggagatttgactrtccactacccaaatagtgaacgttgtacatgataggtaatttttcaacccttgggcctcttccaccctcccttcccctcgtttggagtccccagtgtctattatctccacctttatgtctgtgtgtaccaacagtttagctcccgcttataagtgagaatatgtggtatttgattttctgtttctgagttagttcacttaggataatggcctccagctccatccatgttggtgcaaaggacatgatttcattcttttttatggctgggtggtattccatggtgtgtattttctttcttttttttttatttgagactgtctcactctgtcacccaggctggagtgcagtggtgtgatctcggctcactgcagcctccacctcctgggttcaagtgttgcttctgcctcagcctctcaagtacctgggactacaggcgtgtgccaccatgcccaactaatttttgtatttttagtagagacaaggtttcactatattggccaggctggtctcaaactcctgacctcagtgatctgcctgcctcggcctcccaaagtactgagattgcaggcatgagccaccacgcccggctgtggtgtatattttctgtatctgttgatggatgctgaggttgattccatgactttgctgttgagaatagtgctgcagtgaacatatgagagcaggtgtctttttaatataataatttctcttcgtttgggtagattcccgctagtgggattgctgggtcgaatggtggttctgtttttagttctttgagaaatctccatactgttttccatagaggttcaactaatttatattcccaccaccagtgtgttaagtgttccctttctccacgtgcatgccaacatctgttattaaactttttttttttaaagacaggggatgtcttgctgtgtcacccaggctggagtgcagtggcttggtcatagctcactgcagccttgacttcctgggccaagtaatcctcccacctcagactcctgagtagctgggaccgtaggcatgtgctaccacacctggctaactttttatatgttatggagacagggtctggctatgttgcccaagctggtcttggacccctgggctccagtgattctccttcctcagcctccaaaagtgctaggattacaagcataagccactgcacccagcctaactttttaataacagtcgttctgactagtgtaagatgatatctcattgtggttttagtttgcatttctctgataattagtgatgttgagtatcttttcctgtgcttatttgctatttatatctgtttggtgaagtatctgttcatgatcttttgtccttttaaattgggttgtttgtgttctttttgagatttgaaagttttttgtttgtttggttggtttggttttttttgacacggaatctcactcttgcccaggctggagtgcagtggcgcaatctcggctcactgcaacctcgacctcccgggtttaagtgattctcccaccttagcctcccgagtagctgggactacatggtgcgctaccatgcccagctaatttttgtattttttttttttttttttttttcagtagagacagggtttcaccatgttagccagggtgatctggaactcctgacctcaggggatccacctgcctcggcctcccaaagtgctgggaccacaggggtgagccaccaagcccagctggttttttaaaatatgtattctgttataagcattttgtcaaagcatgatttgctatgttttctcctagtctgtgacttgtcttttcattctcttaacagtatcttttgcagaggaaaagtttttaattttgatgaagtccawtctatttttttttaatggattatgtttttttttttttttttttttttttttttttgcgagagtcccactgttgcccaggttggagtgcagtggtgtgaggataacccattgcagcctggaactcctaggctctgacctcagcctcccaagtagctgggactacagacaatgccccaccatacctggctaagttttttatattttacagagatgggggtcttgctttgttgcccaggctggtctgaaactcctggcctcaagcagttctcccacttcggcttcccaaagccctgggattacagtcatgagccactgtgcccagctggattatattttttcatatcctatcttagatgtcatctctaagaactttgccttaacccagggtcacaaagatttcctcttatgttttctcctaaacattctgtagttttacatatggatcttgtatatcctgcatccttgctaagttaatttattatttctttttcttttttcttttttttaaattttgagatggagtctcgctctattgcccaggctggagtgcagtggcacgatctcggctcaccgcaagctccacctcccggattcacgccattctcctacctcagcctcccaattagctgggactacaggtgcccaccaccccgcccggctaattttttgtatttttaatagagacgggatttcacagtgttagccaggatggtcttgatctcctgacctcgtgatccgcccacctcggcctcccaaagtgctgggattacaggcttgagccactgcgcccagccttttttttttttttcagatggagyctcactttgtcacccaggatggagtgcagagtggcgtgatctcggctcactgcagcctctgcctcctgggttcaagcaattatcttgcctcagactactgagtagctgggagtaaaggtacctgccaccacgcccggctaattttttttttgtatttttagtagagacatttactgctataaagttctcttaaacactaactatattacacgaattttaataagttatatttctgttttcattcagtaaaaacttgttttctgattttccctgagacctcatctttgccccacagattatttagaagtgtgtttagttttctaatatttgggagtttcccaatatctttctgttaaggatttctagtttattctattattgtcagagaacaagacttagtatgatttcagttcctttatttttgttaaggtttgttctgtggccccaaatatgctctatcttgtaaatgttctatatttacttgaagaatgtacattctgctgtcttatttatagttacagtgaatctagctagatattatggaatagaaggaaaaagtcacttggatgacttttttataggcggtggctcacgcctataatcccagcactttgggaggctgaggtgggaagattgcttgggcccaggagttcgagaccagcccaagcaacatggcaaaacctcatctctacaaaaaaatacaaaaattagccaggtgtggtggtgcatgcctgcagtcccagctactcaagaggcaagagttatttctgacataagacaagttatttcaggccattcccctagacctcagggagtgtccattcactcttggactgttaaatgaaaagtttgcaagtacttttaggccttaaggaagcatggttctcagttgtcacgtgcatcagaatcatggcagagacagttaatgagattcctgtgttccatactctggaaagagcagttagtgtttattttagatatttttcatagttaaatcatctcatttacactttccaaacataactctgagagaggcaccattttacagatgaggaacttgtatgagattaggtgtgtaataaatgaaagggccagtaagtctggcttgtcttactcaggatcccaaactctaaaccacagcactatactagtcctgattacctgaagtatgctgattcctgaggtccacagtgaaaccaaggaagatacatgttaaattctccttcgtatgttgatttgtcttgtcaacaactgtgaaatatatagttatagtcctgtcgactacatcttggaggctgtcctaaaaatgatttatataattttattttctcctttgtcttctaaaaagaagagaaatttgcttataagtggtaatttacttattagtggtgactttcataatgaaaatacaatttaccacaaagggagacctgtgggccattgcatcttccatatctagtaaattatcttttctttactaaaaagagtgagcttggagtcaaacagcaagttttatatcatgatttcttcttctttagctttgtattatggaaaactttaaatatctatacaattgaaatttttttttcttttcttttttttttttttgagacggagtcttgctctgtcgcccaggctagagtgcaatggcgtgatctcagctcactgcaacctctccctcccaggtttagcaattctcctgcctcagcctcctgagtagctgggactacaggcgcacgccaccacacctggctaatttttgtacttttagtagagatggggtttcaccacgttggtcaggttggtctcgaactcctgacctcaggtgatctgcccatctcggccttccaaagtgctgggattacaggcgtgagccactgtgcccagactgaaagatatttaatagaataatgaacctccatgtatccattacccagctttgattatcactcatgccatttttgttagatccatctctccacttctttgctgcctgtttattcatatcatttcgtctaaaaattgcagagtatatctatagaaataagcgcttttaaagcaaagggtttttgagcagttcagtacatgggttttcctttaaatgctttgtaaatgtcgttacttgcacagagccttcatgtgttcttgcactctaattaattttctagtgcttcacaacttttccagcaggggtcacttgtaggctggagggatttaggtattcaaaggagagcccttgagcttttatcataacccagagtaatccatctctccccatgccttttgaaaaatctctttggtgaatctagatgcaaagcaaaagatgcgacaggcctggaagtcctggttgatctacgtggttgttcgtaggaccaaacttcagatgcagactacagctctggagtttaggcaacggattatcttacggtgagtctgctcaactgccctacaaagtaccagccatcattttacctcatcagctttatggtgctggaaaacagcataaaacctcaccttaaaacaatggtttgtatttggttttatttttgtgttttgtttttttcgagatagggtcttactctgtcacccaggttggagtgtagtggcccaatctcagcttactgcaacttccacctcccaggttcaagcagtccttccacctcagcctcccaagtagctaggactacaggcatgcgccactatgcccagctaatgtttttttttttttcatttttttgtagaggcgaggttttatcatgtttcccaggctggtcttgagttcgtgggctcaagcgatctgcccacctcagcctcccaaagtgctgggattataggcatgagccaccatgcccccttcccaccttgaaacaatattttgaacatagttgatgcctaataaagatttactgataacttgtttataagatcgattttcacataatcataattaacatgaattgagtgcttactgtgttctaaaccctgtgttaagtttgtgtgtgcatgtgttaattttgtaatgtaaagtatcttatttaacccttaccgtaaactgtaagtaccattattgtacagattaagatgtacaataaggctcagagaggttgagtaacttgcctagcacatacaggttgtaattggcaaaactagggctcacccacccatgctcttaactggtcttctgcattgcagcccatcagcattgtagacatactggaagaacatgaattagtccacttttatagccagatatgtaacaatgagctgcattatcatgggacagatttcactctatgttgtctgtagttgtccactggtgtcctgaatggtaatatattaataaytcacttcctgcctgaaagttgggtattgaacaaagtatggataataggagaggctttgcagctgcacttacttgggtttgaatccctcttccaacctgtattattgggtcatttcatctcttcagctcttattttcctcatctgtgaaatagttacaccatacttaaaggtttgtcatcaggaataaataaagtaatatctgtaaagtatttaacagtgtccagaaaatcagtggacataaagaagttatttaagtagaaataaaataggcagagtgcagtagttcaaacctgtaatcccaacactttgggaggctaagatgggaggcttgcttgaggccgggagtttgagaccagcctgggcaacaaagccaagaccctatctctacacacaaaaaatttttttaaataattaaaatcattacttaaaatgtatttagcaagtatttcaaaatgcctaattagtatgcagttttacttgagtctgagtgaattttttttttttttttatgagatggagtctcacactgttccccaggctggagtgcagtggtgtgatcttggctcactgcaaccttctgggttcaagccttccaggttcaagcgattcttctgccttggcctctcgagtagctgggattacaggcgcctgccaccatgcccagctaattttttgtatttttactagaggcagggtttcaccatgttggccagccttgtctcgaactcctgacctcatgattcaccggcctcagcctctccaagtgctgggattccaggcatgagccaccgcgcctggcctgagtgatatttttatataattaattcatttactcaacgtacatttatttatttatttgagacagagtctcactgtttcgtccaggctggagtgccatggcacaatcttggctgactgcaagctctgcttcctgggttcaagtgattctcctgcctcagcctcccaagtaactgggattacaccatacctagctaattttttgtatttttagtagagatggggtttcaccacattggccaggctggtcttgaactcctgacctcagatgatccacccgcctcggcttcccaaagtgctgagattataggcatgagccaccgggcccagcctatttattgagggtttaaaatgttcttggtactgggccaggcacagggactcatgcctgtaatcccagcactttgggaggctgaggctggtgaattacctgaggccaggagtttaagaccagcctggccaacatagtgaaactgtctctactaaaaaaatacaaaagttagcctggtttgatggtgcacgcctataatcccagctactcgggaggctgaggcatgagaaccgcttgaacaaacaaggcagacgttgcagtgagtcgagattgtgccactccactgcaccctgggcaacagagtgagactctgtctcgaaaaaatwaaaaaaatggcttccgcgggaggcctacacaccgccagttgtgttcctgctatgtctctagtgatccctgaaaagttccagcgtattttgcgaatactcaacagcaacatcaacgggcagcagaaaataggctttgccatcactgccattaaggatgtgggttgacagtacactcatagtgttgaggaaagctgacgttgacctcaccaagtgggcaggagaactcactgaggatgagatggaacgtgtgatgaccattatgcagaatccatgccagtacaagatcccagactggttcttgaacagacggaaggatgtaaaggatggaaaatatagccaggtcctagccagtggtctggacaagaagctccgtgcagatgtggagcgactgaagaagattcaggcccatagaggaccgcaccacttctggggccttcgtgtccgaggccagcacaccaagaccactggccaccatggctgtaccatgggcgggtccaagaagaaataagtctgcaggccttgtctgttaataagtagtttatatacctaaaaaatataaataaagtaataaataagtaaaatgttattggtactgtattgatgctggggctgtattcagggaatttgtgattccctggatgcataagaagataagtgataatgtgagatagcttgaggttttgcagtgagtgctgcaagtgagcctggtctaagagaaatctttgtaggttagagtgaccaggaaaagtgagtgtttctgtaaagcacaggttgtaaactcttatttccccatgactcttttcctagagcaaattcgaaaattagtaggaaaaaaaaaacaagactgaaacaaaagtctgaccaggattctaggaaagaaaaggatacatacaagactagaaatctaaaagccacttgattgcagattattttgtgaaatctcctgattttcaaatgttggtaatactctttttttttttttttttttgaggtggagtctcactctgtcacccaggctggagtatagtggcacgatcttggctcacagccacctctgcctcctgggttcaagagattctcctgcctcagcctcccaagtagcagggattacaggcacacaccaccatgtccagctaattttttgtatttttagtagagacggggtttcaccatgatggccaagctggttttgaactcctgacctcaagtaatccacctgcctcagcctcccaaagtgctaggattacaggcgtgagccaccacgcctggccttttttttttttttcccgagatggagtctcactctgtcacccaggctagagtgcagtggcgtgatctcagctcactgcaacctctgcttcctgggttcaagctattctcctgcctcagcctcccgagtagctgggattacaggagcatgccactaccacctggctatttttgtatttttaatagagacagggtttcactgtgttggccaggctagtcttttaactcctgacctcaggtaatccactctcctcggcctcccaaagtgctgtgattacaggtgtaagccaccgtaccaggccataacatatcttttaacaaatcaaactgtgtaggtcaaacagagcatgtctgtggtgtctaaagcaggatctgaccrtaggaaccatargtttccaaccattaatgggcagatctgggactttttctcaattgttttgttttatttttttccccagcagtgaatctagagatggtactrtgaaggagaggactagagctgagggtctgaggccccacactaactgctcctctctttcctgagtggctttttactgatggattccatctttgatttgctgtttcacagggtgtggtggagcacgtggaggcagcgactaggacaggtccgtgtgagccgtgccctccatgcctctgctttgaagcacagggccctgagcctccaggtgcaggtgagtccagcagacgtgggatttggcatcctctgtcagtgttgtcaagcctctcacccacagagggcagtgctgggccttccctgcagctcagggcctgagagggggtggggacagaggtaatctggaaggctgggctcttccagagggaggctgctgttaggaataaagtagaggcttgtcctagatgagcctagatcagtggcttccagagtgcttctggtaattgtggagctggagagggatttatgaattagttataaacatgtttagagaaacagcagtatactctgatttcctcgttgctgttttcctacagcaaatcagaaaataattggggcagaaaagaaacttaagactgaaaagaaaacctrtcttccttttctttatagttttgattgtcttagagtgttcttttaggcaagccactagctttttttgtcaatcataaatggctaaggcctgtactaaaactttcttatcctttgacatattctctgaattcttgtcatgtttttgtgtctgctgggtacttacagagctgccaaataagttataggaaatagaacagagaagaggaaaaaaaaaattagtgcctgtttccaaatgtaggaatagtatcttcttattctaacaacaaattgcatagtccatgtgaatacgtgcagatcacatgcaaatagcatatatagtcatctagatcagtgatcagcaaactggctcacaggccaaatttggcctgctttctgtttttgtaaataaagttttattgggatgctgctacactcattcatttatatatcatctgaggctgctttcagattacaagagcagtgtagggtagttgtaacagagaccttatggtctacaaagactaaactatttgttttctgaccctttaagaaaaagtttgctgacctctgaacttgtaaggtcttctgaggcaatagcaaggaaataagagacacagttctcgccaataataataacagtaccaatagcagtagcaactgcagcctgagtgactgagttggggccctgtctcaaaaaaaaaaaaaaaaaagaagtagattttattgtggtcttacttgtgttaggtgctagactaagtgctttacgtgcattatctaattttcataaaccttttttaaaagtcccatattattgttaagggaaccaggaaggttaaataacttgaactagggtcacatgtatagtgaagcttagagccaggtttttttatttttttttgattttttgagacagagtctcgctctgtcacccaggctggagtggagtggcacagtcttggctcactgcaagctctgcctcctgggttcacgccatcatcctgcctcagcctcctgagtagctgggactgcaggtgcccgccaccacgcccggctaattttttgtatctttagtagagacggggtttcaccatgttagccaggatggtcttgatctcctgaccttgtgatggcctgcatcggcctcccaaagtactggtattacaggcgtgagccaccacatccggccgcttggagccaggttttaacctaagcagccagaaagctgcatcatcatcttttatatatatatatatatatgttttgagacagagtattgctcgctctgtcacccagactggagtgcagtggcgcgatcttgcctcactgcaacctctgcctcccaggttcaagcaattctcctgcctcagcctcccaagtagctgggactcagacgcatgccgccacgcctggctaattttttgtattttagtagtgatggggtttcaccgtgttgcccagggtggttgctaactcctgagctcaggcaatctgcctgcctcagcctcccaaagtgctgggattacaggcgtgaaccaccgcgcctggcctgcatcattatcataatcaccatgcagtattgtgctgaatagacttgtaacctcaggagggagatggaactgataaatgggaaaatgctataaatgcagggatactgactaaacttatagactgactgtgaatatagggaaactaaacataatgagactgattttctgtcatcggtggacaactgtgctagttttcttccctttctaagagccactttgagaggccataaactcattctactgatgctactgttgctcagaacatgtttagaattccccttttcttgtttgttgttgtttgtttttttgttttgagacagtctcactcttttgcccaggctggagtgcagtggcacgatcttggctcactgcaacccctgcctcccgggttcaagcgattctcctgcctcagcctcccaagtagctgggattacaggcacgcgccaccatgcctgtctaattttgtatttttgatagagacggggttttgccatgttggccaggctggtctcgaactcctgaccgcaagtgatccacctgcccctcggcctcccaaagtgctgggattacaggggtgagccaccacacccagcctacacgtcttaatctacacagcatctctatgcactaggcaggtaagacatcatgaaatatgtaaaattttaattttaatttaaaatttaaaattaaatttggtatttcaaacatagaaacacataaaatataaaacacttagaaaaatattagcagataggccaggcgcggtggctcacacctgtaatcccagcactttgggaggctgaggtgggcggatcatgaggtcaggagatggagaccatcctggctaacacggtgaaaccccgtctctactaaaaatacaaaaaattagccgggcgtggtggtgggtgcctgtagtcccagctactcaggaggctgaggcaggagaatgacatgaacctgggaggcagagcttgcagtgagctgagatcacgccactgcactccagcctgggcgacagagcaagactccatctcaaaaaaaaaaaaaaaaaattagcagctagccaagtactcaccagcctcacccagatttaaaaggtgttagcattttctatacttgcaaaaaaaaaaaaattagcagatagccaagtactcaacaccctcacccagatttaaaaggtgttagcattttctatacttgctccagaattttttttaagttattttttgggggacaggatcttactctgctgcccagtctggagtgcagtggtaccatcatggctcactgtagtcttgacctcccaggcttaagtgatcctcccacctcagcctcccaagtagctgagaacacaggcatgtgctaccatgcctggctaatattttttttttttcccttgtggagtcgaggtctcaccatgttgcccaggctggtctgaaactcctgagctcaagtgatccacccgcctcggcctcccaaagtgctgggattacaggcatgagccaccatgcctggcccagaatttttttttttttttttgagacggagtcttgctctgtcgcccaggctggagtgcagtatcgcgatgttggctcactgcaagctccgcctcccgggttcacgtcattctcctgcctcagcctcccaagtagctgggactacaggcgcccgccacaacgcctggctaatttttttttttttttgtattttttagtggagatggggtttcaccatgttagccaggatggtctcgatctcctgacctcgtgatccgcctgccttggcttcccaaagtgctgggattacaggcgtgagccaccgtgcccggcccagaattttttaaagtaacaaaatttaatggacactgccaaagctttaccctccctccgtcccttctactgcctctcctccttagagatagccactcttttgattctggtatgattgttctcctatattcttttttcttataaaaatatgtgcacatatctgtaaagaataaacatgtggtacactcctgtagtcccatctactcgggaggctgtggcaggatgatcacttgaggtcaagtgtttgaggctagcctgggcaatataatgagaccccatcacttaaaaaggcgggaggggtcacggtggcctacacctgaatactaggactttgggaggccaaaataagaggatcacttgagtttaggagttcaagaccagactaggcaacatagtgagaccccatctctacaaaaaaaaaaaaaaaattagctagacgtggtggcgcatgcctgttgtcccagctacttgggaggcttaggttggaggatcacttgaacctgggaggtcaaggctgcagtgagccattgatcatgccactgcactccagcttgggcaacagagcaagaccctgtctcaaaaataaataaataaataagtaaatggtatggctttgtgtagttaggacatttatgaatgttgtcatactgtgctttgcaacttgtttttttagtgcaacggtatatttttgaggtttagccatgtgatttctttcttccttttttaaaatagagacagggtctttctctgttgcccaggctgttcttgaactcacggcctcaagcagttcttacaccttggcttcttaaagtgctgggattacaggcctgagccaccatgcctggccctatctatgtggatagacagagatctattaactgtgtatattatgccattgtataaacaaggcaccatttatctgcttacttactgatggactgttgacttcctctgctttttagaattacgaacagtactaccaagagcattctttttctattttttttttttttttgagactccgtgcagtggcacaatctcagctcactgcaatctccgcctcccaggttcaagcaattcttctgcctcagcttcccatgtagctgggactacaggtgtgctccaccacatccagctaattattgtatttttagtagagatggggtttcaccatgttggccaggctgtcttgaactccttacctcaagtgatccgcctgcctctgcctcccaaagtgttgggattacaggcgtgagccaccatgcccggcccccagtttcttttaattattcacggatctgtttctcggctctgtcttccattcatgtatttgtctatccagaccataccaatgccatactggtttagttacgatttgatgaagcagtaagcaacagtgtaggttcttgagtcagactgtccaagtggaattctgcctctatcacctattagctttgtgcctttgaatgagttatttcatctgtttgtacctcagaattcttatctgtaagtagattgtaatagtacctacctcatgagattattgaggcttcaggaggatgatccagttattaatatactcagagcaatgcctggaatgtggaaatgctcagtaaatgctagctgtttatattcctacttgacatatagttctcaaggctctatatttgacagagaatctcctttattcttgttttgtttttaaacttgtcttaattgttcttctgtactctttcttattaattttaggagcaacttgtcaagttctataacaaagcctattaggaattttttttttcttttgagacatgtctcactctgtcacccaggctggagtgcagtggtgcgatctcggctcactgcaagctccacctcctgggttcacgccattcttctgcctcagcctcccgagtagctgggactataggcacctgccaccacgcctggctaattttttgtatttttagtagagacggggtttcaccgtgttagccaggatggtctcgatctcctgacctcatgatccgcccacctcggcctcccaaagtgttgggattacaggcgtgagccaccgcacctggccaagcctattaggatttttattacaatgtactgactgacagcttattaggttagaaaaattgtcatattgagtcatttcatctttgaatttgatatatctcataatatattgctgagcttgagaaggagagtaggaaggatgaggttatgaggtaacagggagccagaacgcagggccwggcaggctgtgcctgataaaaaaggctttgacttttattcctgggaaggtgaagagctgctggctctgagcagaggagtgacatgattatacctacctcttaacaggattctttgattcatagtgtgctgcttttggggtaagaaagggaaggatatatatgaatgtgtgtctgtgtgtttgtggaggkggggggtgtgtgtgtctgtttgcttatattttcaagaaggaataatggaaaaataaatgaaaaacttaccaaaaaatggttacctataggaggagggagagaagggtataggaataaagtacttctgtgaatttactttgttacatagttttaactttggaactatgcatatattttatataattacaaagcaagagtaaataaaaaaacaattgccagattttcaaaacaaactgaaacgaacatatcaagtttgtggcaatgactacacagagaataattacttcaagtaactttaaaatacaatattttgactgttcaccctggtggaatgtgttaaaaggacgtaatgaactgctaagaaatctaaaaccacattcttagtaaaacaagtgttattgttgctaggaggtttgaaattgttacattgaaagtattatagttacattgtaagataaagcaaataattatggcagtgttgttaggaataaagatcttcaatagaaaagaaaagattacaagtataaaaagcaaagaaatctgcaattggaactgtaaatatcaatatggactctctctctctctatatatatatgtgtgtgtgtgtgtgtgtgtgtgtgtgtgtgtgtgtgtgtatatatatatatatatttttttttttttaccataaatgcatttctggtctggcgcgatggctcccagcactttgggaggcagaggcaggtggatcacccgaggtcaggagttcgagactagcctggccaacatggtgaaatcccgtctctactaaacatacaaaaaaattagccgggcatggtggtggtgggcacctgtaatcccagctacctgggaggctgagcacgagaatcacttgaatccaggaagcagaggttgcagtgagctgagattgtgccaactgcacttcagcctgggcgacagggtgagaccctgtctcaaaaaaaaaaaaaaaaaaaaaaaaagcattagaagcagtgacagtaatatagcatttagtatccccagtgcccaagttgtggtcttaactatttcccactaataggaaccagggctttttagagaaatggctgattataggtccggggcaggaaatagacaagatacacctaggactaaggaacttaacaaaagctaatggaattgtgtcagaaggactcaggaaccaatttggaagggttcccagggcttaagatagaaaagtttgagcatcaaaaaacaataagctaggcatagtggtgcctgtagtcccagctactcaggaagctgaggcaggaggatcacttgagcccagtagattgaaaacatcaaatacataaaaattcatgcatttgaaataattttcaaagaaagtggaactcatcggtcatgattttgggttgttaggggagttaactaaattctttaaaaattaaagcattttaattctttaaaaattaaaggcaaaaaattaagcatttatcccacctttcctatataaactgttaactccaagaaaccagagggttaatgagagagaagccttctttatagaagaattccagttaataaatgctgaaggaatactagaactagaaaattgctgttttgccacccctaatgaggacatagatctaggaagccatcactaggtgagaggatggtgggaaaatataggagaaatctggctacctgccatctgaatccaccaaacaatcttggcattgctacaactgtggcagccagacatgatgtgcctcatgatactatgtaaggggaagtacccagccacattcatgaactgttcttgcctaaaaaattgaacatgactccaagcctaatgcaaatctctcagtttataggaaatacaggggtcagaggaacaagttaaagacacctcgaggttacagtcagccaaatccaaaatgtaggacattttataggatagatgacttgatttctctagtagattgatggcatgaaagagaaaaaaagcaggaagggaagttgtcatataaaacagaactttaagtgacctaacaattaaagcgaaccaaaatggaccactctggctgttgtgttaggagtacatcagagccaggcgtggtggcagatgtctgtaatcccagcactttgggaagccaaggcggggggacagcttgagccctagcatctgagaccagcctgagcaacatggtgaaaccctgtctctacaaaaaatacaaaaaattatcctgttatggtggcatgtgtctgtagtcccagctactcaggaggctaagtgggaggatcacctgagtccgggaaattgaggctgtagtgagctatgattgtaccactgccctctagcctgggcaatggagcaagaacctatctcaaaaaaaaaaaaaaaaaaaattagctgggcatggtggtgcatgcctgtggtcccagctgctcaggaggctgaggcaggaagattgcttaagcccaggaggttgaggctgcagtgagccgtattcttgccattgcacttcagtctggcagtctgagtaacagaatgagactctgtcaataaataaataaataaataaataaataaataaatcagagatgatcaaggatataaacagggaggacaggtaagaagctattacaaaattccaggtgagattttccacaaagatgataagaagacggtggttggattctcaatgtctttaaaagatgtaactgacatctytaaaagatgtatggatgagatacgaagttttagcgtccmagatgacttccaagttttggcctaagcagttggaacaatggagtgccatttactgaaataggaaagactgcaggagaagcaggtttgtgggaagagattaggaggagcccaattctggactctatcttcagcctgataggccttttgaatagccacaagaagctatgttaaggaggcagtgggatattgggatatatgtgtggaatactgaggatggggccaggatgggaggtacatttgggaaattcaggagttcttagtaggcagatggtatgtaaagttactagagtgagcggggtgcggtggctcatgcctgtaaatcccaacactttgggaggctgaggcgggaggattgcttgagcccaagagttcaagaccagcctgggcaacatagagagaccccatctgtttttttaaaaaaagctactagggtgggtgaaaaaataaaaggagtgagtgtagctagatgagaggttccagggctgagcctgcgaggtgcacagaggtgggagtcagcaacaggaacaaagcagggacacatcccgaaagccaggtgaaggaaggaggaaggctttgtcagacacttctggcaggtcaagggaggtgaggaccaaaatctgacctttggattgagcgatgtggagattgccgatgcacttgataagagtagtttcattcagtaagcctgtgggagcgggctcaagaaagcctgcctgggagacagaaagattagaaaatagctcttttgaggagcttgaaacagaaagaaccaaagtgttagctggatggcacaatgcggtctagagtctagagaggggtgttgctttgtttgtttaagaatcactggtttattcctttcagaaagtatttttgtgatggcagtctttccccaacaactttttattactgacaaacaccaaatcatagaaaaggtggatactgtctgtgtttcacctagtttaaccgattgtggttttttggtttggtttggtttggtttttttgagacagggtctcactctgttgcccagactagagtgcagtggtatgatcactgctcactgcagcctcaacctaccaggctcaagcgatcctcccacctcagcctcccaagtagctgggactacaggtacacaccaccatgcctggctaatttttttttttttttggtagagacagagtttcgccatgtttcccaggctgggctcaaactcctgagctcaagcaatcctcctgccttgggctcccaaagtgctgagattacaggtgtgagccaccccgccccaccaacccattgttaacatcttgccacatttgctttctttaagtatataaatacatttattttgtctgagctgctctaaaattgtagacacaaagtttatcttaaagtgtatatctcctaaaaaggatggtctcccacataaccataatatcattattatattccaagaaatttaatrttgatataatatataacatgcagttcatattaaaactgtatattgttgctattttcatttccatagtctaattaaaggtcacccattgcttttagttgttacatcttgaagatttttttttttaggataggaaaaataatagcacattgatatgctgatttcaaaaatctatagagagtgaaaactgatgattcgtaagaggggaactgccaaggcagtaaactcgggaaggtgagagatagccagagctggacagggttgggaggggactgacgttggtgggagcatgggcggttcatccagagtagcaggaaagagagaagacagagcccgtgggcaggtgggtagttaaacatggtggaccttaaggaaatttccttttgattgcttttattttcttagtgaaatgggaacgatggtattcagttgagaggagggaaaggagaggtgcgacaggctgaagaaaagatatgaagtctttgtctaagtcgtcttcagattaggacatgcattatcactgatctaagggtgtgcatttatagacccttgtagacccttagcttctatatataggcatccctggaactaatctgcctgaaaaaggactactttacagtaggcttcctctgactttggaagaaaaggcagaccctcacttatcccaaatctgaattaattatatcacccctcggattgtttctgctccttgtctgcttgtttttgtttttgttttgagttggtcgctcttgtcgcccaggctggagtgcagtggtgtgatctcagctcactgcaacctccacgtcctgggttcaagtgattctcctgcctcagcctcctgagtagctgggattataggcacccaccatcacgcccagctaattttttgtatttttagtagagacggggttttgccatgttgggcaggctggtctcaaactcctaacctcaggtgatctgccctcctcggcctcccaaagtgctgggattacaggcgagagccactgcaccagccatctgctttctgcttgttgattttattcttcttttttttaatccaggaaaaaattacttttgaaagcagaatgtccctcttaaagacccttttaccccacggtcccatagcttatcatcctgctaggggattgccacttccttgtttctaatttcagcctttccagcgtgtgtgcctttctcttttccctctccacctgtacttcaccctgttttcctgcctctcctttgactgttgcctcttctctggttttcaggcttggtcacagtggcgggaacagctcctgtatgtccagaaggagaaacaaaaggttgtctctgcagtgaaacatcatcagcactggcaaaaacggagatttctaaaggcctggcttgaatacctgcaagtccgcagagtgaagagacagcagaatggtgagtaggaagctccaggctctcgagatagaggatctggtcacagtttcactctcctgctgccagtggtactgtactaagaagtaatataatggtgctactccagaaattttggtaaaaggagattaaggaggaaaatacatcatccttgagtcacatttatttctctttgggcttttatttatatatctgtatctatatctatctagctatctgtagatagattttttttttttttttgagatggagtttcgctcttgtcacccaggctggagtgcagtggcgcaatctcggctcactgcaacctccgtctcctgggttcaggtgattcttctgcctcagcctccctagtagttgggatcacaggtgcccaccacctcgcccggctaatttttgtatttttagtaaagatggggtttcataactttggccaggctagtctcaaactcctgacctcaggtgatccgcctgcctcagcctcccaaagtgctgggattgcaggcgtgagccactgtttccggcctcttctgtatattttttatctaaatagggttttcattttgctataagtattgtaattattttgattaatatgttgataacctatggttttgtatcttccttttttccacacagttaatcaacacttccctacatcttaagtatttgtcgtaaatgttattttttaacaactattcatattttataggatggcttaccttaatatacttagccattctcctattaatagatatttggatagtttctgtttgtctccagttatgcaaatgcatgtgattttgatgttgagttttttggatactgtttatatggttttgtttcccaattagatkcagaagtaataatacatagaaatgtgaacattagtacactttttaacttaagtttattgagtttataccaaagtaagtcaagcactgtgctagacactgggttaagggtctctggcgttcacccaaacctccctgcagaaatctcttacgctgccaacactgtctcttgggagagtttgaatatgttcattggaggatagtgaccccagaccaacagtccagttgcccagtcctggaatgtgaaggcattaagctgtttagtatgataagctatagactaatgcctgcctccaattacagcattcaaattccaggtctgattcccatccccttcccaggccctagctcatcagaccattatctgactagcattaaaaggagatgaagctggcagccaggatcaggttggctgaaagctcaaaaaagcctatgccagcgtggcaactgaattttatgtcattgactcaatctctaagtcctatccaggagacatttgtttagaagcaaaagtaaaacagtcctttttgaaagtaacagttttcatttctgttcatcagtatctaactagaagcctcagccctttgatgtaactgattttatagcatcctcctccctaaaatcacagaccttttctctttccttggagagaggagatgtagctcagggattcctaatgacctttcaaggtttaaaaaacttgtattttggccgggcgcggtggctcacgtctgtaatcccagcactgtgagaggctgaggcgggcggatcacttgaggtcaggagttcgagaccagcttggctaacatggtgaaaccccatctctattaaaaatgcagaaaaatcagccaggggtggtggcacatgcctgtaattctagcaacttgggaggctgaggcaggagaatcgctggaacctgggaggcataggttgcagtgagccgagatcccgccactgcactccagcctgggcaacagagcgagactccaactcaaagaaaaaaaaaaaaaaacttagtgcgtgtgtgtgtgtgtgtgtgtgtgtgtgtgtgtgtgsccttgaacccctgctctctgccagtagtggggttcagcttgtcttaaagatgtttccagctcatcttctaaccttaggggagtagcacttaagttatttctctgttgcagagatggctgagcgattccatcatgtcactgtgctccagatayacttctgtgactggcagcaggccygggagcggagggagagcttgtacgctcaccatgcccaggtggagaaactggccaggaagatggccctgcggcgcgcctttactcactggaaacactgtatcctttcagatactcaggctgtccattgcctcagccaggacagcatgagctcagcagcatgtgaaacgaaagtcatgagatacatgggaaacaattgccaaacgattcaaaacagccttatctctgttgacagtcttaaaatttttgtttaattgggattgtgtataaaaagagtgcttatatatagtttaaaaataataaaatgaacaactatatatcttatcacccaactttcaaaatagaaccttcctagcacrcctatttgctcctccctgactgcgttctttttcttttccctcagaggtaatcccactttcctgattcacattttttggtgttacaatttaagtgcttttctctacccactaggtggtggaaatagccaccactatctttttcttggtgataccatcaccgtgatcatagtttccatttattgcgcttttactacgtagcagacattatgcatcatcctcttcatcctcatagcaacgctgtggagtaggtgccactattaccattttacagacgaggaaagagattcagaggagctgagtgtattctaaagtcacaggtcattggcagagtcaagattttcaaaacctaggcctttaactcctgtgtacatattctttttttttttttttgagatggactcttgctctgtcacccaggctggagtgcagtggtacaatctcggctcactgcaatctccgcctcccaggttcaagcgattctcctgccttagcctcacgagtagctgggattacaggcatgtgccaccacgcctggctaatttttgtatttttagtagagacggggtttcgccatgttggccaggctggtctcgaactcttgacttcaggtgatccacccacctcagcctcccgaagtgctgggattacaggcatgagccagcgtacccagcctcttttttttttttgagacagagtctcgctctgtcacccaggctggattgcagtggtgccatctcagcttaccgcaacctctgcctcccgggttcaagtgattgtcctgtctcagcctcctgagtagctgggattacaggcggccaccaccatgcccagctaatttttgtgcttttagtagacatggggtttctccatgttggccaggctggtctcgaactcctgacccaaagtgatccacttgcctcggcctcttaaagtactgggattaccggcgtgagccaccgcgtccagctctatgtataaactcttttttttccctttttttttttgagatggagtttcgctcttgtagcccaagctggagtgcaatggcccaatcttggctcaccacaacctctgccttccgggttcaagcgattctccggcctcagccccacgagtagctgggattacaggcatgcaccaccatgtccggctaatttttttgtatttttagtagagacagggtttctccatgttagtcaggctggtctcaaactcctgacgacctcaggtgatctgcccgcctcggccttccaaagtgctgtgattacaggcctgagccaccgcacccagccatattcttaatcactacccctaccatactgtgtgcccaagtgtgagaatttggactgcctaggatgttcatccacacattttatttgttcatcaaagtcttgctttgtataaactcctgcttaaattctgggatatgaggaagctcagactaatgatagttcattgtctagtgggggaaatagacatgaaaatatgtctttaaatatggcatgataattcctatcataaagatttgtatgaagtcctgtgagagcgactgtggagattcagccaaggaggtaatgtttgtgcagagtctaagtcataggagatgagaagttgggaaggttgatgtcttaggggaagactgcagaaggttggaaaaggcatttcagtgaggaaaagcattcaagaatccagtgggctgtggaggtagggatggtgggaaggtagatgcaggaacctctggaggttttttaacttttaaaaatttagagacagggtcacatgttgcccaggctggagtgcagtggctttcacaggcgcaatggtagctcactacagtcttgaactcctgggcttaagcaatcctcccccctcagcctacgaagtaggtgaaactacaggcacacaccatcacacccggcttcaggggtttttaagaagagaagaggctgggggcagtggctcacacctgtaatccaagtgctttgggaggatcgcttgaactcaggagtttgaggctacagtgaactatgatggcacccttgccctacagcctgggtgacagagtgagacccagtctcttaaaaaagaaaagaagtgcagtcagatttgtgctttggaaaggataattctggattagcggagagaggctagcactggtgggagaccagttatgggaggaggctcacttaccagtctacgtaagggacgagttggatgaactgcagggtgttgggggtggggacagaagagcagaaggggatggagagagccaagagatttaggaagggaacagatggacttggcgaccgattagatgagagtgggaggagaaaaggtttgaaaataactccaaggtttttagctcaaatatctaactggattgtgatgccaaaacagagactatagaaaaaggagcagattctgctttagatatggtgatttctaaatgtttactgaaattgatagcagtttatctcaggtattttttgcgtctcatctcatgggcattcaaggggaggaatgcaagaccagatgtttgatcagtaactgacagggtttccctttgcccactgcttccctgggtcatcaggagtagacagaggtggacctcagcccacctggcacgtgtgttatccccgatagccacggcccttcaaggtggcttgctgagaatgcactgtgtaggggtcagaaccttgttgggactggaggccttcacttcctggcagacatgctgctgtgtgcagaagaagctgcccagtttgagatggcagaagagcaccacaggcacagccagctggtaagagccctgcatcctggcacrggtccgcttggcagccttgcttgggtatccactcttgggggaccctgacccctatcaccttcattaaatgcagtcagctatgggtgagttttggtcatgaagccctcctttcattgtgggtgtccttcttttcattttggattacaggtgctaatgttgtagggtcagaggggtatggagctgtaaaggaacctcagagattatttagtcctgagctttttttacatggtaaaaccccttttgagtggcggaagcctcacctataaaataggtcaaagtagccatgctgtggttgaagcacgtcagggagtccgtccctgttctacctgctactcttcccttcccttgctacacgaggtggtcttcatatgttttcaggagcctctggggctccacaaagcacagtacgaaaacccctaatccagtctgatatcttcacttctgtctcagaaaattgaagcctaaggcatggggaagtatgggcaaatcagctttgcttagccaatttgtgaggcattattattattttttagagatgcggtctcactatgttgtccaggctagattcaaacttctgggctcaagcaatcctcccacctcagcctcctgagtagctgggactataggcatgtgccaccaggcccagtgttgaggcattagtattattatcattactattattattagagatagggtctcctctgtcacccaggctggagtgcagtgttaaaatcatagcttgctgcagccttgaactcctggactcaagtgatccttccacttcagcctcccaagcagctgggaccacaggcacatgccaccatgcccaactaattttttagattttttttttttttgagacagagtctcgctctgtcacccagcctggagtgcagtggtgctatcttggctcactgcaagctctgcctccggggttcacgccattctcctgcctcagcctcccgagtagctgggactacaggtgcctgccaccacacccagctaattttttgtatgtttaatagagacggggtttcaccatgttagccaagatggtctcgatctcctgacctcgtgatccgcccgcctcggcctcccaaagtgctgggattacaggcgtgagccaccacgcccggcctaattttttagtttttttatacagacggagtctccttctgttggccaggctggtcttgaactcctgtgctcaagcagtcctcctgcctcagcatcctaaagtgttgggattacaggtgtgagccactgcacctggccttttaggcattattgatggagctggatccaggtccatcctggcccaactccaacccttcctttcactaaagattccttcttccattttagcagcactgcatttataatcatacaaatgtatgcactgagcccacatggtaaaaaaacaaaaaccaccacagacaaaaagtctgtcttctcctgagaggcaacagttgatgtttaccttggtctgtagaattgtcatgtgggtcatggggttctttcctggtgtgggtgtgtttgttcttgtgcagtatagatggacagcagggagggttcagcaaatatttattaagtgcctgctgtgcaggctggcttgtgttaggctcccagttgaatctcaaagcagagaaacactcagggagatggaacagctacaagaagctgtgaccaagcttctccccgctgatttgaggcactgtttgccttcctctactcttagtttacagactctactgatcccagtccttgtaatcagttgtgtcctttctttgcacagtatttttgctttagagccctaaaagacaatgtgacccacgctcatctccagcaaataagaaggaatcttgctcaccagcagcatggkgtcacggtgagggttgtcttctgtatcaagggacctcttctgaaggccattctctctcgctctttttttcagtcttgccaaattaagcagaactctttttaaaaaaactttttgtgcttcaagatttgtccagactgtcaactgtaaaaccttagtttgcattttctttctttcttttcttttcttttttttttttttttttttgagacagtctttctctattgcccagactgtaatacagtggcacgatctcagctcactgcaacctccgcctcccgggttcaagcaattctcctgcctcagcctcttgagtagctgggattacaggcatgcgccactacaccttcctaatttttgtatttgtagtagagacgaggtttcaccatgttggccaggcttgtctcgaactcctgacttcagatgatccacccgcctcagcctcccaaagtgctgggattacaggcgtgagtcaccatgctcggcctttttagtttgcattttctttggtaatccatacctgctgatagaaaaacttgtttgatcccatttttttatctatttgccaagaaatggatagttgactcaaagttcagggactgtggattttaaacctgacctaggggatatagtgatacaaatactttctttttttctttacttatttagaggcagggtcttgttctgtcacccaggctgtagtgcagtagatcactgcaggttcaagtgatcctcctgcctcagcctcccaagtagttgggactacagctgtaagccaccacacccagctaatttttgtattttttgtagatggggtcctactatgttgcctaggctgatctcaaactcctgggctcaagtgatctgcccaccttcgcctctcaaagtgctgggattacaggtgtgagccaccgcacctggcccaaatatacttttttttttttttgagacagggtcttgctctgttgcccaggctggtgtgcagctgcagtggtgcgatctcaactcactgcaacctccacctcccaagttcaagcgattctcatgtctcagcctcccaagtagctgggatcacaggtgtgcaccaccaagcccagctaatttttttgtatttttagtagagacgggtttttccccatgttggttgggctggtcgcaaactcctggcctcaagcaatccacctgcctcggcctcctaaagtgctgggattacagacatgagccaccatgcccggccccaataggaggctttgrttgtgtttctattgtaagtctattcacttccattgtaagtccattataaaacaatggtttgtttacttgatgccaacatatattgtctctactttcttggtgtaggatttttttccctgttactattttatgaaaaatgtttaaacatacagaaaaataggaaaaaaaagtataataagcctctatatagtcactacctggatatagtaattgttaatatttgctatgtttgcctcattgttttttgctgaataatttcaaagtaaattatagacatcaygacactttgcacctaaatatttcagcatgcgtcactcagagacattttcttatgtaacgacaatgtcattatcatccctaagaaaagtaacagtgattccctaacattaatatctagtcaacattcaaatttccatagttgtcttaaaaatgtcttatttgtagctgctttttacaaaccagaatgcagttaaggatcactaactccatttggttcttttctgattgatttttagcagaaatggattttgttactatatttcttaaagcttttaatctagaactttccttcccccaacaacacttctttattactatatatatatatatatatatatatatatatatttttttttttttttttttttttttttttttttttttgaaaccgggtctcgctctcgcccaggctggagtgcagtaagtagcttgatctcggctcactgcaacctccaccttccgtgttcaaactgttctcctgcctcagcctcccaggtagctgggactacagacgcacaccatcacgcctggccaatttttgtatttttagtagagatggggtttcaccgtgttggccaggctggtctcaaactcctgacctttggtgatcctcccacctcggcctcccaaagtgttgggattacaggcgtgagccacgacacccggcctattatattttttaattgtggtaaaagatacatcacttaaactttatcaccttaaccatttttaagtgtacagttcagtgacatgtacatccacattgtgcaatcatcatcactattcatctctagaactttttcatcttgcaaaattgaaactctgtacccatttcctctttcctcagcccctggaaaccaccattctactttctgtctctataaattagattattctagagacctcataggtggaatcatatagtatttgtccttttgcaactggcttatttcacttagcataatgtatactttttaaaatgactgcctttttttaaaaaaggacaggccagttattttgtttatacaatttatttattattataataattattgttagagacagggtctcactctgtcatccaggctagagtgcaatggtgtgattgtagctcatcgtagcctcatcctcctgggctcaagagaatatcctgcctcaacctcctgaggagctaggactacaggtgcataccaccatgcctagccttgtataattttttttgttgttgtttgtttgtttgtttgtttgagatggagtttcactcttgttgcccaggctggagtgcaatggtgccatctcggctcactgcaacctccacctcccgggtttaagcgattctcctgcctcagcctcccaagtagctgggtttacaggcatgtgccatcacgcccggctaattttgtatttttagtagagacagggtttctccctgttggtcaggctggtctcaaactcccaagaactcaggtgatccacccgccttggcctcccaaagtgctgggattacaggtgtgagctactgcgcccagcccagtgttttatgttattgatttatctgattgtttccttttgatatcatttatatcatttaattttcctttagtctacatggttcctataatcgttacatctgagggcttgtttagattgaagttaaacatttatgcgagactacttcataggtgggaatatgcattaaaatcagttttaatttctaaaatggctttctaaaatgtcattgtcttctgtgggattaggaatagcttcttcatctaatttccatagactggaagaaccatctttttgccttttatgttggcccagaatagctctatagttgagccctcattaatttgtatgcccactgtatgttggctgctcctaactgaggtcatttctgctttgggggagctcacagtctgttggagtaaggattcactgttttacctttcatctcagtacatttccatcttcttcctcccttgctttagctgctgcacaggttctggaacctctggcggtctcagattgagcagaaaaaggaaagagagctgctccccttactgcatgctgcctgggaccactacaggtagggactctggtttcatccctggctctcagggactttgtgcctctgacttactgttttccaggagtaattgcttgcccttctatgcgttagtgtggcagattcagaaaggcctgctggggtggaggtcctgctgtaaaccatttgttcctgactttgggtttttggctgatcakatgggagatagaatgagcatatttgcattggttcttggccaccatagtctgaagtatgtgcctggtcgctcactgccttggtcctacaggcatcaatatgttcacaagttagaattcatgcattgctagtgttaaagagaagggtcagggacatttgtgactcagtcttaaagtgtgcagggaatgtcctcaatattttagagctagtcattcagttaaataaataaaaacactacatttctgtgaggaaaactcagaatgtatagggtggaaagtataaagggaaaaataaaagttgcctggccccctccctacaagtaagagtaagatcttactcctcagaaggaagcactacgtataaactttcttgctgccagaaatgttcaatatgtccttcctttctttgccctccttttttcctctccccacagtataatcaacttaatttgcatagtttagctccaattttgaagcattttttaatgagttagtgagaatcccaataataaactgactcatttagagttatcaaggcatattattccaaaccctggtttacaaaacctagtgtgagaggcaacatgtcgtggacccccagcgtttggccatgaaaccagaaagttcaggatatctaggggatttcacacatatttcctaaattccagagctactgtrctttcrgtggtctaattaggttttacaagaaagttgcaacattttaggcaatccacagtccaaaatcagaggttgacaaattttatattagatatcaggttcttattgccgtctctcctagaatgaaactagtaagcccatggggtgcctttaactcacaggaagtaactgtaccgcartttacctgccttaaaacaaagttttaaaaacttgaaacctgaaggtgttcttccttttgtttcagaatagcactgctgtgcaaatgtatcgaattgtggctacagtatactcagaagaggcggtacaagcaggtatggagtactttttagcagatagctctactggcttacattcttggacccatttgctttggaaagattcttggaaaagacctatgccaagaagtcttatcgttctgctttggaagagagggtgttgaaaaagctcaaagtcatttcttccagttcccacctctaatatcagaaagtctgcataactcccatttcttatctgctatgaaaatacaagttctctctgaaagtactgagctcttatcagccattcacatctttactcaaattcatttagtctctgagttagccagcccttcacccagtgggacctgcaagaggtacagggagaggtgcagagcataagtgctgcatcccagtgctaaacagtgtgagacacatgtctcccgggggtggaggatgtgaggtcaggaccacaaataagtaaaggcagattgagaaagatagattcaattccatttaagaaatacttattgagcaactgctgttcttcagacactgcactaagcactgaggatacaactgtgatataaagtcaataaaattcctgctctcccagggctcatactttagcaccagggtgacaaatgagtgtgaccttacaagcccgttctaccaattgggagtacctgtctggaatgttgaagtgagaaggatttcaaggccatatttacactcagtgggaaagggttcagttgatggcatctgccattgtgagaagtgccccctttttggtcatctctggcagtgaaacagaggaagacacaaaccaaactcctcccagttattttcgtgctgcccaccctacccgtacctccatcttctgttggagtctaacaggtgaatctttagattcacctgttagctagttccctatagtttggggatagaatccaaatttttagcaaggcctacaaactccttcgggagctggtccctgtctgtttctctcccctttcctgttaccactctgttccttcacaactgcactctgaccagttaagctgccagtggttccctaaaggtcctctgtgccctcctgcttctctttgtacctccagttctctatttcacactcccttccagctcagatgtcacctcctcccccaggccagtccacstccacccctaccccagaggcatagctttatcagaacattcatcttatagttgttcactggcttctctttccccacaggctgtgaagtcctttagagtacagcctgtcccttttgcctccttagcccacagtgcttggcatgggatatgtgctaatatttggatgaattaatgcacagaccaacaaatgaactgctgttgatttcttcagagtttttttccaaggatgatctaagtcgatagagcttggatgctacagggcatggcctctttttgcgtcactcttgcctcctacacttaagaaatgctagagtcactgcattctttgacatgcctttggattatgttactggctttgaaaagacattgccacttgttatcttaagttcatgtaatacaagttcaccagaatgcaggaaagcctttcagaaaaagactatgagtgtcagagttgaaaggttgtatttattcaaggtggagagcagagggtctcttttatttccttcctggaaaacgagcactccccttgacacaggggcccaacactggcggacagtccagggtcagcgttttcatctctcacactgatctagcacggcctgctttcaaaggtatagcgggtctgaaaaatgggaagagcactgcttagtcattcctaaacctttagctaacaatctgaatatcacctcttggtataggtatcccaggagcacatcagatctttctattcttagacaagataaaaatattattttttgtgggtttcttcctttttaaaaagtaacatacagtcagccctctgtatctgtgggttccacatccatagattcaaccaaccatggataaaaaatattcagagaaaaaaaagagtagttgtgtctgtactgaacatattcagacctttttttcttgtcattagcccctaaacaatatataaacaatatagcataacaactatgtacatagcattgacattgtattgggtattatgagtaatctagagatgcatacaggaggactgtgtaggttatatgcagatgccaatttatttgttttgttttgttttgttttgtttttgagacaggtttcactttgtcacccaggctggagtacagtggcatgatcttggctcactgcagcctcactctccccaggctcaagcgattctcctgcctcagcctcccaagtagctgggactacaggtgcaagccaccacgcccagctaatgtttgtgttttgttttttttttttgtagaggtggggtgccaccatgttacccaggctggtctcaaactcccaagctctgcctgcctcagcatcccaaagtgctgggattacaggcatgagccactgcacccggcctgctataccattttatataagatacttgagtatccatggattttggtatctgagaggggccctggaaccagtcccccacaaataccaaaggatggctctttgcagaatggcgaatgtttgctaactgttgaagcttgatggtagggtcatgggtattcattatactgtcggcttctacttttgtttacatttgaaaatgcccataataaaaaatagaaaagcaatgtgtagatattatagaaaatttaggaagtataaaaagatataaagaagaaaaaataaaaccattcatgacatttgatgggtaagcctggtatctctcttcctctgtttgggtaggagtgtatgtacctatctattcacatacacatacatatgcatactgatccaattatctattgctatgtaaaaaatcaccccaaactcagtggtataagacaacaaccattctattatgctttatggattatcaaagattgagacaggacataatgggaatggttggtttctgctccaagatcagcctcaactgaaaagattctaatggcaaggggttagaattatctagacgttttcttcacacacatctagatcctggattagaatgactcaaagactgggctcaactgggaatgttaaccaaagaacctgtgtatgacctctctgtgaggcttgggcttccttacagcatggtggccttggggtagtcagctatcagagcttcaaaatgagtgttccagtgaacaagtcagaagctctgtggctctttgtatagcctcagaactcacacagtgccacttttaccatgtgctattggtcagagcagtcactatcccagccagattcaaggggagggaacatagatcacttctcagtgaaggaggagcaaataatttgcagccatgtttttaaaacctctacacatttgggctgggcacggtggctcatgcctgtaatcccagcactttgggaggccaaggcaggcagatcgtgaggtcaagagatcaagaccattctggtcaacatggtgaaaccctgtctctactaaaaatacaaaaattagctgggcgtggtggcgcacgcctgtagtcccagctactcgggaggctgaggcaggagaatcacttgaacccgggaggcggaggttgcagtgagctgagattgtgccactgcactccagcctggcaacagagtgagactctgtctcaaaaaaaaaaaaacaaaaaacaacaaaaaaaacaaaaacataaaacctctatacatgcatatatgctttttccccccaaagttttggatcatggagacatatatggtatattcttatgtccattgtctgtcttcctactgatgtatcagtaaaatagtagacttttataattacattaatgtgtatgacaaacactataaacaaaatcaaaagatatattatggggtggggaaatatttaagatttataacacatgacaaaggactaataaattgtttaggttcaaaaaccccatacatatcactgagtcaaatgctaacagacagtgaaacaggtaatgggtatgaacacctaagccagggggaagagagagtgagtgagagtgtgtgtatgtgtgtgcgtgtgtgtgtgtgtgtgtgtgtgtagaaatgtttaactaatgtttaagtgaaaatttttttacctatcctatttcatttttcacctagcatattggcaaagataataaataatgattcatctttttctcatttttattatataggaagcaatcctcccacaagggtgtgaccctgagaggtcatgtttaaaaaaaaaaaagttaagtacaaaggttattcattcttttactttagctgctacaggccagagcggatggtcatttccagcagagagccctgcctgctgccttccacacatggaacagactctggcgatggcgccaccaggaaaatgtcctcagtgcaagagcaacacgtttccacaggtatgttgcgcagctcctgtctgcactggggcaggtgtttcaaatctaactctgacaaccacacagcccatttgctgtgcttttcagcttcccagaccccaggccctagtacttcctggattttcagtaatgtgggctcattgatttcatctagcaggaaaagacaagacagtgtttcccctgggaaatcttttgtccatctttatttattttttttttgtgtgtgtgtgtatatatgtatttattaaaaaaaatgtgtagtgtttaatctgaacagccagtggcttagtcaagttaacatatacatgaagagacttattatgaggaattgacttacactattatggaggctgagaagttccatgacctgccatctgcaagctggagactcaggagagtgggtagtgcaattccagtctgtgtccraaggcctgggaaccaaggggcctcgaggtgtaaatcccagttgaagggcaggagaagatgagatgagatctgcccacgcaggcaggcaggaagcaaaaggggcrgattctttctccttttgttctactcaggccctcaaggggttggctgaggcccccgtacattaggaagagaagtctgctctactgagcccacagattcaaatgcttgtctcatctgcaaacacccagaaacactgtttaatctgggcacccagtggcccagtcaagttgacacatagaatccaccaccatggagtagagagaagtcacagaatcagactgcttgggttcaaatcctggctctgttctgtgaccttggccaaggtactcaaatgaccaattctctagttttctcatctctgcagtgggggagtaatagtgcttacctcaaagggttattcagattttggtaattggctgttgagctattcagattttctaattcttatgtcaattaatcatttcaagtttttttttgagacagagtttcactcctgttgcccaggctgaagtgcggtggtgtgatctcagctgactgcaaccgccgcctcccgggttcaagcgattctcctgcctcagcctcctgagtagctggaattacaggtgcctgccaccatgcccagctaattttttgtgtttttagtagagacggggctttcaccatgtcagcaaggtctcgaactcctgacctcaggtgatccacctgcctgggcctcccaaagtgctgggattacaggcgtgagccactgcgcccggccagcgtttcaagtttttaagagaatgtgtccatttccccttctctttttattttatttttatttttatatatatttttaaatttgaattgcttctctctttttcttgattagttttactactggcttttctatattccaacttttttctttttatttatttatttatttttttattgataattcttgggtgtttctcacagagggggatttggcagggtcatgggacaatagtggagggaaggtcagcagacaaacaagtgaacaaaggtctctggttttcctaggcagaggaccctgcggccttccgcagtgtttgtgtccctggttacttgagattagggagtggtgatgactcttaatgagcatgctgccttcaagcatctgtttaacaaagcacatcttgcaccgcccttgatccatttaactctgagtggacacagcacatgtttcagagagcacagggttgggggtaaggtcacagatcaacaggatcccaaggcagaggaatttttcttagtgcagaacaaaatgaaaagtctcccatgtctactcccttccacacagacacggcaaccatccgacctctcaatcttttccccacctttcccgcccttccattccacaaagccgccattgtcatcctggcccgttctcaatgagctattgggcacacctcccagacggggtggtggccgggcagaggggctcctcacttcccagtaggggtggccgggcagaggcgcccctcacctcccggacggggcggctggccgggcaggggggctgaccccccccacctccctcccggacggggcggctggccgggcggggggctgaaccccccacctccctcccggacggggcggctggctgggcagaggggctcctcacttcccagtaggggcggccgggcagaggcgcccctcacctcccggacggggcggctggctgggcgggggggctgaccccccccacctccctcccggacggggcggctggccgggcagaggggctcctcacttcccagtaggggcggccgggcagaggcgcccctcacctcccagacggggtggctggccgggcaggggggctgaccccccccacctccctcccagacggggcggctggccgggcagggggctgacccccccacctccctcccggacggggcggctggccgggcggggggccgaccccctcacctccctcccggatggggcggctggccgggcggggggccgacccccccacctccctcccggacggggcggctggccgggcagaggggctcctcacttcccagtaggggcggccgggcagaggcgcccctcacctcccagacggggcggctggccaggcggagggctgacccccccacctccctcccagacagggcggctggccgggcggggggctgacccccccacctccctcccggatggggcggctggttgggcagaggggctcctcacttcccagtaggggcggccgggcagaggcgcccctcacctcccagacggggtggctggccgggcaggggggctgaccccccccacctccctcccggacggggcggctggccgggcagggggctgacccccccacctccctcccggacggggcggctggccgggcggggggccgaccccctcacctccctcccggatggggcggctggccgggcggggggccgacccccccacctccctcccggacggggcggctggccgggcagaggggctcctcacttcccagtaggggcggccgggcagaggcgcccctcacctcccagacggggcggctggccaggcggagggctgaccccccccacctccctcccagacagggcggctggccgggcggggggctgacccccccacctccctcccggatggggcggctggttgggcagaggggctcctcacttcccagtaggggcggccgggcagaggcgcccctcacctcccagacggggcggctggccggggggagggctgacccccccacctccctcccggacggggcggctggccaggcgggggggctaacccccccatctccctcccggacgggctggctggccgggctgaggggctcctcacttcccagtaggggcggccgggcagaggcgcccctcacctcccggacggggcggctggccgggcggggggctgacccccccacctccctcccggacggcacggctggccaggtggggggctgacccccccacctccctcccggacggcacggctggccgggcgggggggctgaccccccayctccctcccggatggggcggctggccgggcggggggctgacccccccccacctccttcccggacggggtggctgccgggcggagacgctcctcacctcccagatggggcggctgccgggcggaggggctcctcacttctcagacggggtggttgccaggcagagggtctcctcacttctcagacggggcggccgggcagagacgctcctcacctcccagacggggtctcggccgggcagaggcgctcctcacatcccagatgggacggcggggcagaggcgctccccacatctcagacgatgggcggccgggcagagacgctcctcacttcctagatgtgatggcggctgggaagaggcgctcctcacttcctagatgggatggcggccgggtggagacgctcctcactttccagactgggcagccaggcagaggggctcctcacatcccagacgatgggcggccaggcagagacactcctcacttcccagacggggtggcggccgggcagaggctgcaatctcggcactttgggaggccaaggcaggcggctgggaggtgtaggttgtagtgagccgagatcacgccactgcactccagcctgggcaccattgagcactgagtgaacgagactccgtctgcaatcctggcacctcgggaggccgaggttggtggatcactcgcggttaggggctggagaccggcccggccaacacagcgaaaccccgtctccaccaaaaccagtcaggcgtggcggcgcgtgcctgcaatcgcaggcattcggcagactgaggcaggagaatcaggcagggaggttgcagtgagccgagatggcagcagtacagtccagcttcggctccgcatgagagggagaccatggggagacggagacgagggagagggagagggacagggagagggagagggagagggaggtgtccatctttatttcaagggctttcaaaacagcctgtttgtaaccttcattattagccactgagagctccattaaagcagcccattagctttctggatcagagcacggtgggaccttgcctcaccttggcagacattcttaagtgtcatttccccgaaacacttagttcctgttctgctagacctggctttttgaagtcttgaaatgatagtcatcaacaaaattacaaaggtcgggccgggtgcagtggctcacacctgtaatcccagcactttgggaggccggagcgggcggatcacaaggtcaagagttcaagaccagcctggccaacatggtgaaaccctctctttactaaagatacaaaaattagcccggtctggtggcacatgcctgtaatcccagctactcgggaggctgaggcaggagaattgcttgaacttgggagatggaggttgccgtgagctgagatcgcatcattgcactccagcctgggtgacagggcgagacgccgtctcaaaaaaaaaaaaaaaaaagaaaaaggccgggcctggtggctcatgtctgtaatcccagcactttgggagtccaaggcgggcggatcacgaggtcaggagatcaagaccatcctggctaacacggagaaaccctgtctctactaaaaatacaaaaaattagccgggcgtggtggtgggcgactgtagtcccagctactcaggaggctgaggcaggagaatggcatgaacctgggaggcggagcttgcagtgagctgagatcacaccactgcactctagcctgggcgacagagtgagactctgtctcaaaaaaaaaaaaaaaaaaaaaaaattagaaagctcaaggagcagatctacatctttttagttcccacagggacaaacttgcccacagcagtttcttagtatatggtgggacataatgaagaaataataataatttatttatttatttatttatttatttttgagttggagtcttgtcctttcgcccaggctggcatgcagtggcaccatcttgactcacggcaaactccacatcctgggttcaagtaattctcctgcctcagcctcccaagtagctgggattacaggtgtgcgccaccacgcccggctaattttttgtatctttagtagggacggggtttcaccatgttggccaggctggtctcgaactcctgacctcgtgatccacccgccttggcctcccaaagtgctgggattacaggcatgagccaccacgcccagcctgtaatgaagaaattattaatcactaactgtatgtctgccactgtgttgggcattgtgtgatgggagacagaaaacaaatacataaactcattctgcccatggcatcattatcttcattaataatttccttttcacagtgattctgagaggtcaggttcaaaatgataaatggtaacacaaccagtaagtggtacagccaggttaattcacatctccagttccaaagtccaggtgctttcttcttgatcaagaggaagatctttttgatgactttgtaggagggtgaaatttttgtgaggagataagaaacaactgagaaccaattcaagagaacagatccacgtgtccccagtcatgtcagccacaagttcttccagtgctcagagctagtgctgagggagactgagcatggaagtatctgggagaggcttcctgtgagtgagagggtgaggatggtggctggagtgggcaagatggggaggcccagactgaagagattgggctgaccctatagatagatattcgaaagatatttgagcaggtacatggaactagtaaaatgacagttttggaaattaccttaagttcagtgtactttatcttaggacagaggggtgagatggaggggcatgcattgggagaagttgcagtcatctttaatctggaggatttcaggccaggtgtggcggctcatgcctgtaatcccagcactttgggaggcagaggtgggtggatcattggaggtcaggagtttcagaccagcctggccaacatggtgaaaccccatgtctactaaaaatacaaaaattagcggggcgtggtggtgcatgcttataatcccagctactccggaggctgaggcacaagartcactttaacccaggaggcagaggctacagtgagttgagatggcgccactgcactccagccttggatgacagagcgagactccatctcaaaataaatmtctctctctctctcyatctatctgtctatccatctggagggctttgaatgctagtttgaggttagccagaactctggcttccttagtacgaagtccagggagatggttttaggtggtggccacgggraatagaggctgatgaaaggacatctcttgtctcttctggcttctgcagacagagcagctttgcctttacctagtcatgtattgtgggctggtataagattcattcaaaaatggcttcaggctggacgcggtggctcacacctgtaatcccagtacttggggaagctaaggcaggtggatcacctgaggtcagaagttggagaccagtctgaccaacatggcaaaaccccatctctactaaaaatacaaaaattggccaggcatggtggcgcacatcccagctactcgggaggctgaggcaggagaatcgcttgaacctaggaggtggagattgcagtgagccgagatcgcaccactgcactccagcctaggtgacagagcaagattccatctcaaaaaaaaaaaaaaaaaaatggcttcagtactgaaaacacgcacacacagtacccgtttctaaatggcttcagtactgaagacacgcacacacagtacccgtttctaaatggcttcagtactgaagacacgcacacacggtacccgtttctaaatggcttcagtactgaaaacgcgcacacacggtacccgtttctaaatggcttcagtactgaagacacgcacacacagtacccgtttccaaatggcttcagtactgaaaacatgcacacacagtacccgtttctttttttactgtcaagtagccgtgcttggttctattctttttttgtattttgtatgctgtgagaaccaaaaattaaaagtaccttccaaatagccaagaggagcctttaaaggatttttgctagggagcagtttgggtggttttagagctatcactctggagaaaaagggcagagggcgacttggagacagggtatagccaggaggcttgcaggacggtgtaggcctgatctagatttttacctgttttggcttggttggaccttttcagtaaacttggttttttggattcctgttttccttgttcatgagcagagtgattgagagtctggcttagaagctggacaagcctgagttcagacctatgctctgtcgcctgccagctctgtgaccctggacaagtcagtctgtctctctgagcctcagtctcctcgaatgtaaaattgagatgatgtggtcatagtctctatctcatatggttgtcatgaaaatgaaatgggaaaacatgtaaaatgcaaaccaagggcctagcataaaaatatgaactgtccctgtggcccctggagttgttttaatttgtgactctcatggtaagtacattttcagaggattggtttggagtttagcaaattaaagttccaaataaatatgtatctttgatattcttagggtattttttaatgttttaggaatatagacagattttatgatggaatctcatgaattatggctaaaaataatttttataaccctccagtgaaaggtactgagaatgagacaaaattggtttgtcttttattttaatcgagataaaatgtgtatacagtgaaaggcatagattttaaataaagttcgatgagttttcataggttttttttttttttgagacggagtctcgctctgttgcccaggctggagtgcagtggcgtgatcttggctcactgcaagctccaccttctgggttcatgccattctcctgcctcagcctcctgagtagctgggactacaggtgcccaccaccacacccggctaattttttgtatttttttttttttagtagagaaggggtttcactgtgttagccagaatggtctggatctcctgacctcatgatccgcccgccttggcctcccaaaatgctgggattacaggcgtgagccaccatgcccggccgagttttcataatttatgcacctatataatcaacactccagtcaagatacagaacatttctgttaccccagaaagttccttcatgtcccctccagtcagtccctaccctgcataggtaaccagtattctgatttccgtcatcataggttagttttgcatggtttttttcttgtcgcccaggctggagtgcagtggcgckrtctcagctcactgcaagctctgcctcccaggttcatgccattctcctgcctcagcctcccgagtagctgggactacagacgcctgccaccacgcccagctaattttttgtatttttagtagagacggggtttcactgttagccaggatggtctcgatctcctgacctcgtgatccgcccgcctcggcctcccagagtgctgggattacaggcataagccactgcgcctggcctttttttttttttttttttttttgatgagcagaagtgtttgaattctgttggattgatacagtccagtttatcttttttttttttttttttttttgagatggagtcttgctctgttgcccaggctggagtgcagtggcacgatctcagctcactgcagcctccacctcccaggttcaagcaactctcctgcctcagcctcctgagtagctgggattacaagcgcacaccaccacgaccagctaatttttgtgtttttagtagagacggggtttcactgtgttggtcaggctgatctcgaactcctaaccttgtgatccgcccgcctcggcctcccaaagtgctgggattacaggtgtgagccaccgcgcccggcccaatttatcctttttttttatggttagtgattttagggtcctccctaagaaatatttgctactctaagatctgaaaagatattttcctatattttatctggaagctttatagttttagcatttacatttaggtcaatgatcatcttgaattttttttctacatatgatatgacgtaggagtcaaggtttatttttttctgtgtttatcaggtttttccagcaccatttgttgaaaagccttttttttttgagacagaatctcgctctattgccaggctggagtgcagtggcagtggcacaatctcggctcactgcaatcttcgcctcccaggtttaagcgattctcctgcctcagcctcccaagtagctgggactataggcacacgccaccacgcccagctaatttttgtatttttagtagagacagggtttcaccatgttgggttggccaggatggtctccatctcttgacctcgtgatccacctgccttggcctcccaaagtgctgggattacaggcgtgagccaccgtgcctagcccagactaatttttttttctaattttttgtagaaaaagggtctcactatgtcacccagtctggtctcaaactcctggggtcaagtgatcctcctgccatggcctctcactgttctgggattacaggcgtgagccaccatgcctggcccagttctgtttagaattaatataccatttcatgtttagtgcaagaacataaaaacaataaaattctattttgtccccatccttgatgatatttttattgttgttattttttttttttttaagaaataaatcatagtggggattcactatgttgtccaggctggtcttgaacttctgggctcaagacatcctcctgcctcagcctttcaaagtgctgggattacaggagtgagccaccacccccaaccagtggtactttttgtcatacattttatgtctaacgattgattgattgtagagacgaggtctcactatgctgcccaggctggttttgaactcctgagttcaagcaatcctcctgcctcagcctcctgaagtgttaggattacaggcatgagccaccaggcccagcctacaacgttactatttttgctttaaataatcagtactctttttataaattgagaagaaaaaaattcagcctcttatatttacccacatattttccctttccagtgttccttgtgtcttcctgtacatttgaatgttcatctgtatcatttcccttcagcctaaagatgatcttttagtgtttttatactaaggtcaactggggttgaaygatctcagcttttgtgtctggtctctgccctctggctgggccagagctccgtctttcaaccctgtccagcttctgctgtctctgttcccctcttggccctgcagcagtcactctctgctaggcctccaggccctcatctgaggacctgggacaacctcagtaaaattttgggtatttccctctgttcagctgtctcctttctagtaccctgaccccaaattccagcccctctggcagtcatgmactccagtctttgcctcctcagctcactgagactgagggaggctctgcttagcctcccttcccctcactgtttagaaggtgcccccaggcagaaagtctgggcggcctaggggctcacctcgcccgtgtcctatcttttcagcatcagaatctacacttactgtccagcgcctgaagacagttgccatatgtattttgtctagttttgtcatatatggccagagggcagatccaggaccagtgactgtgttctgactagaagtggaatctttgctttaagtgatgtgtcttgcgtgttaaatgtcaggggagcaagatcccccagtgctgaacatggatcctgtggcttcaccaacatgtagcccctagtggctgttggtcaattgtcccagcactgctgctgcaggatttgatgttgttaatggtgatctgtaggcctaggcagagatgacaaaacagtggttcccaaacctttttacttttctttactttttttttttttttttttttgcaacctctgtggcccaggctggagtgcagtggcacgatctcggctcactgcaagctccgcctcccgggttcatgtcattctcctgcctcagcctcccaagtagctgggactacaggcgcccaccaccaggcccagctaattttttatatttttagtagagatggggtttcaccgtgttaggcaggatggtctcgatctcctgacctcatgatccgcccacctcggcctcccaaagtgctgggattacaggcgtgagccactatgcccggccaacctttctacttttctaattcacctgaaatacttgtttaaaatactatttcctgggaccccccctcagacttgctcagtcagccttaggggtctgccccttgtttttcaacaggtccccaaagcgttggtcagcatgcactggaaagggctctcatgaacaatcctttatcagtgctgttaagtcaatatagaattaatgaagacctggggtctcagggtctgagtctttttcgtacggtgtgaaggcttggctgataccagaaacaacctggaaaatgttggcctttttaacagtttatggttttttggctgtctgctttccttccctttctctttgtgttgctttctccctcatctaagcttattcacctcttttatttttttcagagacrgggtctcactctgttgcccaggctggagtggagtggcgtgatcatagttcaccacagcctcaaactcctgggctcaggcgatccccccacctcagcctcccaggtagttggtactacaggcacacaccatcacacccagcaattttaaaatttttttgtagagatggagttttgctatgttgcccaggctggtcttggcctccagcgatcctcctgccttggcctcccaaagtattaggattgcagacatgggccactgtgcccagccacttaattcacctcttatacgatagcatggtataaaaggaaaaatccaattatttggaacttctagttctgtttgggttaatttttatktttgttttaagtgctttacattcttccttgttttttagggagacattagagaagcaagtattttctctctggaggcagaagatgtttcagcatcgagaaaaccgcctggcagagagaatggtaaatggctgtccctgaggagatgtgtggaggggcaggatctgattcaagccattgcactcacggcctcccctcctcaggaagttgctcggacctcactggagggcccctgcctgtgactgttgaggcagggcaggctctggggcatctgtcctttctcagtggagcctacagacagcttctgggctggaccacgtcctgacatccattccttttgccttagtcattatttgtggcctgtaaattctttcctggcttctgtgcctctctcctacttgatttattctgttctctccttcctgtcctgcctcaggccatccttcacgcagagcracagcttctgtataggtcttggttcatgtggcaccagcaggcagcagcacgtcaccaggagcaggagtggcaaacagtggcctgtgcccaccaccgccacgggcggctcaaraaagctttctgcctytggagggaaagtgcccaagggctcagaacagagtgagtggccagttctgccttacaagcctttccatcmcaggccagctttgcttgttctagcagcaccatgagctccaagtgcctgtctggaggactgcattaccccagactctggttgtaagttctggaagttcaacctaaaagagtcttaagtaaaactaggttggccgggcacagtggctcacgcctgtaatcccagcactttgggaggctgaggcgggcagatcaccagaggtcaggagttcgagaccagcctgaccaacatggagaaaaccctctctattaataatacaaaaattagccaggcgtggtggcgcaagcatgtaatcccagttactcaggagagtgaagcacgraaattggcatgaacccgggaagtgaaggttgcagtgaaccgagatggcaccgctacactccagcctgtgcaacagagcgagactctgcctcaaacraacaaaagtgaccatagccagggaataaactgatgggcccatattgtgatagctgactgctgcagataagggatagggacagcagctgtggccagtgggtgggttgtggcagtttttaaccacaccacgtagttaagagagaggaggggaggcagcccagtcactatagagactgtcctgctttggggcctttcagtgtccactgtgtgttctgaggatctcactccctgtcgcacactgaccatgtttaacyagtttctcagttgggggcttcacacctgcacatgtgagcttcaatggcacctgaagccctgggaagttgtaggccaaaatttgatcataggtgcttttttctgagactgcaagttctttggcagctcttcagagagggtcttkgctcccccaaaaacttaaccaggtagggctatggactatgaggaggaacccatagagggtgccctcactgggtgggggctgcagcactgagctctgccatctmcccacaggaggacgggcagggtgcgggcagcagaattccacatggcccagctcctgcgttgggcctggagccagtggagggaggtaaggctttggtgcgaggtgccacccgtgtatracttttsgacaggtgggctgtgtgtcagcaggactcacaggcaacatatgggccacaccacctacctctgagctgaaggaggagaacaggcagcatagaaagtgttaactcagttttatgagctgatttggctcaaaattttgtgttctttcagatcctaggctgttcttatttgaacttactgcatctaaaattcctgatctaaccatttacaggagtcctacgtcctactgagtgtaaaacatgtttaaactcacattaattgagcttttaccgcaaatcaagcacttacctcatcaaatcatcacagaacccctaagaagcacgtatttatagatgaggccagagaggttaatttacactcacacagatgatgtataaaatggaggcaaagcaggaagccacccccaactcagaccccagcccacggtrgctgctttctcctctgtctgcagtgcctggccctgcggggagcggagcggcagaagctgatgcgagcagacctgcaccaccagcacagcgtgctscacagggcgctgcaggcatgggtggtaggaactgctgcttccctcctgatcttgctgtggggacaggggaggtttctggagactttgttttccttccttgttcttcctgtccgtcccagaacagagtcacgtgacacacctcaaaccaagcaggtgccccggacagcgggccttaggccatagggttctttgattcttgcttggccaagtggaaacaagtgctgtctgtgggtactagccttgtagcgaaagcagctcctttccctggagtcccatggtttgacttaggaggtgagggcctgtgagacagtttctccctgtcgtctgggagggtctgctggccctgggaccaggggctgttggcctcttcctaccctttttgagttctctgggcatggcagccttgtggtagatgcacctctgaggcctgcctaaacagggggaagtgtgggcccaagagcagcctcagtcttccttgtcccctacagacttaccagggcagggtrcgaagcatcctccgggaggtggcagccagggagagccagcacaacaggcagctgctgyggtgagtctcccgggcgcctcccaagctccagctggggaacaaggaatgcactccaaaccccagccttttagggggtcctgctgagggccaggtcggggatgatccygggttcctagtcnctaatatcatggtcttggcttttccacttcactcacgggttcgccttcatgtcttaagcccctgctgtgtgcagggcaggaccttggaaagcagctgttacctgcatgccttaaaggccacttgtcttgctcttctgagcactttttcctccctgcttcacgcctacaaaattcagctttgcaaggcaccttgtcatctcttccactccagaggcttcagcgactccctttcctgtcaatttccaagtagtccccttccagcttgctctgcaggcctgtcactgactctccagcgtcacctctaggccctgtcagaccatctgcaccactcacccctgtggagggtgcttctgcagcttctgccactctttctaagcccaactctaacctcactccttcccagcagtcctcccacatgccccctttcatttccttcctttgtatttgttcagcacatgatactcctggtggcctatggacagtgggtctcgtggactttaaacacctccatccttagctgggcgcggtggctcatgcctgtaatcccagcactttaggaggctgtttgacaccaggagtttcagaccagcctgggcaacatagcgagaccttgtctgtactaaatataaaaaaaattagctaggcacggtcatgtatgcctgtggttcaggtacttgggaggcttaggtgggagggtcacttgaaccttgaaggtcaaggccacagtgagccgtgattatgccactgcactccagcctgggcgatggagtgagaccctgtctctmaaaagtaaataaataaaataaatgcctccatccctcatatggagtcccatagagcacccatcccgctcttcagacagggtggaataagcaagaactccctgagctaactcagcagcaagctgaggcgtaggcaaccttcctccaggttccctgtctctccacacttctcttatcacagtgtgagtcacctgtgttgccactgcctggttatgccctgttatcccygtagcacctggagtttggtctccagcagtgctgggtccctcatgcactcttggtgcccagcccagagcagctgctcagtagccatttgttggacatagatgtgcaagtaaacataggtgttggtgaaacagacattcttaggtgtagagtccctgactcaggagtaggggaagaagtaggaatgattcacagaagcctcccttctctctctatcctggtgtcatctgccttccycgcacccatgcatctgcagcggggcattacgtcgctggaaagagaacaccatggccsgagtggatgaagccaaaaaaacctttcaagcaagtactcattacagaaggaccatatgttccaaggtgaggtataaggaggcaagctggtcacccaggagagttgggactgtgttctggtgagggcgtgggatgtagggggtggtgccagagatttgaactgaataaggaacctagaaaatgggtaactttcctccagcacacacacaaacatccatgtgggcacatgtttagttttttactgaattacaaaccaatatgcattaaatagaaacataacacatcataagtgaactagttcttatcagaaccagtattttctttttttctttttttttttttttttttttttgagacagtctcactctgtcacccaggctagagtgcagtggtatcatctcagctcactgcaacctccatcccccaggttcaagcgatttctcctgcctcaacctcccgagtagctgggactacaggcttgcgccaccacgtccgactaatttttgtatttttagtagagatggggtttcaccacattggctaggctggtcttgaactgatgacctcaggtgatccatctgcctcagcctcccaaagtgctgggattacaggctctttgaatccaggaggtggaggttgcagtgagccgaattgcaccactgcactccagcctggacaacagagmaaggttgtctcaaaaaaaagaaaagaaaagaaaaaatacccgaagctagcctgtgcctcccttcccctggaagaaggaacacaggaatctttgcttggcttcagagcttgaagaggaggcctttttggtgggaatggagttcatgacagctcgcagagcaggcaccaggcattccctgggcaagtgttttgttattgtgattttgtaggcatcactcatacaaaagaatgtatacgacgtaggtgtgttccatttactaaatagtaatagaggccgggcgcagtggctcacacctgtaatcccagcactttaggagactgagtcgggtggatcacttggggtcaggagttcgagaccaacctggccaacatggtgaaactccgtctctactaaaaatacagaaattagctgggtgtggtggtgcatgcctgtaatcccagctactcagaaggctgaggcaggagaatcgctagaacctgggaggcagaggttgcagtgaaccgagatcatgccactgcactccagcccaggtgacagagcgagactatgtctcaaaaaaaaaattacatatatatattttatatatatataaaaatagaattaagacccatgtatataatgacttcactactttatggcatggtatgatatgtaaatcctggtagaagagtcccagcagctgaaatgctgggcttcctgtgaggggctggggccctgtcctattgctcagtggtctgcgtgcaaggcagttacttcctggaccgtgtgtgagaagcaaatggcaacagcttggccttgcctctccaggagccaccgtcacagacctggggtggaccyggaagccaggaggtatagtgactcttgctgtgctccttgcctgcccataggtcctggtscagtggcgggaagctgtgtcagtgcagatgtattaccgacagcaggaggactgtgccatctgggaggcccagaaggtgctggacaggggtaagtggggccccagaagcaagtcatgttgaggaatgtgaagacagcgctgttgtggagatccctgtggcccgcataagtctgtctcctcctcatacatgccagttccctgtggttgccatgacaaagtaccacagactgggagtcttcaaacaacacaaaattgccctctcagttctggaggctggcagtcagcgatcaaggtgtggcagggccatgcttctccacaggctctaggggagggtccttccttgcctctcccagcttgtttcttgcttgtcatggctttcctggacgtgtagacccattgctccagtctttgccccatcttgacatatcgttcccttcctgtgtctgggtcccttagaaggactctggtcatatcggatgaagggcccaccctacttgagtgtgacaccatcctaaccaattacatctgcagtgagcctagtgccagataaaagtcacattgtgaggttccaggaaggacatgaatacggcaggtgtggagggggcactgttcagtccagtatatcttagaaatctattcccaactgactgccaaccagtttatgttaaaatggaaggctagagcttgagatctacagagaaataaagaaaagaagctggaatggaggagcttggggtggttggggagggggttgttttgatgggaaagtccttgctgcttgtcagggcagcccccaccgtgttagcgtcctgcttccttgtgtagctgggcccttaaatgtttaggggccagagactttctaattcgatctcaggaagtcctgctgcctgctgtatatacatctttggaaagattgcagggcacagtggtacacacctatagtcccagctacttgggagcctgaggtgggaggatcacttgagcccaagagctggaggctgcaatgaactatgatcacaccactgcactccagcttgggtgacagaatgagacccagtctctctcttttttgagacagagtctcactctgtctcccaggctggagtgcagtggtgcgatctcggctcactgcaacctccacctcttggggttcaagcgaatctcctgcctcagcctccagagtagcggggactacaggtgtgtgccaccacgccaggctaattttttgtattcttagtagagacaggatttcaccgtgttagctgggatggtctcgatctcctcacctcgtgatccgtccgtctcggcctcccaaagtgctgggattacaggcgtgagccactacacctggccaagacctagtctcttttaaaaaatctttggaaagatagtctagaacaggagtccatgcccctgcttgcaagatgcacagacacgcggcagacccatggggagctgtctcctaacacagctaggggtcccatagtaggagaatctgacacgctgaaggggacagctcatttttagaataaatgaaaatacaaataaaagtgaaaacatttagaaattgtttaaattggcccatagagaaattgaccaagtggttaagttggtttaatagagtttgctccaggacaaaactgaatcagctttggtttggttcygactgtagcgtgtgtgttaatgagcatgtttcaacacacatcctggggacaaaaccctggggtcagccatcccacacggctgcattactgcgccacgaatgtgctgctgggtcctggagcttctcctcagctcagaaaccagcactgtgtttctagtttacgaagaaagaagccgagggctttagccagaccttgggctctggagcttctgcacctgaccctttgggcacctgaccgtgcagcttcaagctccagaggcttttggccagtttgggtcagctgccttaagggtcaggtgcccactcctggccatggtgggaagttagaggcgacgggtttgagtgttgccggaagccgctgctctctgaaggactttccttagagggaggcggtggcaggcttgggttgccacgtccattacagatggtatgagaggcttgggagactgggctgcaagacagtgtacacgtagtaggtacacagtaaatacctggggaacaattgactggcttgtattaaggcctcagtgtctcaggcacaccttggcaggccaagggtgggactgggaggagggactgaggggaggatgtcacaagacccattatgcagagtgctgaagaagtacaggctggcggtcataacctggctgtgtgtgtgacctccagcaggccccctctctgagtctcaatgtcttcatctgtaagatggggataacagtgcctacctcttggggttgtcgtggagatcaagtgagatgacaggtagagagatacacacttaggacagagcccaggcatcagcatgcagcactaaygtgggtgcctcccacttgtgatctgccgccttccctgcctgcctcagtgggcctggagggctcctcatcttggcatctgtgccctgctctcaaccctgttctgttgtctcaaaaagaaagttctctcagggcctaagaaggattcaccaaagggagaatctggtgacacaaaaacaaaatgcaggatgtggcccattcctgcagaacccagggagccagagggcatggcctggcgaccagcgctgtcctccccatccgtggcttgggctgctctgactgctgtgactgggccttggtttccaccctggcaaaacaggctgccctctcttccaagctgcagctgaagtgggggctcctcctcctcccccctcagactgagggtcttcttccacgtgcccagcagcattttgcacgtgactcttagggtgcccctggcacccctgtggaggctgtggacaggcttgtggctctcagagggctgttggggagcacaacagtaaacagatctggttccagtccccggggggttcactgttggcaaaggtggccagagctgtccctagagaggggccatggtccatgtgtggtagtttcaccatgtgggctggacacctgaactctatccctgcacagccatctctgctgtctgcaccttcaccattatgtagtcactggtggaaatcccacaaaacagcaaactctgacttggatctgccttaggctgtctgcggacctggtttcagcrctggtgggactgcagccggaggtcagcccagcagagactgcagctggagagggcagtgcaacaccaccaccggcagctgctgctggaggggctggcccggtggaagacgcwccatctgcagtgtgtcaggaagagggtgaggctgacggtggcaactctccaagttctgcctgcctggcaaggggtgtccaggccaggagaccatttctcaggaaggggtctttcctgacagcactccatgcagccrgtatgagtggtgggtggtttggggtcctgtaagacaaagctgcaggagcctttctgggcgtttggtggagcctagcgagtagccagccccagaatccagtgtctcccagggaagacggctcagcggaaaaacccggttcatgctgacccgtggcttatcagtgctgggggacctacagagtgagtcctctaggcggcactccctgcctatgcaggagacccctggcaccatccaggactcctagcaatgggaggacattcagctgggcagaggctgggttagatcaggacccaccccaggctgtctaggctgggtcaggacgccactctctgtgcacttgctctcccccagctcctgcacaggcagagcacccaactgctggcacagagactcagccggacctgcttccgccagtggagacaacaggtgggaacccaggagatgtcccctctgcacttccttctccatcctctggcctgtgaggcctgggcagtgaatgaccttcagcctacacctctagttcagtatttttactatcaccctccccagggccacctcctctaccaccttcctgtcatttccaggcacatcagcttccttccgtctgcagtctgcataagaacagttacttcaaggccagtttctctctctacagtgttgtattaaaaaatacatcagtggaggccgggcgcagtggctcacgcctgtaatcccagcactttgggaggccgaggcaggcggatcatgaggtcaggagatcgagaccatcctggctaacacggtgaaaccccgtctctactaaaaatacaaaaaaaatcagccaggcgtggtggtgggcgcctgtagtcccagctactcgggaggctgaggcaggagaatggcgtgaacctgggaggcagagcttgcagtgagctgagatagcaccactgcactccagcccgggcaacagagcgagactctgtctaaaaaaaaaaaaaaaaaaawatatatatatatatatatatatatatataatcagtgggccgggcatgatggctcacgcctataatcccaggattttgggaggccgaggcaggaggatcacttgagcccagaagttcaagaccagcctgggcaacatagtgagaccccatctctacaaaaacaaaacagaaaaattagctgggtgtaggcagtgcacacctgtggtcccaactactcgggaggctgaggcgggaggattgcttgagcccgggaggtcaaggttgcagtgagctgtgatcatgccactgcacttcagcctggatgagagtgagattccatctcaaaaagaaaaatcagcataatatcttaaaaattaacatgaaatgtgttttaaggctttgctgggatcttgctttttaaaaagccaagagggatcacacagagcagcatccacacgtccccagctccctcttcccgttctgttgtcctgttttcaccattccccggacctcaggccgctgcctccacgcatccccctgcaggagccctttgccaccttctttcatgaaggtcattcctcaggccacagatggagcgtgtgttgagcatctcaccgccaggcacaaggctggcccttcctagtggaggaagtgggagcctcgactagagagggagccaagagggacgagctgggcagggccccgtgatcaccacggcctccttgaaggggctatagggaaatgatctggtctttctggccctagctggcagccaggaggcaggagcagcgggcgacagtgcgggccctgtggttctgggccttctcgctgcaggcaaaggtaattggggctctgcatcctaccatccctgcctctccctcaggccttagccctgccttgggtggagggagggcacctggtctgtgggggagctctaagcagggagacctgggcctcacctcctgycctccctggaggtgtgggccacgtggctggcctttgtactggaaaggaggagaaagaaggcgcggctgcagtgggcgctccaggcctaccaggggcagctcctccaggagggtgccacgcggctcctgcgctttgcagccagcatgaaggcctcccggcagcagctgcaggcccagcagcaggtccaggtaggcccagggccccttcctgtggggagcaggcagggtgtggcatgagctgaccagaggctgtgttgtaggcggctcacagtctccatcgtgccgtccgccgctgtgccacgctctggaaacagaaagtgctgggccggggcgggaagcctcagcccctggcagccatcgcacccagcaggaaagtgacgtttgagggtccccttctcaaccgcattgctgctggggctggggatggcacccttgagaccaagaggccacaggcttctcggcctctgggagctctgggccgcctggctgctgaggagccccacgccctggagctgtgagtagcctgtgctcaccttgtcctcgcttccaccctgggcaaaaggttggatggcatagcagggaggaaaacagccctgacgggatgggacgggctggtcacggccttgtcacagctgagctgctgggaaccccctcttctccagccagatcccatccctcccacggcaagagggagagaatggagtgggatttccaaaccctctctcctttgcctgccaaagctcaggaaataggtgtcccctcctctgcaacaccttcctaccctctctcccgtcctgctgacacgatcttttccggagtcatacacgtagttgacaaagggaacaagctcagctcctacccgtgcctgccggcctctcttctgctccatcacagccaagacactggctttttgtcagaagcccctctttcttgtgtgagctggcacctgtccctctgcccacccctactatggtctcctcaaaccctaacctgccctgccccatgctgatgaagctggtggctcccacagcaaccagcactacccgagagccttgggcctcgggggagatgtcaggtgggtgcatggggcctgggtcccggtccctgctgtgctcctcactgtttgactgaccttgatgggatcctgaacgtctcagaggctgctcccctgtgacatggaccctggcgacctgtacaccagcgtcaccagggttgttctgcaggtcaaaagagacaatgtgggtgaagcagtcccctggcgtcaggtaccttttgtcggaactgctgggagctctatggcccaggcccaccccagcttacttgctgaccttggcctcgcctttcctgactttcagtctccctataaaattggagatcccacagagatctcagacccccctgcagcccctggtcagcccargggaacagaccccatgtttctttccagcaacactgcccactcagcgaggaagcagccgcgacgcccacacttcctgttggagcctgcgcagagccagaggtccctggggtgcagcaccgtgggcaggcagggggagatggtcaggggtccccaaaggcagcgggcacctccatgtggggcctgtgttttggcagccctggggtgggtggccccctttccttcttgttctttggtcccagaggagggtcctgtggcctgaccaggctcttgccttccctgtgctcaggcctcagaagccacaggaacatggcctaggcatggctcagccagcagccccctccctgacgcggcccttcctggcagaggccccgacagcactggtcccacacagccccctgcctggggccctgtcaagcgcccctggcccgaagcagcccccgacrgcaagcacaggcccggagctgctgctgctgcctcyttcctccttcatgccctgcggggcggctgcaccagccagggtacgtcctccaccaccaggcctgggcactggggctctcactctggtctgacttctggtgctttctcatgccacagctgtactagtttctggaaaaccttggcacagggaggccactcatccatttgacaagcataggtagccactgcacaccaggtccaagggccacagcagtgaacagccagccaagggccctgccatcctgaagcttatattctagtcagagacaagcaaagaaaaacccctgcctgcaggccagtaaagtggctgcagatcacgtagggtcctgcaggccacagtgagaagtagcctgggatttgagaagagtaggaagtcggggaagggttttggcagggagcaccatgtcaggtttctgtgcaggctgtggtcaccatgaccacgtggtccaggcaagtagtactggtggcctgggctcagcggttgccacagaggggacaggtactctcttggaggcagatgaggcaggatatgctgctctgagggagttgctgaatgaggggaaagaaggaatccaggctgatgtgggctgctggcttgaataacttgggaaacagagttctttgactggaagaaggaactgggggtggggactggtttggggtgaagtgtcaagagtgttttgaaccaggctcttgatgtcaaayttgagagaaagcaaacgttgagtctgaccttcaaggaagaggtcagggccagagattgagaagaatcttcagcacaggccgaaggtaaccccagagccactgcggcctctaggaggagagtacaggggaaggagagaggggaggaggctccaagcagggagcctgggtggggatggccagggggtgtgagagctcagtaatggaagtgacagctgctctaaggccaccaaagcagctggttcctgaaaggggatgaggggacaggaaggaaccagttcctgtggtgagttaggccatgtggggccacttaccctggctggaatggtttgaatgtgggtttgaaagggttttgwcccctgtccggtgatggaaggggcaagtccactctcaccaggagaggagggcatggaaaaggctgtagagcagtggcctctcactgaccacttctcactgatgtcaaagctcagcaaggtcatgagcttagagcaggtgggggtggagggttgggtaaggcaaggctaggaacagctgctcaggcagtggaggcgtgaggcggactgtggtgacacggggtgctccctggttgcttgcgggactttcccctacagtaccaggccctgtgtgcaggggcaggctagacactgagctggcacggccagtgcctgggaagcccagctcctgcagctgggagcctggtcttccccyacccctgcagggcaggcagtgacraggacttggtgtccccctccctggcttcctcctagcttccttgctcagcatctacccttctttcctttgcaggtgtcagcacagcgggctactcctagggataagcccccggtcccctcatccctggccagtgtccctgacccccatctactccttcctggggacttctcagccaccagggctgggcctggactttcaactgcaggtgtgtacctggggcctgtcagggcagaaagcactcaggccactcccggacctgggacttgctayttaccctggtccccgaggggaaaatagtctgaaacaagcttacttctgtcgccataggcagcctggaccttgaggctgaacttgaggagatccagcagcaactactgcactaccagaccaccaagcagaacctctggtgagccctgcgaaacgccctgcagccctggctacaggagcaggtgttgcctggagaggtgggcaggcagttccatttcccccgagccagctgccagggtcctgtaggtggtctcggtctagccatggaggggtgtggggagccctcagtgtgtgctgtccagaaagaccccatctccaccatggctctctacccggctcrgtgctgcttaggaaggcccaagtcgtcagactcacctgtgcacagaggctctgcttcctatgggggggacgataaagttgagcaaaactctaaaaacccgatgaggccatgctgtccccagtgactaattataacactgatattaaaggtgcagagaagggccaggcgcagtgactcacacctgtcatcccagcactttgagaggctgtgatccaggcagatcacggggttaggagttcaagaccagcctggccaatatggtgaaaccccatctctactaaaaatacaaaaattagccgggcatggtggtgcacgcatgtagtcccaactacttggaaggctgaggcagaagaatcgcttcaacctgggaggcggaggttgcagtgagctgagatcacgccattgcactccagcctgggcaacacagcaacactccatctcaaaaaaaaaaaaaaatgcagaggagacaggcccgtgactcagctgcactcagtggtctggggaccattcaacatgcagcaacctcagagcttccagggcaacagactggcgcctcatccttggctctgcacagggggagagagacaaggagtgtgttcttgcccaggcccacctgagttgctgtctgctggggagggcggaggagactgggagaggaaaaagaacaagtgtttggctcccaagcaggggcctgcagttcaggtcaggggccctaccagaccacctctctccacccgatacccgcatcagaattagctgaggtgcctctccctgagccggatggggctctgccaaggacccagcctggcaggcagtgggtatctccacccctcaggtcctgtcggcggcaagcgagcagcctgcgcaggtggctggagctgaacagagaggagccrgggcctgaggaccaggaagtagagcagcaggtgcagaaagagctggaacaggtgaggccccaggccatccccaggtgtccctggggacrccccgggctgtgctccctctcagccctgcctgtccctccatggccccaggtggaaatgcagatccagctgctggcagaggagctccaggctcagcgccagcccattggcgcctgcgttgcccgcatccaggccctgcggcaggccctgtgctagcgtgttcgcaccaggaacgcaggtgctgggctgtcggggaggcctcaggccacctccaggaacagaacacagttttaagtttgattttttttatttcaaaatgctttgcaattaaatgaattactgttcagaagtctcccacttttcatacaaaaatactrtgctactgatacagttgaaaaaattcaatgatgtctctcctgcaggagaaattcacagcatccccagggtcaacatgaaatctggccctgtccccgccactgggggctccccaggcctgcgttcctgataaactgggacaggttttccaggcaytgaccaactatccaccaagggtcctctgcctccaagacagaccctgaatcaatagcagcaactttcccatatttcatgtagggatatgtggagggggacaggaactctcccatttccccagctgggcctactacctgcctgccctgttcactctggtgccatgaggcaggttcagtgattgattggtcttgcctgctgcagaggacctggccagctccagaagggtcactcatcaggtcctgcaaaggtctgtatcattaatcartgtcatcagtgtcctcasaagacactagcagagtccagggtgatgcgttcagccacaagcacaaaractgctttttctaaagagcaggatgaggtgaatgtgggaacggaaagcagttgtcacgaaggctgtgtggctctgctgggggagaggcatccacagtctgtgccaaggaggcacctcaccctgtgcagcaggagcgttaaggccaaaaaacaaaaggggccaacagaaaacagctcaggtgatggggggaggagcagcaagaaaaaacgacaaccgagaccaactgaaggttcggtcaggaatgcaggctcttccgtctatacagtgtttaaaaagatccaaatgtgactgagatcattccagcctgcactttttatttgtaggcagaaggaacgggataggttgaggggcatgatgggggctctcgccacctcttgtctgcacctctggaacaggtggtagccgaatcattcaagtcctacctggtcagactcccaaccacgctgaggcaggcccttacctggatggcctcatgggcctccctcttgaaaagaccctcactctgtttggaaaagatcccttagcagccataatcaggaaagagactctagagcgagcccagggcttccccaaagcggattttctgtcctgttttcagctggaaattgaagtccttgggggcctcgaagatgagcacgatggtggagcccaggttgaactcgcccaggtgctcgcccttacgcatggggacgccctctctattggtgtgcgtcacgaagctgaagtcattgtaggagcccttgctgtgccttgggctgtttgtgtgcaggtcctgtggtgataggctgggggtcagtggggcccaggccaccaagtgcacagtgtcacccccacatgtgtttggagtcccactccctctgttgcttgtccccaccaccacccaacccagctccaaaagggaggtggggatggcatctcagggccaggtgggcctgctctagccagatctcacacacagccttgacacctgctgtgaactgggcccagggaggacagggaacagtggggcccagtggtctccatgcatggtgctgggagagcagcacccgtgggagccaaggccgttggtcacaaactgacacccaaaaaggcagcccctgggggcagggtgggcagcagacctgcgagtgctgacccctcatgctgtaaccaacatgagccaccccgagctcaacactccctttctgttccctcctcactctcacctttgaccatggttcctagcagaagccaggtgccaggcaaggaggttaattccctccatctcttccagccacttccagccagcagtgcaaggagggagggaagcctcagctggctggcaggtggagcggccattctcaggacagctgctcagcagagccaggcctgaccagagctgtggcctccctagaattcagtcccaacgcatccgccgcacagcagacaaggcaggtagacccaagaggtctggcccttgggctttggcagggcctagatcctgcttacccggtcaaagtagatgcgaatggagcccacgttggtggcccccacagctgtcagtgagaagaagccatgtttccagtcccccgtcaggaccacccgctcgttatggcagaagagctctttgatccagcgagccatgccagggttcactgacatcagggagcctgcagaggcagggaatgccgctactccccgtccagagcccggtgtgtccaccccatggcagccaagacccaaagggactcatggcctgttgccccgatgtcactccaaatgctgagctgactgggccccacggtcccctgcccacaaccagcctgcataaagcagtcaactcctggcctcaatgaccctgatctggagcctggtcccccaacaccaagaagctgagagcctctatatgaagcccacagaggcagctccccccacgctggccccgggctgacctgggaagtggcgccggtgggacacagtccagtcggtgggggagtggaagcagtggtagtccccaggggccaggtagatgacacagtgatagagctcattcccttcccgggtgaccagctggttcttgaaggagtcacacgacgcggctgtggagtaggagcagacgtgggggccaccaacacagtgagcacccagcacggagcccgagtgtggtctgcacatggattctcagggaggccccacatgccagcctcagttccttccccagcattcccctccctcccggtccagccacacagcagcagggctgcctagccccgcctgtgcagtgacccacctggtgggaagggcaggtcctctgtgcacatacgcgggcccaggaacgactccagggagtaggtgaccccctttacctgctccacctcacagttcttcacctgcccaaagttgaggatccttccatccgatgggctaatctggaagggcaggagaggcttgctgccagggagagcagggtctcctccccccaggagacagcccccacctccccttgtcatcctgccccttccagatacgctggagaccaggggggctgtgctggggaggcaggaaaaagtcctgtttcctgcaggaggaaagggtcaggcctcaccacgctgtgcaggccacagacaggccgggcctgcggcttcagcttgcgccggaagaactcgctgaggttgcggtagtgatgcaggtcctccacagcggcctctttcatgttcaccccaaacgtccagatgtacaggctgtagacgggcctgcgcagccagtgtggcagctccacctgattgaggcgaccccaggcccgtgacagcaagcgcgttggcactgacttgtacaaagccacctgcaggccacagggcaaggggctgagttgaccacactgccccagctccagagagcccaagtagtgtcattagcccagctctcacttcaggggagaatctgcaccccacggaggacaccagggcccaggtgccccacgctgcttttgtgatgtggctgtttctcactgggaaccagactgcacctgccacacggagtgctggatttacatacaactccagtggatttcatcatttcatgcaaaagtcaaatagcaactgctccagtcccagaacgggagacgcccagcagtcttacttcttaaagtgggggtcggaaacggatctgatcctaaccacagtgtgtgaccctagccacggtgaccccaatatcacagtgtgtggagaggtggtgggcatcttgcccgtggtcactgcccatatcccagaccaccaaaggaggaggctcccaagtgcatggaacaagtctacagcccaaagtgtgtccctctgtcttaacaggaagaaggaggataccctgagcaccaacagggattttcagatgcaggtctgcgatgtcactgtcacctgggcctgagctgcagacacagggtctgcagcccccacaggtccagccagcactcttgagggcctggatgcagccagtctgagaagcccagccctgctgagccccaccttggccccacggcaggacttgtgttcaacgttctactgtgactgagccaggccataaagccatctgcacctggggttcctcccaggaggcaaagagaagtcatcccctcaggcccctctgttctctcttccttcagggaagcctggagcacctaagacagacgatggcctggggacaagcactgggtcccactagatggtcccagagctctccggcagggccaggtacccaggaaggggcagcctcttaaacttcaggtgctgctgccactgtagaagctgcctgtaattggtggctgctgcttctctaaacacaaccaagacaccaactccccaaggtgtaaaactgatttcattccaactttcaacacctctccaaggtaaggtaagctcccagagagctgctcttatcccttccagctgatgcccagtcacacagaagggctatgtgagcccaggcccttcccaggcacaggtgggagcctgggctaatgtccagggtgcctcagtgcccctgagctctgatgacacccatgtgactgtcaaaggcccaggaacagggtttcctccttggggtcaacctgcctgggaagccaagggcaagagcaagccctctagggaccaggagaggacaagccagttcccttgcccattcctggggcatgcctctgggttccttaagggtgtcctcaccctaagggacccaaacaggatccatccatcctgaaccacccctttggcatcccggaattaatttggcttctgttcaaaatcacctataagctcttttttgcttgaacacagaaaaatcagagacagacaccattttctgaatccccagactgggttccttccagaaccagagccccaaatggcagacatgaggcaggctaggggagtgggcagggcacgacatgccctcgcagtcacccgcggcccaggtagtggccttctcaaaagctgccttggccttgcccaccaatgaaccttccgacccggaccccctgaagatgtagcggtgacctctgcttctgacagctcgccaccacctcagtctctcctgcaccccaacctcaggcctgcccggaagggaggtccgagccacaggggcctgtgcacacttaccctgcttacgggcctccatcccacccggctgagcggtctgagggcgccgaagggcaggaggtagtagaggacggtcaagggccaggagcgcagtttcagagcgggtctggacatgcagctcagctgccccagcctccgcctcagggccagctgggggaagtgcaacctgcagggcacaggtccatgcacagccaggtcagtggccaggctctgggcaggacccaggaggctgccacctgcacccagggcaggattcctcctgtctacccacccttggcaagctgcctctccatgggggtgatggagcccagcaagcactggctgtgccccctcgtcccaaccccattctgattcaggggcttggctgcctctggctagcggactcatttcccaggctctcccacccgccagccagctggggaggactgggaatgtgggggcagccgcaagaggagagtcaggcccagctgcggggcacctctcagctgcagcagctcccagcaagggcctccaggcccaagcacctgggcccaggaaggggagagcagggtgtagggcctgcctcacatccctcagcctccgcagcccaggagagtgggccccaggggccagctctgccacacaggcactggcacggcagcacatagcgctgaggagctacgacccagccagctgggtaaccatttgctgagtcttccgctaccatcctttgcaggatctgggatatccttttcatggttccaggccccccctttcctcatctgctaaattacggggccaaggccagacaagatctcaaagggagcatttacactccgcctaccaccaccacacagctacggctccatccatctgcatggtctttctataacaggccaggttctgaaaacccatccacaggtttgtgaacaaaacctccccaccacaagctctcaagccacctgtctgctctgctggggctgcacagacagacagacacacacacacacacacacacccatcccaagcccctcctttcagcaaaggtggacacacacacacacacacacacacacacacacacacacacacacgaaacccaagcccctcctttctgcatccagcctctctgtgatccggcctctccccaccctcccagcacaaatgcagggcactcagcaggggctcagcttcaccagagccgcagaggctggacgggcctttccaccacaaccctggcctcctgcgcctaaacaaggcccaccccaccctgtctgtgcctaggcctagcaaatgctcctgaggcccagggtagccagcaggagaccacactgccatccactcagaacgtccccaggtctcagtttcctcatctgcaaagtaactgcatttagctaatctacggctgccatctgggactgtgctctcaagagaagctgagtcctctctcccagttgctgagcaaaccaaggaacaaagcagcatctcagc

SEQ ID NO: 94583 - DNA, 55759 bp, Homo sapiens
cttcctgtgtgctgcacacaaataatgttgcaaaccctcattataacactataaattgggtgcatcacccaggctggagtgcagtggcatgatcgtggctcactgcagcctcgatttcctgagctcgggtgatcctcccacctcagcctcccaagtaactgggactacaggtatgcaccatgatgctgggctaatttttctatttgttgtagagatggagtttcaccattttctcaaactccttggctcaagtgatcctcctgcctgagcctcccagagagctgggattactagcttgagatggaacaaggtaaactggtttccacagtggctgcaccattttacattctcatcagcaatgtacaaggattccagtttttcccacatcctctccaatgcttgtcatcttcctttttttttttttttttttggagatggagtcttgctctgtcacccaggctggagagcagtggygcaatctcagctcactgcaacctccgccttctgggttcaagtgattctacggcctcagccacctgagtaactggtattacagttactcggctcactgcaacctctgcctcccaggttcaagcgattctcttgcctcagcctcttgagtagctgatattacagttactcggctcactgcaacctccgcctcccaggttcaagcgattctcttgcctcagcctcctgagtagctgggagtacaggcatgcaccaccacacccagctaatttttgtatttttactagagacagggttttaccatattggccaggcaatctcgaactcctgacctcatgatccgccctccttggcctctcaaaatgctgggattacaggtgtgagccaccgagcccagcccgaccagctaattttgtctctactaaaaagtagagacagggtttcaccatgttggcctggctggtcttgaactcctgacctcaggtgatccacccaccttggccttccaaagtgttgggattacaggtgtgagccactgtgcccagcctaaaatcaaccattttaaagtggacaattcagtgacatttagtacattcacaacgtggtgtaccatttctgtctaattcaggacaaattttatcatctcaaaataaaaccttgttgtgcctatcaggtagttaccaatgtttcccaattttaacagattaagaaatggactaagacaataggaaaagtgctggctgggagccatggctcacacttgtaatcccaactttttgggaggtcgaggtaagaggattacttgagcctaagagttggagaccagcctgggtaacatagtgagaccctcatctctataaaaaatacaaaataagctgagtgtggtggtgtgcacccgtaatcccagctactcgggaggctgaggtgggaggattgcttgagcctgggaggtccaggttgcagtgagccatgattgtgccactgcactctagcctgggtgtcagagcaatatcctgtctcaaaaaaaaaaaaaaaaaaaaagaaaaagaaaaagaaaaaaagtgctaaggacccacaacaaaatttttaatattaaaattaaaaaatgaggctgggtgcgatggctcatgcctgtaatcccaacacttcgggaggccgaggcaggaggatcacttgagcccccgaatttgggatcagcctggccaacatgacgaaaccctgtctctctaaacaaaaatacaaaatttagccaggcgtggtggccagtgcttgtaattgaaggcactggagaggctgaggcaagagaatcgtttgaacccggtaggcggagattgcagtgagccgatatcgcgggccactgcactccagcctgggccacagagtgaaactctgtctcaaaggaaaaaaaggaaaagaatataataataatgaattcagcttggatttataaatataaatgtgttaatataaagacaatagtctttataccaatacggttgtaaaataaaattcttaattttttatggagaaaagggtcagtccactgaggcaaaagtgcttggggctcacgaaagcctcgaagctctgccactaccatccacactgcaaaaatcctttgaaaacaaaattgaggcaagctcgttttttttttttttcttgagacggagtctcgctctgtcgcccaggctggagtgcagtggcgctatctcagctcactgcaagctctgccttccgggtttacgccattctcctgcctcagcctccagagtagctgggactacagacgcccgccaccacgtccggctaatttttttgtatttttagtagagacggggtttcaccgtgttagccaggatggtctcgatctcctgccctcgtgatgcgcacgtctccgcctcccaaagtgctgggattacaggcgtgagccaccgcgcccagccaagcaagctcgttcttaaatgctaggctaattctgccccctagcggccacagagaaatctcagaaattaatgcccccagttgttgagtaattcgcacctaccaggtgccttgaacttacgctgcattattttgtcctcacaattccatgaggttaagtgatatccaaatgtatagataagctgccgaagattcgagtgcttaagtcggtttgttgttgtttttttttgagacggggtctcaaaagacaggatcttacggaagttaatgctgtttcctactgaaggaggcacagcgagcgcaagccttggtgggcaggaagcgtgctttaaagtttgagactgtcaggcccggcgcggtggctcacgcctgtaatcctggcactttgggaggccgaggcgggcagacttgaggtcagcaatttgagaccagtccggctaacatgatgaaaacccgtttctactaaaaattcgaaaattagctgggtgtgtggcacgcctgtagtcccagctactcggaaggctgaggcaggagaatcgcttgaacccgggaggtggaggctgcagtgagccgagatcgcatctctgcactccaacctgggcaacagagtgaggctctgtctcaaaaaataaagttggagacttttattctaaaagcattcagtgagccatttatttatttattttcctgtaagcttggaaaaataggttcttccccacccatctacatgacagtaatgagcaaatatccttatcagataatacatgatttgcaaacattttctttcattctgtgggttgccttttctctctctctctcttttttttaaggcagagtttcactcttgttgcccaggctggagtgcaatggtacgatctcggctcaccacaacctccacctcccatattcaagtgattctcttgcctcagcctcccgagtagatgggattacaggcttgcgccaccacatgcggctaatttttgtatttttactacagacagggtttcaccacgttggccaggctagtctccaactcctgatctcaggtgatctgcccgccttggcctcccaaagtgctggggttacaggcgtgagacaccgcgcccagcgtcttttcactctcttgatagtgttctttgatgcacaaaagttttaatttcgaagtatatctttttgttgtttttgttgttgttgcctgtgcttttaacgtcatatacaagaaatcattgctaaatccaacgtcatgaagatttcccctatgttttcgtctaagagtattatagttttagctcttcagtttacatctctgatccattttgaatgaatttttgtatatggtgtaaggctgcactttactttttgtatatggatattcagttttcccaatgcacttcatttggaaataatttccccccattccctgctggtttactactctcaattggatagtaaaaccaattaaaccaatatgtattttttttttaaatggtgtctcactctgtctcccaggctggagtgcaatggcattatctcagctcactgcaacctccccctcccgggttcaagcaattctcgtacctcagcctctggagtagctgggattacaggcaggcgccactatgcccagctaatttttgtatttttaatagagatggggtttcaccatgttggccaggctggtctcgaactcctgacctcaggtgatccgcccgccttggcctcccaaagtgctgggatcatagggtgagccacggtgcccagcctcttaaaaaaaaaaaaaaagagatggagtctcactatgttgtccaggctggtctcttttttacttcctttttttttttttttttttttttgagacggagtctcactctgtcacccaggctggagtgcaatggcgcgatctcggctcgctgcaagtccgcctcccgggttcacgccatcctcctgcctcagcctccagagtagctgggactacaggcgcccgccaccacgcccggctaattttttttgtatttttagtagagatggggtttcatcgtgttagccaggatggtctcaatctcttgacctcgtgatccgcccacctcggcctcccaaagtgctgagattacaggcgtgagccaccgcgcccggcccaggctggtctcaactccttggctcaagctatcctcccacctcagcctcccagtgagtggggattgcaggcgtgagccactgcgcccggccaaaaccaattctatacatttgtttttttcttttccgacttttgaaaaccatgacaaagggaggtttcttccccccaataccaaacctggtgccttttaagctctctgtaggagctgagtatgccctagttgaacttaagccaactacacagaaatacctgcagggaccagggagcatattcctcctcctgtcaaatgcctggtgaaggcaactgtgattatcagcttagcagatgaaaaagtagggctgcattccttcagttgttggacccaaattctgccagattctgacaaagggcttaaaaggaagaatgtttaggccaggtgcggtggctcacgcttgtaatcccagcattttgagaagccgaggcgggcggatcacgaggtcaggagatcgagaccatcctggctaacatggtgaaaccccgtctctacgaaaaatatatataaaaaaattagccgggcgttgtggcgggcgcctgtagtcccagctactcgggaggctgaggcaggagaatggcgtcaacccgggaggcggagcttgcagtgaatcgagatcgcgccactgcactccagcctgggcgacaatgagagactctgtctcaaaaaaaaaaaaaaagaagaagatgtttaggacatggtttttggagtcagagacgtatgttcaaattctggcttcactattttatagtctttgggcatatgccctttatgtacccttgaagatgttgcttaaccttcctgagcctcaggtacctcatctttaaaatggggataatgtctcgggcctagctgcgagtctctagtcagtgctcagtaaaaagtagcagacatgattgaaaactcgttttcctcttacaattgaagataggaaccttttcaagagcaagcaccaggcaccgaatttaacgactggttgcatttctaggtgatccaagaccgtttgcccccggtctccctggcagcacagcggtaggagataagaatgatatgacaccatgcttgcaaagtgctcacaacacactccggcgcttaaaaaacgagagctgagtcatggatgcccagtttccccatccgtaaaatgagcaagttcgatcacttgaaacgacattcttggatcttggatgactcagattttccaggtacatgaggaaaggcacccagagggaaggaggaggagtggcagtgctgcgaccaagcccaggtttagcgaaacctacagctccactagttcccctacctccgcaggtgccaagcgggttaggtggggagtagccacagggcggagcttagtcggctccgcccccaacccgcgcttttctcattggcccactgaactcgagactcgtgacgccttaagcgtgcgcccagcgtgtgaagggggcgtggcacgctgagaaggagcagacaagatggcgacgtccgtggggcaccgatgtctgggattactgcacggggtcgcgccgtggcggagcaggtatagcagcgcggagagactaccttggggcgtggggcaacctggaccaagctggggtctgaagagagatgtttctgtgtcgcgggctcgctctgaggcgagctcgggtggagacggagccaccttcacctcgagcttaggagcaggtgcgactgctcctgcgtagggcggtccggatttacttagggtgtggcctagaagctcgcgctttgccctttccagctaggtggaagttcacgagggacaaaaatcagatgaaataggctacctgcccgtctcttgagtcgaggcagggctttcagatgttcagatgccattttctcgtgtgttcgttttcgtagaaggaatgatgtcctgtgggaaggacactagattgagtgtcaggcaactttcatttctggatcttagtctttgaagctagagggttaggttaggtaatctcaaaacaatatgttatggggctagagtcttggttacccttgtgacccccagctgttagattcttagaaatgtgggagacttgaggggtcttctgagtccagctgtctctctttggagttaatgagattgaggctccgagagagggagggatttgctcaagttcacctagccagtttgtagcagagccmggacccccatcaaggtaccccctcacgcgacgatctttctctcaggctgcccgccgtgagggcagtggttatacagaaaatagcttagagcatttggagtgtcggaaaatggattaaaatgkagctgtgattcagagtcggctgcctggtgtcatttcaaagagctaagatttgagagatgcgccatacttgtgtgtttcctacagggttcattttgtcagcgttgatcagaggataacctattgttttgggaggagacggacactggatttggactgagagggaacagaaaccatcattggtcttgttatgaaagcgtcactctttcatcattaactgtacagaaatgattatctctcaggagagggctctgcattgtggtggtaactgttagaatttgggcaggagactttgttttcaatgttattaccaggcgtgctgtgtatgagtcaaccctgaattcatttaaagtgtgtcacaggctgggcgcggtggctcacgcctgtaacctcagcactttggtaggccaaggtgggtggatcacttgaggtcaggagttcgagaccagcctggccaatgtggtgaaaccctgtctctactaaaaaatacaaaaattagccgggcatggtggcaggcacctgtaatcccagctacttgggaggctgaggcaggagaattgcttgaacctgggaggcggaggttgcaataagccaagactgcgccgctggagtccagcctgggcgacagagtgagactctgtctcaaaaaaattaaaaataaataaagtgtgtcacgaattgaaaggactaaaatgagactcttaaaaaattgttttttgttgttgttatttgttttggaagtcagagcctcactctgttgcccaagagggagtgcagtggtgtgatgatggctcactgcagcctccacctcctggtctcaagcagttcttccacctcagcctcctgagtagctaggaccacaggtgcacgccaccccgcccagctgcattttttttgggggtgggggtggagacagggtttcaccatgttgcccaggctggtgttgaactcctgggctcaagtgatccacccactttcacctctctaagtgctggcattacagaagtgagccatcgcagtccacctaaaataatttttttaaatgatgagaggaggctgtacctcagtcaccatcattaaaagggaaagaaaaaaagctatgttttagtaccagtgtagatagataaggctagacttagatgcagtgggtgagagagatgaagatttgggtacaataagaaaccttaattttcaaaggtattctatatcaagatagaaatgatattaatacacaaaccaaaaagataacatttctgtgggtttttagtaaaccagtgcctatttgtgagacatgtaaatgaaaaccttatatttcaggtaagtttttcaataactgggtgatgtgtgacaggtgatagataacatcttgggtgataatttagggccatgtttcctaaactcatttgataaaagaatgggctgaatgggctgggatgcttgttagaaatagagattccttgggagtctctctgagcctgctgtagtttgggaggctggctgattaaaaaaaacaaagccgggcacggtggcgcatgcctgtaatcccagcactttgggaggccaaggtgggtggatcatgaggtcaggagatcgagaccagcctggccaacatgctgaaaccccgtctctaacaaaaattagccgggtgtggtggcgtgtgtctgtagtcccaactactcaggaggttgaggcaggagaatctcctgaacccgggaggcggaagttgcagtgagccgagatcacgccactggactccagcttcggcaacagagcaagactccgtctcaaaaaaaaaaagattccagatatgcccccatcctactgccaatttcagattcagtagatataagttggggctctggcaactgtagtttttacaggtgattcttaggttcaggcaagtacggacaatagtacctaggaagtagcttctcgtgcatgacttccatcagaaatatttatggcatccctaccactgcaaaccacactgtcaacggaccatagagaagggagaagagagaagggaaggggagcaaatgaagaaattaaaaacatttgaaataggccttgtcttcaaggaactttactatatacttgtaatacatggtggaatacgggataaagccttcaagaggtctgtccgttctgttttaggagaactttcacagctttagaaagcaagggagacataaggactataggcaaaatgttactactaggggtgatgttaaaaatgtcttaggcctgggcgtggtgtctcatgcctgtaatcccagcattttgggaggctaaggcgggtggattgcatgagctcaggagttcaagaccagcctgggcaacatggcaaaaacccatctgtacaaaaaacacaaaaattagctggtcatagtggtgcatacatgtagtcccagccacctgggaggctgaggtaggaggattgcctgagcccaggaggttgaggctgcagtgagccaagatcatgccactgcactccagcctgggcaacagagtgagaccctgtctcaaaaaaaaaaaaaaaagaaaaagaaaaaatagtgcaactggccaggtgtggtggcttatgtctgtaatctcaacactttgggaggstgaggcaggagaattgcttgagcccaagagttcgagaccaacctgagcaacatagtgagacctcctctccgcaaaaaatggctgggtgcacatctgtggtcccagctacttgggaagctaaggtgggaggttcacttgtgcccaggaggtcgaggctgcagtgagctgtgatttcaccactgcattccagcctgggtgacagagtgagaccctgtctcaaaaaacaaacaaacaarcaaacaaacttataaccaggatgccatggagacagactagtgagagtgaatgctggtcatagatgattgatatgaccatctcagtgtatgtcagctgaatatcaactcttaataataacartctaactaggtgccaggccctgagctaagrttttgcatgattgtcttctaaygaggtgagttttgtttttgcaggtggagaaactgaggcttaagattagttaagaaatttcctaaggtcacacagctgctaagaagtggcagcgctgagatttgagttgcacaggcagactggagtgctcaattgtgggctttaattgcctacttgaaggatgcgatgtagaatgcatgtagaagagacatctgtttgaacccatccattcatctttctggggcatactgtcactattgagattgaaggccagtgagaacacagataaaccccgtgttcatcgaggtatacatacagtaaacaaataactgaatacatgcagaatccattcattttgtgtaataagaaatgccatgaagaaaaagaaagcaagataattaagaagttagtgctcaacagaaagacaaactttgcatgttctcacttatttgtgggagctgtaaattaaaacggttgaactcatggagatagtagaaggatggttaccagaagctggaaagggtagtggggggatgggaagaaatggggatggttaatgggtatcaaaaaaataaaatgggctgggtgcagtggctcacgcctgtaatcccagcactttggaggcccaggcgggtggatcacctgaggtcaggagttcaacaccagcgtggccaacaaaccctgtcactactaaaactacaaaaaaaaattagccgggtgtggtggtgtgctcctgtaatcccagctactcaggaggctgaggtaggagaattccttgaacctgggagtcagaggttgcagtgagctgagattgcgccattgcactccagcctgggcaacagagcaagatgccatctcaaaaaaatatataaaataaaatgaataagacctagtgtttgctagcacaacagggtgactattgtcaaaaataatttaaaattattacatttaaaaataactaaaaggctgggtgcggtggctcacgcctgtaatcccagcactttgggaggctgaggcgggtggatcacgaggtcaggagttcaagatcagtctggccaagaaggtgaaaccccatctctactaaaaatacaaaaaattagccaggcatggtggtgggtgcctgtaatcccagctactcgggaggctgaggcagagaattgcttgaacccaggaggcggaggttgcggtgagctgagatcatgccactgcactccagcctgggcgacagagcaaaactccatctcaaaaaaacaaaacaaaacactaaaagagtataactggattgtttgtaacacaaagcttaaatgcttgaggggatagatatcccatttacctaatgtgattattccatattgcgtgcctgtatcaaactagctcatgtaacacatagatatatatgcctactacatacccagaaaaattttttttaaaaattaagaagttagtgttcaagagggccaactcttgggcatacagtgctcaggaaaaactgcactgaggaggtaacatttgagcagagaactaaatgatgtgggagtgagccacataggagaggggtgtgcccagcatagcaaacagcaaatggaggagtgtggaaaggggcacatgtggtgtggacaaggagcggcaagaggagtgagtgaggaggaagagagggaaagtagctagagatctgagaggctgacaagatgtgggatcttgtctttctgttttgtttatttatttatttatttatttatttatttatttttgagacgcagtcttgctctgtcacccaggctggagtgcagtgtgcgatctcggctccctgcaacctccgtctcccagattcaagcaattcttctgcctcagcgtcctgagtagctgggactataggcaccgaccaccacacctggctaatttttgtatttttagtagagatggagtttcaccatgttggtcaggccggtctcgaactcctgacctcgtgatctgcccaccttggccttccaacgtgctgggagttctcataggcgtcagccaccatgcccggcctttatttttttgtttttttcagacagagtctcgctctgtcatgcccaggctggagtgcagtggtgtgatcttggctcattgcaacctccacctcctgggttcaagcaattctcctgcctcagtctcccaagtagctgggattataggccaccaccatcacacccgtctaattttttgtatttttagtagagacggggtttcaccatattggctggctagttttttgtatttttagtggagacggggttttaccatattggcgaggctggtctcaaactcccgacctcaggtgatccacctgcctcagcctctcaaagtgctgagattacaggcgtgagccactgagcctggccagtggtagttttcattgccttgccagtggattgaatgtggatgatgagaaagaaaggacttaaaaatgagtcctgggctgggtgcagtggctcatgcctgtaatcccaacactttcggaggccaaggtgggtggatcacttgaggtcaggagttcgagcccagcctggccaacatggcgaaaccctgtctctactaaaaaaacacaaaaattagctgggtgtggtggcttgtgcctgtaatcccagctacttgggaggctgaggcagaagaactgcttgaacccaggaggcggaggttgcagtgagttgagatcacgccactgaactccagcctgggtgacggagcgagactgcatctcaaaaacaaaacaaaacaaaacaaaaacgagtcctggcctggtgcagtggctcatgcctgtaatcccagaactttgggaggctgaggtgggaggatcacttgaatccaggagtttgagaccagcctaggccagatggcaagaccttatttatctccacaaatatttaaaaattagctaagtgtgctggtgcacacctgtagtcctagctactcaggaggctgaggtgagaggatgccttgagcccagaaatttgaggcagcggtgagctatgatcatgccactgcacttgagcctgggcagcaaagcgagaccccatctctgggaaaaaaaaaaaaagggggttgtacctgagtggctggatgaacggtggtacctttttttgacctgttgtgttaattatagtaatgttggtactgtaacagataaactccagcattctcagtggcttaacaccgtagaagtttctcactcttgtaaagctgcattgggtgttcctgattggcagggcagctgttctccaagcaatgttcagggacccagtctcctgccgtcttttttttttttttttttttttttggagatagagtcttgctctgttacccaggctggagtgcaatggcgtgatctcggctcactgcaacctctgcctcccaggttcaagcaattctcctgcctcagcctccccagtagctgggattacaggggcacaccaccacgcccatctaattttttggattttagtagctactgggttttaccgtgttgcccaggctggtctcaaactcctgagctcaggcaattcctccaccttggcctcccaaagtattaggattacaggtgtgagccaccacgcctggccttcctgccatctttaatacttcccacagtcggcatgtttgtctgcatcaagctggctggtgggggtaagcttggaggtgaatgcctgggaagcccgaatgatcctcagatttcattggttcacacttagtctcatggccacaccttgctgcacaggaggctgggaaatttagtctaacaggtgtccagaagaggaagtgcatttggtaaacatctggctagtctctcctatggatagagaactcgggcaggagcagattgaaggtgagttagagagggtcgggaatcctgtcttctacagactcagtttgagaggactcaaaatggggccattgggtagctggcccctggaggagcaatgaaggagtcatcagtggatggttctttaaagccatgggactggataagcatctctggggagagtttataggtagagaagagatctgaaccctgggcatggcaagaatccacagttaggaagcaaaggagaattcacaaatagagactgagaagaaaccagagaaataggaaaaaaatcacggtcccaaaagcccagtgaagagtgtttcaaggagagaaggatcaactgtgtcatgctgctgagacgtcaagtaagatgagacctcagatatgtgtgtgcattggtgttggcaacatgcaggttgttggtgaccttgatgaggtggtgtgataggaacaaaaccttactgagtgggactaagagaggctgagaggtgaggaagtggtaacagtgagtggagagctctttttaggcttggaatgaaggagagcagaaaagtagggaggaccaaagaatgatagcatggtagacagtgtttgtgtaagactgaagaaatgacagcattcatatgaaaatcgggacgatcccgtaataagattctcctgcctcagcctcctgagtagctggtactacagcgtgtgtgccaccacacctggctaatttttgtatttttagtggaaatggggtttcaccatgttggccaggctggtctcgaactcctgacctcaagtgatccacccgccttggcctcccaaagtgctggaattacagtcatgagccaccatgctcagctaggtgtttataagtcaaggaagttttatgtgaaaaaagggaagtacctaaatctgatgtaccaaactgatataatgaagcatttcccagtatttgttccagcagctgggactacagcggtggacaaaaagctgagctgtttgttcttgggcagggttcctgagggggaagatggatatgcaaaacaaaccacctgagtgccctgtgtccagttacggtggatacataaatgatcatctcccattcctatttcctcctgtcagacaaagccttgttaatcattgtgcaaacattctttcagttaggggtttttcagtattctggaaaacacaatgcggcaatgtacagaacacaacaatttatccttcagtccgtttttgcacttctcgttaaaattctgtttagaaagcagggttttaggctttttgctgtggcagtgggagtatccagtctaagaaatgaacattgttcagaactgaaagaactttcatatactgaaatatacccttcattgtgttaatagctgtctggccttgggggtggtgctcgtcatggtaagatgctttttctccttgtttgcctataggagaatcagattcatcatgttagctacaatagtgctatgctgcaaggtgggtgtggtttttttttttttttttttttaaggtagggtcctactctgtcacccagcctggagtacagtagcgtgttttcggctcactgtaacctctgcctcctgggttcaggcgatcctcccacttcaactttttggttaggtaggactacaggcacatgccaccatgcccggctaatttttgtattttttgtacagatggggtttcaccatgttgcccaggctggtcttgaactcctgggctcaagcaatcctcccacctcagcctcccacagtgccaggattatagttgtgaaccacaatgcccagcctggcaaggggggtgtttgttttgttttgttttgtgattctcctgcctcagcctcccgagtagctggtactacagcatgtgtgccaccgcgcccggctaatttttgtatttttagtagagacggggttgcaccatgttggccaggctggtctcgaactcctgacctcaagtgatccacccacctcggcctcccaaagtgctgggattccaggcgtgagccatcatgtgctcagccaggtgtttgtaaggcaaggaaattttatgtgaaaaaaggaaagtacctaaatctgataacatttgtaggatatctatacaagacataacttgggccaagtgctgtggctcacatctgtaatcccagcactttggcgggccgaggcaggtggatcacttgaggtcaggagtttgaggccagcctggccaacgtggtgaaactctgtctctactaaaaatacgaaattagtcaggtgcagtggcatgcgcctgtaattccaggtactcaggaggctgaggcatgacaatcgcttgaacccgggaggtggaggttgcagtgagccaaaatccgctccagcctgggtaacagagtgagactctgtcacagacacacacacacacacaaaagacataactaaatatccacgaaagtaaatattatagtgtgaaagtaataaatgcaattctatttttcacaaaaatatcaatttaaacatttataatagagtgaattattctatcataaagggttccaaggaaaaaaatgtttattgactcggatacagttttttaactttagatttcaggtcagtatttggtgaaactgaagtgatatctgaactgaaagtgagatatttcctctttgattaaggggaaactcaactaaaaactcattaatgctttgcttgctggcatagtcatttattgccactgggaatatgtcttatttcttcaggcaaagatgaaacaaagaagagaaagtaactgaaccagaatagtattttcctttttttttgagacggagttttgctcttgttgcccagggtggagtgcaatgtcacgatctcagctcatctcaacctctgcctcccgggttcaagtgattctcctgcctcagcctcccaagtagctgggattacaggcatgtgccaccacacccagctaattttgtatttttagtagagatggggtttctccatgttggtcaggctggtctcgaactcccaacctcaggtgatctgcccgcctcggcctcccaaaaaaaacccaaaaagcctttttattgggaaatagtttcaggcttacagaaagttatagaaatagtacatagaattcccaaataccttttacctagattcctcaaatgtcagccctatttgctttatcatcttccatctctgtttatatgtatatgtgtgtgtatacatatacattcttttcctgagacacttgagagcaatttgccaacttgatgaccttttgcttttaagcccttttctaggctgggcctggtggctcatgcctgtaatcccagcactttgggaggctgaggctggtggatcacatgagatcaggagtttgagaccagcctggccaacatggtgaaaactcatctctactaaaaatactaaagttagccaggtgtggtggcgggtgcctgtaatcccagctactagggaggctgaggcagaagaatcacttgagcccgggaggcagaggttggagtgagccaagattgcggcactgcactctagcctgggtgacagagcaagtctctgtctcaagaatgaatgaatgaattaataaataaataaatatttcagtccttcccctacaaggacattttcttatctacagtacagttgtcaaaaccaagacatttacattgctacaatattgttattgagtgtttaaattttgccgattaatccagtaattttaattttaagaataatatttaatggttcatttttgcttggttatagcctccatccctgtgagatcactgccctgagccaatccctacagcccttacggaagctgccttttagagcctttcgcacaggtaaggagcaattagagatggtggtgaccctctctctgcctcagtttggtcatctgtaaattgggataaacatagggttgttgttagagttaaatgagttagtatgtggaaagtacctggcatgcagttatcactgaagcgttaggttttctttttctttttttttttttttgagacagtcttgctctgtcgcccaggctggaatgcaatgatgcaatctcggcttactaaacctccacctcctgggtttaagcaattctcattctccaagtagctgggacacagatgtgcaccaccacgcctggctaatttttattgttaatttttgttgtttttttaatatttcaaagactgtgtgcatactggctaatttgtgtatttttagtagagatgaagttttgctatgatgcccaggctggtctcaaactcctggcctcaagtgatctgccgaccttggcctcccaaagtgttggcattacaggcctgagccaccgtgcccggcctcattatgtctttttgattatagccattccgatgggtgtgaaggggtctcattgtggttttgatttgcatttccctgattactaataatgttgtattagtttgctagggctgctgtaacaaagcaacacaaactgggttgcttgaacagcagacatttgyctcatgattctagggctaaatgtctgagatcaaggtgtcagggttgcttcctttggagggctgtgagggagaatctgttccatgcctcttgcctagcttccaatgttttgctggcaatctctggcattccttacatatagaagcatcactccaatctctgccttcagcttcacctggtattctccatgtgtgcatgtctgtttctagattttccctttttataaggacacccatcatattggatttggacacaccttggcaacctcattttattttatttatttatttacttatttatttttttgagatggagtctcgctctgtcgcccaggctgagtgcagtggtgggatctcggctcactgcaagctccgcatcctgggttcatgtcattctcctgcctcagcctcccgagtagctggggctacaggcacccaccaccatgcctggctaattttttgtatttttagtagagacggggtttcaccgtgttagccaggatggtcccgatctcctgacctcgtgatccgcctgcctcggcctcccaaagtcctgggattacaggcctgagccaccatgcccagcctgcaacctcattttaacttgataatctctgtaaagaccctctctccagccaactaagggcaccttctaaggtactcagggttagaacttcaacataagagttttgggggagttttcagcaatttaacgcrtaacagatatttagcctctgtcttttcttgtgcttattggccaatgtatttttcctttggacaaaggtctattcaaatcctttgcacattttgattgattgattgagagagtctcactctgttgcccaggctggagtgcagtggcgtgatcatagctcactgtaaccttgaactcctgggttcaagcaatcctcccacctcagcctacctagtagctgggactataggtgcaagccgctgtgcctggctatttgtctttttattgttgacctgtaagagtttatgagattttgcatttgagagagaataccagtgcctgatcaaaattgggcctgcattataaaagcaagatcaaagagccctgggtgagaaatggtgtttggcttcaagttctggacctgttggtgaccacctgggcaaccttgattagtttcttgacctctttgcgattcagtgttttcatctattaatacattttgtgactgcggtggcagttgaggtgcattgtaattctataggaaagatgcctgtcctgtacgtactgacagaatttggagacaggagggtctgagtagtggcccaaggttgcacctgcctgctagatatgttgagggtccagtcacctctactgagggcttcttttttttttttttttgaaatggagtctcgctctgttacctaggctggagtgcagtggtgcagtctcggctcactgcaagctccgcctcccaggttcacgccattctgcctcagcctcccgagtagctgggactacaggcgcccgccactgtgcccggctaagttttctttttgtatttttagtagagacggggtttcaccgtggtctcgatctcctgacctcgtgatccgcctgcctcggcctcccaaagtgctgagattacaggcgtgagccatgtgcctggtcccctactgagggcttctgaggtgcgctgacttttcctgaccctcctgttggtgctgtgtttgcatgactcttccctattcctgtctctcaggcttgaaattgtcctgttttttattacagatgccagaaaaatccacactgcccctgcccgaaccatgttcctgctgcgtcccctgcccattctgttggtgacaggcggcgggtatgcagggtaccrgcagtatgagaagtacagggagcgagagctggagaagctgggattggagattccacccaaacttgctggtcactgggaggtaggaatgaggtggaactgccttgggttctcgtccagcaaactttgtctgtcacttttccagttgttccaaagttgaaatgtttgaacaagtcaaatatgctttcttggaactcatgtctccagtaggttttggccagatacaggagttataactttggtgtcaagtcaagcttgtcttctgttgccagaccttaccctggtctccccaagggttctgagtagaaatttcttgctgttgaagtctcagagtgtatgtcttgaattggtgctgacatcctggctgttctgctattcttgcccttgttagtcagaagagggctgaaactattgagcttttgtgatgtggattagttctcaccaggaaccagacagaaataatcaaattcctttgtcattattgctcaaaatgcttccttccatcatagtcacacgataggggcagcctgcattgttatggaatgcacgatacgtaatgaaacatcttgttcatctgtgcttcccatgtcccaggatgattcctgacttagaggagacattcagtaaattgtgaaactgaatataaaggtgtaagtttaacaattgccttttttttgcagccataatttaacaaataaaaaatctgaaatatcaaaggaccagtaataggtcttaatattctgggcaaaagagggggtgacagttgaggctttgtgatatctggaatgcagtggtgatccactccattttgctaatccagatcagctgaatctattctaataggacatacggtgactggggcattaggatgctgaaggcaagtctcaaccatgctccgcagtagctgtgtgaactgggacatgtcactttctgtctggtcttgtgtctttaacagtaaaacagcaggttgggttcgaacatgactctgagattccatccagctctaacagtttatctaggagtatttgctgccattggcattacatgctacattataggtttccttccaaaatccttttttggactttaattttgaccattttcttccaatagaatctagtatacagacttcacttgatttctaacagtcctgtaaaaccgtgacttagtcaactggccatacagatccagctatgggagttaccctaagagatacctgtctgctcttgccctgtatgtccatgtgcctaccctttggcctgttcgtacgccttgggctttgtaataacctaccttaaacaaaaaaaaaagttttccggtactatatcacaaattccttttggtgaagggtaattatgtagtaggtgagtcacactttcaaagtatgctgccctctgttccctgtggcgttgctggtttcccctgtaaacatcattttccattagattagtagattagtaaagtacttgtaaagtgtaggtagcacgtgactgtgactgcatgacccccctcaagtgttaaacccaagctgacatctttctgaccttggggatttttgaggctgactcaccctgtgatgagcttgcatgctttcaagaaattcccacacacttcaaaggtttcccaaaagaatataaatttggaagaaacctgccacttccaaaatcataaaagaccaacgccagtagttttttagtatctgctgtttatgtaattggagttattgccatacatagtttcagacctggaagatggttgtaaagaggacagggttgattaactcataagtcccagggcctggaaagtgacaggacactggagtasagtggcctaatgcagtgtgagatctcaaagcacctattggtaaagaactgggcttaagttagatactcttcttgattgaataaaatggtcacagaaccactccttgatgttctttttctttttttgtagatatgaggtcttgctctgttgcccaggctggtctcaaactcctgggctcaagcgaccctcctgcctcagcctcccaaagtgctgggattacaggtgtgagccactgtaccggccactcctggattttcaagtgggactccaacacttcattttatgagggggaaatggtctggacttggagttgacattggagtttgagtatcccttatccaaaatgcttgggactggaagtgttttggatttttttttggatttttcaatatttgtatatatatatatactgagataacttggggatgtgacccaagtctgaacacaaaatttatttattttattttatttgttttgtttttcttttctttttttttttttttrgayggagtctcactctgttgcccaggctggaaggcaatggcgcaatcttggctcactgcaacctccgcctccccggttcaagcgtctcccacctcagccttcccagtagatgggattacaggcacctgccgttatgcccagctaatttttatatttttgtagagacagggtttcactggccgggcgcggtggctcatgtctataatcccagcactttgggaggctgaggcgggtggatcacctgaggtcaggagttcgagacaagcctggccaacatggtgaaaccccgcctctactaaaactaaaaaaaaaaaaagagacagggtttcaccatgttggccaggctgctctcgaactcctgacctcaggtgatccgcccacctcggcctcccaaagtgtgtggattataggtgtgcgccactgcgcccggccaatttatttatttatttgaggcagggccttgctctgtcacctagggctggagtacagtggcatgatcacggctcactgcatccctgacctcctaggctcaagccatcctcccacctcagccttctggagtagctgggaatataagcgtgtaccatcctacctggctaatttgtttgaatttttgtggaaacaggggtctcatttatgttttagatataccttctacacatagcctgcgggtaactttatataatactttaaataattttcttcatgaaacaaagtttttttcttttttttttgagacggagtctcactctgtcacccaggctggaatgcagtggcatgatctcrgctcactgcaagctccacccttgggttcaagcgattctcctgcctcagcctcccaagtagctgggattacaggtgcctattactgcgccagctaatttttgtatttttagtagagacaggggttcaccctcttggccaggctggtcttgaacttgtgacctcatgatccacccgcctcggcctccgaaagtgctaggattacaggcgtgagccaccatgcccggccaaaacaaagttttgactgtgacctgtcacatgacatcagatgtggaattttccacttgttggtgtcatgtcagcactcaaaaagtctctgattttggatgttcagattagggatactcaactatatacgttttcaggaatggcaacaggttaagaagggagagtgttgaatggctgtctggggcctggtcctaatcccacctctggttccacctaatcactgtcatcacaaatgaaaaatgtgagattttccaaatgtagctgatatcagaattgttggggagctttaaaaattatgaatttgaggctgggcgtggtggctcatgcctgtaatcccagcactttgggaggccgaggcgggcggatcacgaggtcaggagatcgagaccatcctggttaacatggtgaaaccccatctctactaaaaatacaaaaaattagccaggcatggtggcgggcgcctgtaatcccagctacttgggaggctgaggcaggagaatggcgtgaacccgggaggtggaggttgcagtgagctgagatcatgccactgcactccagcctgggtgacagagtgaagactccatctcaaaaaaaaaaaaaagaaaaaattatgaatttgaattccttaactcctagaaatctacaaagtttgggctaggtgcaagatctgtgttttccaggagccctgtaggtgattctgatgataagccagcttgaagaaccaaaggcagatgagccctacctaatgttcccttcagggctacagttttttgtttttgtttttgtttttttttttgagacggagactcgccctgtcacccaggctggagtgcagtggcgcaatctcggctcactgcaacctctgcctcttgggttcaagccattctcctgcctcagcctcctgagtagctgggattacaagtgcccgccaccaggcctggctaattttttgtatttttagtagagacggggtttcaccgtgttaaccaggatagtctcgatctcctgacttcgtgatctgcctgccttggcctcccaaagtgctgggattacaggcatgagccaccatgcacagccactaatttttgtatttttttgtagagatggggtttcaccatgttgcccagggtggttttgaactccttagctcaagtgattcacccaccttggcctcccaaagtgctagaattacaggcatgagccactgtgccgggccagttttaggtttttgttttgttttgtttttcagagacagggtcttgctgtgctaaggctggagagtagtggtgtgatcatatcttgctacagccttgaactcctgggttcacatgtttctttcaccttagccttcccagtagtggactgtaggtatgtgccacttcgccagggtagttttatatttaagtcttttatccattttgaattaatttttatttacggtataagagaagaatccaacgtcattattttgcatgtgggtatccagttttcccagcatcatttgttgaaaagattatcctttctctattgaatggtcttggcatgcttgtagaaatcagtcttactccctgttaaatgacggagatgaatatagcaaacactatgacagaatgttggaaaacaggggacatgatgattcccacgccttcttgccatgtgactgtgattgcttaatcatgcgctttgttttttatgcattcacttcctgtctttattttcttttttttttttttttgagatggcattttgctcttgttgcccaggctggagtgcagtggcacaatctctgctcactgcaacttccgcctcccgggttcaagcaattttcctgcttcagcctcccaagtaggtaggattacaggtgtgtgccaccacgcctggctaatttagtatttttagtagagacggggatgctccatgttggtcaagctggtctcgaactcccgacctcaggtgatccgcccgcctcagcctcccaaagtgctgggattacaggtgtgagccaccacgcccggctttttttctttctttttttttttttttgaaactgagtctcgctctgtctcccaggctggagtccagtggcgtgatcttcgctcactgcaacctctgcctcccgggttcaagtgattcccctgcctcagtctcccaagcagccgggactacaggtgcgcgcaccaccacgcccagctaatttttgtatttttagtagagatggggtttcaccgtgttggccaggatgctctcaatttcctgaccttgtgatccacctgccttgggcccccaaagtgctgggattacaggtgtgagctaccacacctgtccttttttctgtatttttaaattgattcagctgtttgtttgttttttgtttttcttttttgaggcaggctcttgctgtgttgcccagactggagtgcagtggcacagtcacagctcactgtagccttaaccttccgagtttaagcagtcctctcacctcagcctcccaagtagctgggacatggtgcacaggcatgcaccaccaccacactcagctaattttttattttttgtagagatggggtctcactatgttgcctaggctggtctcaagcgatcctcccaccttggcctcccaaagtgctgggattccaggtgtgagccaccctggagccactcttggctcttcctcagtggtgacaggcgcccaggtcctgaagtctctggttgccactgaggctttaccacctcagttgattctggtatactggtggtctttgccaccatgaataatgttgcagagcatacctttgcacataaagccttttcctcatgatgaaagcctacgtgtaggattgctgcctgaaagggtatggacacctttatggtttgtggcatgcatttggcttctaaaacaatcggagtgtttcccccttatccaaggtttcatgttcctgcagtctgaaaatattaaatgtaaatttccagaaataattcctaagtttttaaattttatcattattattattattttttgagatggcgtctcactctgtcgcccaggctggagtgcagtggcgcgatctcagctcactgcaacctgcgcctcccgggttcaagcagttctcctgcctcagcctcccgagtagctgggattacaggcttgtggcaccacacctggctaatttttttgtgtgtttttagtagagatcgggtttcaccattgttggccaggctgttcttgaactcttgacctcaggtgatctgcccacctcagcctcccaaagctgggattacaggtgtgagccaccrcacctggccacaattcctaagtttcaaatgtctccctgttctgagtagcataatgaactctctctctcccacctaggatatgaatcctccctctgtccattgtgacctcagtgtctatgctgcctgcccataagtcacttagtagccatctcagttaccgtatcagctgtcgtggtattctggtgcttgtgttcaggtcacccttatttggcttaacactggccccaaagtgcaataatagcaattctggcaatttggattgccgaagagaaagtggtaaagtgccttctttaagtgaaaatgtgaaagttctggacttcaaaaggaaagaaaaaaaatcatatgctgattttgataagatctatggtaagagtgaatcttttatccgttagttgagcatgatgtcgaggtgggtggatcacctgaggtcaggagttaagaccagcccgaccaacatggtggaacccctcttctactaaatacaaaaaattagccgggagtggtggtgcatacttgtaatcccagctacttgggaggctgaggcaggagaatcgcttgaacccaggaggtggaggttgcagtgagccgagattgcgccattgcactccagcctgggcagcaagagtgaaactccatctcaaaaaaaaaaaaaaaaaaaaaaaacaccgggtgtggtggctcatgcctgtaatcccagcactttgggaggccgaggcgggtggatcacctgaggtcaggagttcaagaccagcctggcccacatggtgaaaccttgtctctactaaaaatacaaaaattagccaggcgtggcggcaggcacctgtaatccctgctactygggaggctgaggtgggagaattgcttgaacccaggaggcagaggttgcagtgagccgagatcgtgccattgtactccagcctggttgacagagcgagactccgtctcaaaaaaaaaaaaaaaaaaaaaaaacaaccaaaccgaaacaaaaaggatgtttttattttaagtttttatttcacagaatgatgtctctagaaagggtagcttgaggcctggagtggtggctcatgcctgtaatcccagcactttgggagactgaggtggcggatcacttgagctcaggagtttgagaccaatccgcgcaacgtggtgaaacctcatctctgctcaaaatacaaaaatcaaccggtgtggtggcatgggcctgtggtcccagctacttgggaggctgaggtgggaggattgcttgagccaggaggtagaggttgcagtgagttgagattgtgccactgcactccagccggggtgacagagcaagactctgtctcaaaaaaaaaaaaaaaaagtagcttgaaatcgtgttctggaaagctgcttgctgagctgctcaggttgaagacccagagtgttccttttagttccatttagccccgtcgcgtggagtgtgcgcagcttgaataatgctttttggcttccagagtgctattcccttgagtccctgattcaacctgtggcccatcagtgggcagaggtgattttctgcagggtaccaagggcactcttgaaggcaggagctcagggactgctgagaagtagaagagccgcttctctgagtttcttttcaggaactcatgatgtcctgggaacattcttggttcttggcctgagtgttcacttgggttccacaggtgtggcttgtggctttggctgttgacatagaggcctgtgctcagagccgcggtgagtgagcacagacagagggtgggtggctaccaggtacagatctgtagtttatggatccatagtttatactgctgcagtggtcatatgtcctgcctttgtgtggcggttgtgatttcagatatgctgcctatttgtccccaaaagtcataaaaaaaatcattcagcaatcatgtcatattgcctgtttcctcttttcctgaaattgacaaatactgttttagattatatctcaaatttttggttacaaaacatctaattgaaaatatacactttcagctaggcatggtggctcatgcctgtgatcccaacactttgggaggctgaggtgggaagattgcttgagcccaggagttcatgaccagcctggcaaggcaagactctgtctctacaaaaaaatacattaaaaaattagccagcctggccaacatggtgaaaccccgtctctactaaaaatgcaaaaacatttgctgggtgtggtggcgggcgcctgtaatcctagctaatttggaggctgagacaggagaatcacttgaacccagcaggcggaggttgcagtgagccgagactgcgccattgcactccagcctggtcaatgaaactctgtctcaaaaaaaaaaaaaagaaaaaggaaaagaaaaattagccaggggtggtggtgtgtgtgcctgtggtccctgttacctgagaggctgagacaggagaatcgcttgaacctgggaggcggaggttgcagtgagctgagatcatgccactgcactccagcctggtgacagagcgagacgctgtctcagggggaaaaaaaggaaaaaaaagacaggctctcactctgtcatccagtctggagtgcagtggtgtgagcagggctcaccacggcctcgacctcccaggctcaggtgatcctcccacctcagctgaaactgcgccattgcactccagcctaggcaataagaacgaaactctatctcaaaaaaaaaaaaaaagaaagaaaaaaaaaatggaaaagaaaagaaaaatcagccaggggtggtggtgtgtgcctctggtcccagctgcctgagaggctgaggcaggaagatctcttgagcccaggagtttgagagcagcctgggcaacatagcaaaaccatgcctctacaaagaaaaaaccattagctagtagtagagacagaactggtttttgtggcagaggctagggaaggatgggggcagatctctgaggggaggagtggcctgcgggtgtccttactacccgttttgcctctcttggggcagctgtgtcatttcctctctgccggtcttcttggccaacaagcgtttctccctcttccctgttctccccacttccccacttcatcccccttcatccccccttcctcgcccctccacagacccagggcatttggtggacacttttgcttgcagttaggtcaagtggaggtgagtttcccatggggcaggggcttgacagcaggggtggccgtccagactctccagaagggacgtggggctgctgttgtgactggacctgccccacatctttgggcctgagctgtgcccggtcacagcgtcctgagttcctttgtgttgcctctgccccgtggatctaggtcttgggggagggctggtttcatcctggggctaccaccacctggcagcagccccacagccaagggcaggcacagccaaaatacatctgcctgagtggccacagagcagggccaggctctcctggcccagtggtttggaggacagagggcctggcccgaggggaggcacttgctcagcctgcggctcccacgccaaaggcagggcggcctctgggtctgtctggggccgagccttatttctggaagcacatggatcctccttccttgccactcagtctaaatgtttaggttacaaacattctgagtgagaaatttcagtcagagcttgtaatgtgtaggacgtgacattagggagtgaagagctttcctcttcactgattcaagatagccagtgccgggtgaggggagcgggacacttgcttcttcagaagagtggatccaaaagttgacctcttccccagactgagtcagcatgggaagagaattgtgctttcacaaaagcagagatgcttttctgtagctttcactgtttcttctttgctctggaaaatggaggacgaaggagttctcaggtcctcagtcactggagtaaagtgacatgcacgtcccagcgtgagtgcctgaatgggtctctcaggtctgaacagaacagccctgtggctgccgcgagctggtgcaggaggaagtacagaggagggtccggttcagagtggcgtgagaccagggttagatgactgttgccagtttagggccagtgagagatttttaatggtaaatatgtaacctcttttaaaaaaaaacaaaaacaaacaaaaaacacaactttttcttttttgagagagtcttgctctgttgcccaggctggagtgtagcggtgtgatcacagcttactgcagcctcaacctcccaggctcaagcgatcctcccacctcagcctgctgagtagctggaattactggcgtgcaccaccatgcccggctaatttttctatatatatatatatatatatatatatatatatatatatatattttttttttttttttttttttaatttatttattattatttttttttgtagagttttgccgtgttgcccaggcaggtctcaacctcctgggctcaagtgatatagctgccttggcctcccaaagtgttgaaattataggcgtgagctactgcgcccaacgaatatgtaatctttttaaaaaaagggaaaaggttgggcgcggtggctcacacctgtaatcccagcactttgggagaccgagatgggtggatcacgaggtcaggagttcaagaccagcctggccaacatggtgaaaccccgtctctactaaaaatacaaaaattaggctgggcgtggtggctcatgcctgtaatcccagcactttgggaggctgaggtgggcagatcacaaggtcaggagatcgagaccatcctggctaacacgttgaaaccccgtctctactaaaaaaaatacaaaaaattagccgggcgtggtggcgggcgcctgtagtcccagctacttgggaggctgaggcaggagaatggtgtgaacctgggaggcagagcttgcagtgagccgagatcgtgccactgcactccagactgggagagagagtgagactccatctcaaaaacaaaaaaaaacaaaacccagaaattakctgggcgtggtggcgggtgcctgtaatcccagctacttgggaggctgaggcaggagaatcgcttgaacccggaaggtggttttattgttttgaggcatggccctgggggcttgtggcaagggctgaggtgtttggggagcagcagtgcaggaaaggccttactcagctgggcttgcaggtatgctcactcctgtctgagcgctgcttccttgtttctagcctccgtttagaatwaaaaaaaaatgtatagtacagtattccaattcatcaaaaggaataaagacagatcagcctgtctggtctaccaccattcagcctaagcataaggcagaaccctgtgaagtggcctgtgtcctccttctctccctgtccccttcctggagccccatgggcctgtgctcagcacgcgtcctggcgccgcggtgtacctggtagtgggcagtatcggacgtgttctccatgttggtgagcgatgtacatgctgtagctttattattctcatctataaatagggccattcatgccctcataaagttgttaaataagagtgatgtgtatgtaaatacctggccccatgctggcagggagtggagctttagtactattttacttcttacctaataggtgtgagtgtggaaatgggcaaatagtcaagttggcagggaagcagagcctcctgcctgccccagtgccacctgaactcctgtagtgttcttatgccactggaactggctggcaggggccagctctgacctcagagaattgtgggctcactctagggcaggaggagatcgcagagggcggaacggtggctcatacagccatgcccccaggtggcccaggacccacctgggagctacctccaatggctttgagcggtcagtgtgtggacaagcggagggaccgtgtctcaagaatatgtggaactcagcggggcatggtggctgacgcccgtaatcccagcactttgggaggcaggcagatcacctgaggtcaggagtttgagatgagcctggccaacatggtgaaaccccatctctactaaaaatacaaaaattagcccagtgtggtggcaggtacctgtagtcccagctacttgggaggctgaggcatgagaattgcttgaacccgggaggcagaggttgtggtgagccaagatcattccactgcactccagcctgggggatagagtcagactctgtctccaaaaaaaagacatggaacttaaacacaaggctaaacttctgggctggaaggaatcgagggatggccgactcaagatacctgcagccctgcatgaagctgtctgccaggaggctctacctaaaagcagttttgttttgttttgttttgttttttgagacggagttttactcttgttgcccagactggagtgcaatggcacgatctcaattcattgcaacctccacctcccaggttcaagcgattctcatgcctcagcctcctgagtagctgggattacacgtgcgtgccaccacacctgagtaattttgtatttttagtagagacagggtttcaccatgttggccaggctggtcttgaactcttgacctcaggtgatccgcccacctcagcctcccaaagtgttgggattacaggcatgagtcaccgtgccaggcctaaaagcactttttctttttctttttctattttttttttttttttttttttgagatggagtcttgctctgtcacccaggctgaatgcagtggcaatctcagctcactgcaacctctgcttcctaggttcaagcgattctcccacctcagcctcccgagtagctgggattacaggcgtgcaccaccacacctggctaatttttgtatgtttagtaaagatggggtttcaccatgttggccaggctggtgttgaacttctcacctcaggtgatctgcccaccttgacctcccaaagtgctgggattacagacactaagtcaccacgtctggcctaaagcactttttctgaattccaccccagtctgcccttcctgagtgcctgggcagggcccttggggagctgctggtggggctctgaatgtgccaggggtatccgggacatcttgcaggctagtgggactgccaaaaacgattctcaaagatgagtggggagttgggcagggataggagaatctggtgtgtagagaaatagcctgaaggcactttgtgcttgcctggcctctctgcccagacgttggggaggctgatgcctgcctgtggtttcttgtactagccgttaagaccccagccatcttccttgaggggcttctgccagcccccagggaatgagaattagccaagagccaggaaatgagaattagctgaggacaccttttacccctgttccgcagctaccttctgttccctggcacagggcatccccttagaagtagtgcatgaaattcacacagctgggacctggcagagaatacaggtggcttgactgaggcagggaggcctccatctgcaggtggcctgagagcctgcagagcctcacagtggcactaggtggcactcccacccaagggagtcctaacagagtgggaggcgtggaaataaaggactccatggcctgaaggaaataaatacaaggtaggaaagtaaatttccagacaattttttttccctaatggaaattcacttgtaagtgattgttcaaaatccagaggcatttccccactgaaaatatgtgtggtggaggtctggttggaaggtggggtagtgctaatctcggccaacttgtgggctggtttatgggtttcgtttgtttgtttgtttgtttgtttgttttttgagacgagtctcgctctgtcgcccaggctggagtgctatggtacgatctcggctcactgcaacctccacctcctgggttcacgccattctcctgcctcagcctcctgagtagctgggactacaggcgcccgccaccatgcctggctaattgtttgtatttttagtagagatggagtttcaccgtgttagccaggatggtctcgatctcctgacctcgtgatccgcctgcctcggcctcccaaagtgctgggattacaggcatgagccaccgcgcctggtggtttacgggtttttaaacacccatctgccttagaggcttagaatggctaaaaagcaatgccagtggatgcagtgcagccgagctggccattccacagggaagagtgtgagaatcccagagatctctcagcacatgggaggtagaatgtgtgcagaagctggtctttcctctacagacctttctcccctggtctaactggggcttggttttgttccgtccccagggacctgtgtgggctggtctgtaagtactagaggctttgaggaggccaggatggtcttccagggtctttccagttctggaagttggtggtggcaggattctgcgtcaacatctttctgtgctttaattgcattttatcccatgtcatgtgtttccttggacctctgaggtgagaaggggtctgaagtttctttggggctctgagaatgctgggatcagttacagtaagttctcaatcttgatgataggttcttgggatcttcacctttaagcaaaacatagaatgaaaccagttttaccataggctgattgatagaagcaagaattaagttcctatggatgtttctgaccacaaaaacatcaccgaacttttaaagaccccaaacatttctaatattaaccattgaaatgtgagctatacatgcatttatgaatgattaataaaaagttagataattatttacctaattactccakttcagggttgcaggtggtcccctatccgatgggcagctcagggcacaaggcggaaaccagtcctggatgggatgtcttcccatggcagggtgcacccacacccacactcactcagactgggaccatttasacacaccagtgagcctaatgtgcatggctttgggatgtggaggaaactagggtactcagagaacacccatgcagacatggggagaacgtgcacactccacacagacagtagccctggctggaatagattttttttctcatcagtgttatgatgacactatttgaggacctcccgtagtgatgtctggacaggagaatattaggagcagctttgtataaggtatctgccacccctgtaccacatgctgaggcccttaggggtggcactgtgccttgttcacccctgcctccctgttcccatgggtgcattgtaggtatggaagaacatggaaatccatggaggaggaccctatctgtcttcttccccctgccgcatcccagggctgtggcttgtcatgtggcacttgcttgggctggatccaggtaaggacgacaggtgtatggggctgtgactgtacacccttatgtcctattccaggcgtggcccccacaccatttctccgcaagccctacagaccctctcctcctgttccaaaccttaattctttctttctttttggtttaaaaaaagaggtctcactatgttgtccaggctggtctcaaactcctgagcttaagtgatcctcccaccttggcctcccaaagtgctaggatcacaggcatgagccttcatgccttagttgctttagaaacaaagatctcagtggtgagaagccgctggaattgtatcctgttcagtggctcagaatgaggagactgagacttctagggccaactcaccattgaatagggaatgggcgtgctcagttgctcccacagatgtgaacaaggctacttaatgccacaccttttctttggttgaatggtgatccctctcagacccttcccctcccctaaaagcattaagctgattggtctgatcccatgtgggctgagtgcttgtcggatgcctggcaccatgtgggtacggggtggactgccaagccgcagactagggccctccgatctagcggggtgggaagacagcatgcatcatccatcccatgggctctgcatcctagtagtgaagcagggaggcctgtgtgctctaggctggggcggtcggaccttgtttctggctgcccttgttcgctggtctacatyagttttggagtcagggcattctgtttgtcagggttttgcgtgcctggagggcagaaggttggggtgggagcagccttgtagcttcaagatgggatgcgggaaggatcaaggatttcgcattctctggagcttcctagggctagcaggggtggctttctgttcagtccagtgaagaagctggtcctcagtgaggtcagcagcacgtggggtcctgagtctgcctagtgttgggtcgcgggtggtggaggggaggcagctgctttgggaggccagccacgggctgcagacaggcggctcacagaccagcggacagactgaggacagacaggaggcatcccttgggagcagccgggcccaccttgctggttgagtggggtcctcccgtgacagtgaccaagcagagctggtgtctgctgcccttccccttctccctggccttggcccttcctcttaaaggggccctcgggttgggcggacggcccagcaggactggggctcagagggggcggcagctttaagggtgrmtggggtcggcctcctgcccccgcccctggtagtctgagtggctggagcccgagccccgcccactcgccccaaggcttcccggctccgggagcgcccctagggagtcggagcccggaagctggagccacctgcgggtgagtgagcggagccggcgccccggccctgccgggagccccaggtgacttctcagggaggcgccccaccctgcccgctcagagggccagtgccgggtgggggtgcccttctagggccttcggtcgcaggtgggctctcccagctgtgacgacgcggccccggcctgaggagccccgcggacaaggttgagcgagtcgtgggctttttttccgtccccacgtgggcacggcccgggctgcgtgagctcacttcctccacatcttatctcctgccgggcgcgggtacgggaagtgaagagcgtacgggaagtgaggcggccgcgggaagtgagggggtgcctgcagtgaggcggctgcaggaagtgagggggtgccggctggcattggcggggcccgggctgagagctccgtctccttggtgctgccggagggcctgggggcaggccgcctggggaagagggcggcgcccgagggccagggagcgggtggccggcttactgcctttgcccagagccggttcccctcagcacccagagttgtctgagaggaggttccctgtctttgggcggctaggatagacccctgcgagtcctgcctgccctcttcccagggcctcctgggctgcctgccactgactctggtccatgtcgcccagggaggaccattttccccgtctcctacttgggaagtttgcctgcttctagctcaggaatgcagggaaggcagggttgtcgccccactagacgcacgccgctgcatggtggccaggcctcagctgagctggggagaaagtcagccccttgcccccaccctcgcccccgggggaagtgcatggcccgcagtcaggccactggacacaggatttggggccctggargtttctgctgaggcttcaagaggggtggtcctggcgttccaggcgcttcccatcagacagcaggagccagttctcagggtccttggctgaacacacaagctgcaaagctacatatactccggcagagctggctgcgggctgcagactgcaggtgacagtgccatatccctcactgcctgctccgccttgctaaggcttgaaccagaatccactaggagcaggactgtaagtgtatacacgcatacccctacacacacacacccctgcacctacacacaccctcatgcacacaccccctacctacacacaccccctcacctacacacaccccttgcacctacacacccatacacgcacgcgccccctacaggcacacaccccctcacctacacacaccctcgcacctacatacacacccctatatgcgcccaccctcacacctacgcacatgcctcctacatgcacacaccttgcacctgtgcacaccccctccaggcacataacctcacacctacgcacacaccacctatacgcataacacactcacacctacacaccccctacacacaccctcacacctacacaccccacacaycctcgcacctatacacgcacccctccatgcacatacccttgcacctgcacacgtatcctccatgcacacacacttccacctacatgcacctacccctcacgcacaacaatcttgcaggccccaacccaacctgtagtaactgctgcctggcctggggtcattcatcgacttcagttggaatgttccattccactgggggggcaggtgttgtggtctttaccctggttggtgagggacgggtggggacactgccttactgctctggtatggatccccaaaacagcatgtcctgacaaaggtgttcccctaccccctatacggtcctatcagccattgtytcctattcacagggccggtcactccgcgcaagtttgggttcctgttttagaactgccacctaagcccctcttatttcatctttcctgtggtggaaacccctgcccccaccggagtgtgaggttgactttttggaaagagaggtgaggtgttggaagccaggtctgaggctgcgtcgcgctcctaggtggaagtggggtttctgagcagttgttctgggccatggttgcagctgtgctctgagcctcaagggggtggccaggaggaatttcctttcccattttccagatgtacaaaccaagacttagagactacctgtgacttgccaatgcctttccctgctctcagggcagaggtagaggaaggcagccaggattgcagtgaccaggttgtcatcagccacaaagcsctctgagttctcatgttgcaggtgactggcccttaggccatgtagtgacattaaagtcctattggtcacaaccctaaactcctctccacagaatgtctttgaggcttagaagggagggaaggtgtcagtgcttcctccattctggatacccttcttgcaagctcctcatycagggcctgaggctcccacctcgtgtcacctcaagacagccagagaggatgaaatctttggcttgggcttccagggctgtcataggcagagggcaagccaggatttgaaatagggaggccagaaacactgctggccaaggaagtggcttggccttgggaagcaagaaggcagcaacctctaggcgccccttctctccatcctgcagctctgagagggacagacggtgctcagcctgtgtcctggggcaaagctggattcattttcctccctggcgatcttctggggcccacagctggtgatatggaggcactgacaccctggtctcggcgcttgttttagaagaggcagaacagtgataaagacaaggatctaaatgggcaaggacgccctgccctcactgggctcactggcaggtgcggtgccccagcctggcctctcaggatggttcttagtctctccagggctcacctttccctgatgggcatctgacctggcccctggcctcatgtgccttgattcctcagtagggccccctctgagaccggaggccagacccagcccctcacagcaccatgggagaatgaaatgccaaggctcacaggggaacctgctttgagaacccaaggtttttggccgagctgggtttatctgggttcatgtctttctaatacattcagggctgtggtcgtcactgtcccacatggtaggtcagtgaggaaaactggcaggaggctggggctccccaaggcccctcctctctgcctcccctcaaggccacgcttgcctccctctgaatcctggctgtgagctcagttccaagcctgcactctatagaccagggaaagagcttcccctttggaaccaggcaccaggctcacccctgactgctatcacccctgtttcctgggcagatggcaggaggccagcatggagcctggtgggccagggagggtggggcgtttgctcagtatgttggcggagtggttggagtgacatggccctggaggcctggacactggggctgtctatgggcctgggcctcggccttgagatgcaatgggcctcttgtgcctgtgccaatctcctggtgccggcaccttcccaagggaggatgctggtgtgtatctgtttgctggtgggtaggcgccctcctgcctgacccatctgcagtgagctgtccccgtcactcatttaggagaggggcctggaccagccccagcctggatcgggggagaaatccacgcttgtgtctgaccttagtcaccttattgtcctggctccaagaggccactgaatctcatacccggggcttcggtgattcttgcaggcaggttcccgggcggaatcttcacctgtgtggctgaggagggtttgccagggcgtcagatgttcaaccacgcgcgaccacagcgatgtctgagttaggcctcatggcgggctggccatgcctggcctattctttgctttagatggcagctcttggggccacatttcatcatctaaggatggtgacaggtgcctgccccttcctgggcagtggctgggggtgaaggactggaggggtgggctccctgtcagcccatatcctggagggccttgattgcctgggctgagatagcacagcttcagcatgtttgctcttccttccgctatctgtgcaggccaaggtggagaggctttgtaggggccgggtgtgtcctcccagatagccaggctggggccctggccaaagtgcttttctgaagcaacgatggaaaaaggggagtggaactggtttgtgctgcagtcctggcctgttcccagccccaggctggttttccccacatgcacagcttctgaggaggcctggagcagggagctgggtattttgtgtgtgtgttggtggggggtcaaggccaggaggggtgaggagagagccagagcaggtaagatgccaggttctcaccagggcacctstcgtggcttcccgctcatctcattcctcagatgctactttgtaacctgaattgaaaatgggtcaggtcctggcaagggaggggccaaactgcagaccggctgacgcggtgctgggcctgggcctggagcacggggctcaagttcccactttgtgcgtttggagccaagtggggcctgaaagccctggcagcagtggctggtcccctccctgtcatggcttactggaccgggcagccctagggccttgccccctactgcctccccaggccagctgaggaagaggatgagcagtgcaggctggctcagccctgggtagcagggacagagcaggtggccaggactggggacagtgggctttagtgcaggggcttttgcactggactgcaagccctgagcaggtgacctgagcaggtgtgtgaccagtgcctgtctgtctgcaatagccctgaccctctattctgcaccctgtgagccaccgagactgaaccaaacccaggaagcggcgccaccaaccagcctcgcagaggcagaggccctggagcagtgacagcacaggagatctgctggctcgggggaaggggaggaaagaggaaaacaaagggagtgatcragtgagcctcgccccgccctccctgcgccggcccatgatgtgtcagtcagaggcgcggcaaggaccagagctccgcgcggcgaaatggtgagatgctgcccaccgcgccctaaccccacggttccccgccacgacctccggaaggtcagagttcacatccagcggcctcgcagtagaggtggcggcaaggggactggtggtcagcccccgaggctggaggagcctggcctggggggcctragcaccctgagtcggagagcccgcttcaggtatctttggttccaaccatgaggagggcccagcagggggaggctgccagcgagcctcagacctcatgcctgcgatcttccctaccctggtgctcccaggccccctgctcgcagcccagacccttgcctctgcaccccacctaggagagaggcttccccattccccttcctgcccatgggaggggtgtagctcttcccagttggtccctgctcttctgcagtgagtggggcaggtggcaaagccagaggggagcagtgatttgtctttgcttggcccctgccaccttcctggaccttttaaaaatacaccggggtgcgatgggagagaaagtaggcacccgggagctgcgtggatgcagccagctctgagcctgagcctgagcggggttcrccactggttcgcctgccgtctgctctgctgctatcagctgagatgctgctttgttccttggtttgctcagcaactgggagagaggactcagcttctcttgagagcacagtcccagatggcagccgtagattagctaaatgcagttactttgcagatgaggaaactgagacctggggacgttctgagtggatggcagtgtggtctcctgctggctaccctgggcctcaggagcatttgctaggcctaggcacagacagggtggggtgggccttgtttaggcgcaggaggccagggttgtggtggaaaggcccgtccagcctctgcggctctggtgaagctgagcccctgctgagtgccctgcatttgtgctgggagggtggggagaggccggatcacagagaggctggatgcagaaaggaggggcttgggtttcgtgtgtgtgtgtgtgtgtgtgtgtgtgtgtgtgtgtgtgtgtgtccacctttgctgaaaggaggggcttgggatgggtgtgtgtgtgtgtgtgtgtgtctgtctgtctgtgcagccccagcagagcagacaggtggcttgagagcttgtggtggggaggttttgttcacaaacctgtggatgggttttcagaacctggcctgttatagaaagaccatgcagatggatggagccgtagctgtgtggtggtggtaggcggagtgtaaatgctccctttgagatcttgtctggccttggccccgtaatttagcagatgaggaaagggggggcctggaaccatgaaaaggatatcccagatcctgcaaaggatggtagcggaagactcagcaaatggttacccagctggctgggtcgtagctcctcagcgctatgtgctgccgtgccagtgcctgtgtggcagagctggcccctggggcccactctcctgggctgcggaggctgagggatgtgaggcaggccctacaccctgctctccccttcctgggcccaggtgcttgggcctggaggcccttgctgggagctgctgcagctgagaggtgccccgcagctgggcctgactctcctcttgcggctgcccccacattcccagtcctccccagctggctggcgggtgggagagcctgggaaatgagtccgctagccagaggcagccaagcccctgaatcagaatggggttgggacgagggggcacagccagtgcttgctgggctccatcacccccatggagaggcagcttgccaagggtgggtagacaggaggaatcctgccctgggtgcaggtggcagcctcctgggtcctgcccagagcctggccactgacctggctgtgcatggacctgtgccctgcaggttgcacttcccccagctggccctgaggcrgaggctggggcagctgagctgcatgtccagacccgctctgaaactgcgctcctggcccttgaccgtcctctactacctcctgcccttcggcgccctcagaccgctcagccgggtgggatggaggcccgtaagcagggtaagtgtgcacaggcccctgtggctcggacctcccttccgggcaggcctgaggttggggtgcaggagagactgaggtggtggcgagctgtcagaagcagaggtcaccgctacatcttcagggggtccgggtcggaaggttcattggtgggcaaggccaaggcagcttttgagaaggccactacctgggccgcgggtgactgcgagggcatgtcgtgccctgcccactcccctagcctgcctcatgtctgccatttggggctctggttctggaaggaacccagtctggggattcagaaaatggtgtctgtctctgatttttctgtgttcaagcaaaaaagagcttataggtgattttgaacagaagccaaattaattccgggatgccaaaggggtggttcaggatggatggatcctgtttgggtcccttagggtgaggacacccttaaggaacccagaggcatgccccaggaatgggcaagggaactggcttgtcctctcctggtccctagagggcttgctcttgcccttggcttcccaggcaggttgaccccaaggaggaaaccctgttcctgggcctttgacagtcacatgggtgtcatcagagctcaggggcactgaggcaccctggacattagcccaggctcccacctgtgcctgggaagggcctgggctcacatagcccttctgtgtgactgggcatcagctggaagggataagagcagctctctgggagcttaccttaccttggagaggtgttgaaagttggaatgaaatcagttttacaccttggggagttggtgtcttggttgtgtttagagaagcagcagccaccaattacaggcagcttctacagtggcagcagcacctgaagtttaagaggctgccccttcctgggtacctggccctgccggagagctctgggaccatctagtgggacccagtgcttgtccccaggccatcgtctgtcttaggtgctccaggcttccctgaaggaagagagaacagaggggcctgaggggatgacttctctttgcctcctgggaggaaccccaggtgcagatggctttatggcctggctcagtcacagtagaacgttgaacacaagtcctgccgtggggccaaggtggggctcagcagggctgggcttctcagactggctgcatccaggccctcaagagtgctggctggacctgtgggggctgcagaccctgtgtctgcagctcaggcccaggtgacagtgacatcgcagacctgcatctgaaaatccctgttggtgctcagggtatcctccttcttcctgttaagacagagggacacactttgggctgtagacttgttccatgcacttgggagcctcctcctttggtggtctgggatatgggcagtgaccacgggcaagatgcccaccacctctccacacactgtgatattggggtcaccgtggctagggtcacacactgtggttaggatcagatccgtttccgacccccactttaagaagtaagactgctgggcgtctcccgttctgggactggagcagttgctatttgacttttgcatgaaatgatgaaatccactggagttgtatgtaaatccagcactccgtgtggcaggtgcagtctggttcccagtgagaaacagccacatcacaaaagcagcgtggggcacctgggccctggtgtcctccgtggggtgcagattctcccctgaagtgagagctgggctaatgacactacttgggctctctggagctggggcagtgtggtcaactcagccccttgccctgtggcctgcaggtggctttgtacaagtcagtgccaacgcgcttgctgtcacgggcctggggtcgcctcaatcaggtggagctgccacactggctgcgcaggcccgtctacagcctgtacatctggacgtttggggtgaacatgaaagaggccgctgtggaggacctgcatcactaccgcaacctcagcgagttcttccggcgcaagctgaagccgcaggcccggcctgtctgtggcctgcacagcgtggtgaggcctgaccctttcctcctgcaggaaacaggactttttcctgcctccccagcacagcccccctggtctccagcgtatctggaaggggcaggatgacaaggggaggtgggggctgtctcctggggggaggagaccctgctctccctggcagcaagcctctcctgcccttccagattagcccatcggatggaaggatcctcaactttgggcaggtgaagaactgtgaggtggagcaggtaaagggggtcacctactccctggagtcgttcctgggcccgcgtatgtgcacagaggacctgcccttcccaccaggtgggtcactgcacaggcggggcyaggcagccctgctgctgtgtggctggaccgggagggaggggaatgctggggaaggaactgaggctggcatgtggggcctccctgagaatccatgtgcagaccacactcgggctccgtgctgggtgctcactgtgttggtggcccccacgtctgctcctactccacagccgcgtcgtgtgactccttcaagaaccagctggtcacccgggaagggaatgagctctatcactgtgtcatctacctggcccctggggactaccactgcttccactcccccaccgactggactgtgtcccaccggcgccacttcccaggtcagcccggggccagcgtggggggagctgcctctgtgggcttcatatagaggctctcagcttcttggtgttgggggaccaggctccagatcagggtcattgaggccaggagttgactgctttatgcaggctggttgtgggcaggggaccgtggggcccagtcagctcagcatttggagtgacatcggggcaacaggccatgagtccctttgggtcttggctgccatggggtggacacaccgggctctggacrggragtagcggcattccctgcctctgcaggctccctgatgtcagtgaaccctggcatggctcgctggatcaaagagctcttctgccataacgagcgggtggtcctgaygggggactggaaacatggcttcttctcactgacagctgtgggggccaccaacgtgggctccattcgcatctactttgaccgggtaagcaggatctaggccctgccaaagcccaagggccagacctcttgggtctacctgccttgtctgctgtgcggcggatgcgttgggactgaattctagggaggccacagctctggtcaggcctggctctgctgagcagctgtcctgagaatggccgctccacctgccagccagctgaggcttccctccctccttgcactgctggctggaagtggctggaagagatggagggaattaacctccttgcctggcacctggcttctgctaggaaccatggtcaaaggtgagagtgaggagggaacagaaagggagtgttgagctcggggtggctcatgttggttacagcatgaggggtcagcactcgcaggtctgctgcccaccctgcccccaggggctgcctttttgggtgtcagtttgtgaccaacggccttggctcccacgggtgctgctctcccagcaccatgcatggagaccactgggccccactgttccctgtcctccctgggcccagttcacagcaggtgtcaaggctgtgtgtgagatctggctagagcaggcccacctggccctgagatgccatccccacctcccttttggagctgggttgggtggtggtggggacaagcaacagagggagtgggactccaaacacatgtgggggtgacactgtgcacttggtggcctgggccccactgacccccagcctatcaccacaggacctgcacacaaacagcccaaggcacagcaagggctcctacaatgacttcagcttystgacgcacaccaatagagagggcgtccccatgcgtaagggcgagcacctgggcgagttcaacctgggctccaccatcgtgctcatcttcgaggcccccaaggacttcaatttccagctgaaaacaggacagaaaatccgctttggggaagccctgggctcgctctagagtctctttcctgattatggctgctaagggatcttttcyaaacagagtgagggtcttttcaagagggaggcccatgaggccatccaggtaagggcctgcctcagcgtggttgggagtctgaccaggtaggacttgaatgattcggctmccacctgttccagaggtgcagacaagaggtggcgagagcccccrtcatgcccctcaacctatcccgttccttctgcctacaaataaaaagtgcaggctggaatgatctcagtcacatttggatctttttaaacactgtatagacggaagagcctgcattcctgaccgaaccttcagttggtctcggttgtcgttttttcttgctgctcctccccccatcacctgagctgttttctgttggccccttttgttttttggccttaacgctcctgctgcacagggtgaggtrcctccttggcacagactgtggatgcctctcccccagcagagccacacagccttcgtgacaactgctttccgttcccacattcacctcatcctgctctttagaaaaagcagtytttgtgcttgtggctgaacgcatcaccctggactctgctagtgtcttstgaggacactgatgacaytgattaatgatacagacctttgcaggacctgatgagtgacccttctggagctggccaggtcctctgcagcaggcaagaccaatcaatcactgaacctgcctcatggcaccagagtgaacagggcaggcaggtagtaggcccagctggggaaatgggagagttcctgtccccctccacatatccctacatgaaatatgggaaagttgctgctattgattcagggtctgtcttggaggcagaggacccttggtggatagttggtcartgcctggaaaacctgtcccagtttatcaggaacgcaggcctggggagcccccagtggcggggacagggccagatttcatgttgaccctggggatgctgtgaatttctcctgcaggagagacatcattgaattttttcaactgtatcagtagcayagtatttttgtatgaaaagtgggagacttctgaacagtaattcatttaattgcaaagcattttgaaataaaaaaaatcaaacttaaaactgtgttctgttcctggaggtggcctgaggcctccccgacagcccagcacctgcgttcctggtgcgaacacgctagcacagggcctgccgcagggcctggatgcgggcaacgcaggcgccaatgggctggcgctgagcctggagctcctctgccagcagctggatctgcatttccacctggggccatggagggacaggcagggctgagagggagcacagcccggggcgtccccagggacacctggggatggcctggggcctcacctgttccagctctttctgcacctgctgctctacttcctggtcctcaggccccggctcctctctgttcagctccagccacctgcgcaggctgctcgcttgccgccgacaggacctgaggggtggagatacccactgcctgccaggctgggtccttggcagagccccatccggctcagggagaggcacctcagctaattctgatgcgggtatcgggtggagagaggtggtctggtagggcccctgacctgaactgcaggcccctgcttgggagccaaacacttgttctttttcctctcccagtctcctccgccctccccagcagacagcaactcaggtgggcctgggcaagaacacactccttgtctctctccccctgtgcagagccaaggatgaggcgccagtctgttgccctggaagctctgaggttgctgcatgttgaatggtccccagaccactgagtgcagctgagtcacgggcctgtctcctctgcatttttttttttttttgagatggagtgttgctgtgttgcccaggctggagtgcaatggcgtgatctcagctcactgcaacctccgcctcccaggttgaagcgattcttctgcctcagccttccaagtagttgggactacatgcgtgcaccaccatgcccggctaatttttgtatttttagtagagatggggtttcaccatattggccaggctggtcttgaactcctaaccccgtgatctgcctggatcacagcctctcaaagtgctgggatgacaggtgtgagtcactgcgcctggcccttctctgcacctttaatatcagtgttataattagtcactggggacagcatggcctcatcgggtttttagagttttgctcaactttatcgtcccccccataggaagcagagcctctgtgcacaggtgagtctgacgacttgggccttcctaagcagcactgagccgggtagagagccatggtggagatggggtctttctggacagcacacactgagggctccccacacccctccatggctagaccgagaccacctacaggaccctggcagctggctcgggggaaatggaactgcctgcccacctctccaggcaacacctgctcctgtagccagggctgcagggcgtttcgcagggctcaccagaggttctgcttggtggtctggtagtgcagtagttgctgctggatctcctcaagttcagcctcaaggtccaggctgcctatggcgacagaagtaagcttgtttcagactattttcccctcggggaccagggtaartagcaagtcccaggtccgggagtggcctgagtgctttctgccctgacaggccccaggtacacacctgcagttgaaagtccaggcccagccctggtggctgagaagtccccaggaaggagtagatgggggtcagggacactggccagggatgaggggaccgggggcttatccctaggagtagcccgctgtgctgacacctgcaaaggaaagaagggtagatgctgagcaaggaagctaggaggaagccagggagggggacaccaagtccttgtcactgcctgccctgcaggggtgggggaagaccaggctcccagctgcaggagctgggcttcccaggcactggccgtgccagctcagtgtctagcctgcccctgcacacagggcctggtactgtaggggaaagtcccgcaagcaaccagggagcaccccgtgtcaccacagtccgcctcacgcctccactgcctgagcagctgttcctagccttgccttacccaaccctccacccccacctgctctaagctcatgaccttgctgagctttgacatcagtgagaagtggtcagtgagaggccactgctctacagccttttccatgccctcctctcctggtgagagtggacttgccccttccatcaccggacaggggtcaaaaccctttcaaacccacattcaaaccattccagccagggtaagtggccccacatggcctaactcaccacaggaactggttccttcctgtcccctcatcccctttcaggaaccagctgctttggtggccttagagcagctgtcacttccattactgagctctcacaccccctggccatccccacccaggctccctgcttggagcctcctcccctctctccttcccctgtactctcctcctagaggccgcagtggctctggggttaccttcggcctgtgctgaagattcttctcaatctctggccctgacctcttccttgaaggtcagactcaacgtttgctttctctcaaatttgacatcaagagcctggttcaaaacactcttgacacttcaccccaaaccagtccccacccccagttccttcttccagtcaaagaactctgtttcccaagttattcaagccagcagcccacatcagcctggattccttctttcccctcattcagcaactccctcagagcagcatatcctgcctcatctgcctccaagagagtacctgtcccctctgtggcaaccgctgagcccaggccaccagtactacttgcctggaccacgtggtcatggtgaccacagcctgcacagaaacctgacatggtgctccctgccaaaacccttccccgacttcctactcttctcaaatcccaggctacttctcactgtggcctgcaggaccctacgtgatctgcagccactttactggcctgcaggcaggggtttttctttgcttgtctctgactagaatataagcttcaggatggcagggcccttggctggctgttcactgctgtggcccttggacctggtgtgcagtggctacctatgcttgtcaaatggatgagtggcctccctgtgccaaggttttccagaaactagtacagctgtggcatgagaaagcaccagaagtcagaccagagtgagagccccagtgcccaggcctggtggtggaggacgtaccctggctggtgcagccgccccgcagggcatgaaggaggaaagaggcagcagcagcagctccgggcctgtgcttgccgtcgggggctgcttcgggccaggggcgcttgacagggccccaggcagggggctgtgtgggaccagtgctgtcggggcctctgccaggaagggccgcgtcagggagggggctgctggctgagccatgcctaggccatgttcctgtggcttctgaggcctgagcacagggaaggcaagagcctggtcaggccacaggaccctcctctgggaccaaagaacaagaaggaaagggggccacccaccccagggctgccaaaacacaggccccacatggaggtgcccgctgcctttggggacccctgaccatctccccctgcctgcccacggtgctgcaccccagggacctctggctctgcgcaggctccaacaggaagtgtgggcgtcgcggctgcttcctcgctgagtgggcagtgttgctggaaagaaacatggggtctgttcccctgggctgaccaggggctgcaggggggtctgagatctctgtgggatctccaattttatagggagactgaaagtcaggaaaggcgaggccaaggtcagcaagtaagctggggtgggcctgggccatagagctcccagcagttccgacaaaaggtacctgacgccaggggactgcttcacccacattgtctcttttgacctgcagaacaaccctggtgacgctggtgtacaggtcgccagggtccatgtcacaggggagcagcctctgagacgttcaggatcccatcaaggtcagtcaaacagtgaggagcacagcagggaccgggacccaggccccatgcacccacctgacatctcccccgaggcccaaggctctcgggtagtgctggttgctgtgggagccaccagcttcatcagcatggggcagggcaggttagggtttgaggagaccatagtaggggtgggcagagggacaggtgccagctcacacaagaaagaggggcttctgacaaaaagccagtgtcttggctgtgatggagcagaagagaggccggcaggcacgggtaggagctgagcttgttccctttgtcaactacgtgtatgactccggaaaagatcgtgtcagcaggacgggagagagggtaggaaggtgttgcagaggaggggacacctatttcctgagctttggcaggcaaaggagagagggtttggaaatcccactccattctctccctcttgccgtgggagggatgggatctggctggagaagagggggttcccagcagctcagctgtgacaaggccgtgaccagcccgtcccatcccgtcagggctgttttcctccctgctatgccatccaaccttttgcccagggtggaagcgaggacaaggtgagcacaggctactcacagctccagggcgtggggctcctcagcagccaggcggcccagagctcccagaggccgagaagcctgtggcctcttggtctcaagggtgccatccccagccccagcagcaatgcggttgagaaggggaccctcaaacgtcactttcctgctgggtgcgatggctgccaggggctgaggcttcccgccccggcccagcactttctgtttccagagcgtggcacagcggcggacggcacgatggagactgtgagccgcctacaacacagcctctggtcagctcatgccacaccctgcctgctccccacaggaaggggccctgggcctacctggacctgctgctgggcctgcagctgctgccgggaggccttcatgctggctgcaaagcgcaggagccgcgtggcaccctcctggaggagctgcccctggtaggcctggagcgcccactgcagccgcgccttctttctcctcctttccagtacaaaggccagccacgtggcccacacctccagggagggcaggaggtgaggcccaggtctccctgcttagagctcccccacagaccaggtgccctccctccacccaaggcagggctaaggcctgagggagaggcagggatggtaggatgcagagccccaattacctttgcctgcagcgagaaggcccagaaccacagggcccgcactgtcgcccgctgctcctgcctcctggctgccagctagggccagaaagaccagatcatttccctatagccccttcaaggaggccgtggtgatcacggggccctgcccagctcgtccctcttggctccctctctagtcgaggctcccacttcctccactaggaagggccagccttgtgcctggcggtgagatgctcaacacacgctccatctgtggcctgaggaatgaccttcatgaaagaaggtggcaaagggctcctgcagggggatgcgtggaggcagcggcctgaggtccggggaatggtgaaaacaggacaacagaacgggaagagggagctggggacgtgtggatgctgctctgtgtgatccctcttggctttttaaaaagcaagatcccagcaaagccttaaaacacatttcatgttaatttttaagatattatgctgatttttctttttgagatggaatctcactctcatccaggctgaagtgcagtggcatgatcacagctcactgcaaccttgacctcccgggctcaagcaatcctcccgcctcagcctcccgagtagttgggaccacaggtgtgcactgcctacacccagctaatttttctgttttgtttttgtagagatggggtctcactatgttgcccaggctggtcttgaacttctgggctcaagtgatcc

SEQ ID NO: 94584 - DNA, 86684 bp, Homo sapiens
  misc_feature (1)...(86684): n = A,T,C or G
gcctactcaaagcccttcttttggtgggagctctgaggaggagggacagagtctttttcttttttttcaacagggtcttgctctgtcgcacaggctggagtgcagtggcatgatctcggctcactgcaacctgcgattcccgggtggcaagtaattctcctgcctcagccacccaagcagcctgtagtccacaggcgtgcgccaccatgcccagctaattattgtaattttagtagagatggggtttcaccatgttgtccatggttccatggctggtctcgaactcctgacctcaggtgatccacctgagcctcccaaagtgctgggattacaggcgtgagccattccgcctggccagcaggggctgttttgtttcctgctttcattccagggctggcacatgggaggcactcagcagataatgtatctgagttcatgaggcccctggaggtttgcttgactccaaagaccccaggaccaccagggtgtgagaccatggccaggagaagggaactgtcacgtaagctatgaagcatatgtaatattcttgtgagctccatcccccaccaaccctgggcgacctctcggtctgtctttgccaggctgtgaggtggagcagaaagggcctgacctagcgttccagtctcaactgtgccactgctggctggctgtgggctgggcagctgacttcctcttgctggaatgagtctggccatccctaaacagggggactttggtctgattcagtcattcagtcaacaaatatttcccaaaagcctagtaagtgcctggtgtgtgtactggagatacagcagtgaatgacacaaagtcactctcctggtggatagcaaaaataagcaaacatagcaaaatagaggcctaggctggggaaaacagtgggggtgtgccttagaggggatgggggaacagcatgtgctaaggccctgaggtggggcaaatgggcatgtggcatgcaggaccctcctccgtagccacctcatgaacctggacaaagttcagagtctaaagaggaagagacttatctctgctgttactcactcatgacactcattcagcacgtgaaaaccttgcccacattgtttccccatctggcaggtctctcctggactgtgtgaccagctctgtgtagagccaccccaggagccctcctgctgtgccagccccagttcccctcacttccctgtgtgcgccagctaagacggccactcactagtcctgggatctgtcctggcctttccaacctaccaggctttgaatcccaagttcctcccttcctatgtctgaccttccccagccttcaaggcctggctcagaggccatttccagggccttccctgatcacagactggctacaccctttcactcatctgtacttctctgggcttgagttcacactttgcctcctaggatgcggcccttgcattgagcttgtctgtgccctcctgtgttgcttatacgttcccaagaggcagggacctatcactgctcctggtgtctttctactccatgtgcagcagggcccatggaaggcacaatggcatgagcaaagcaggccacctgctagctaagttgcctggcctctctgtgcctgcttcttcctctgtgaaatggactaccagacgccagcctgcagggtgatgtgaaccctaaggacaagaacgtctataaagccctttgcaggtgctaataatgtgaacctgcccccagctggggcctggtatgctaagcccaggctggactgaggcctcattctcttccttcctcttaacccagatgcctccaaaagatacccaggccgttcactcaaggcgctcacatgttcccctgctatcactgccaaggattcagtggcactgacccctgcctgtccctgccccaaattccactcccagcacctctcccacctctacatacagcagccgtagggattcccattcagtttcccactgctcttggaataaggttctcatcccttaccggggccctgcctaacctggcctgccagcctcatcttggctgccctcacctgtggtctagttaacctgtgaactcatcaaggcttcattctaccccaaggcatctgcacgtgaggatccctctgtctgaaactctctcccggctgctgttctcaaggttgtgtcccttctagtcattcaggtcccagctcaaaatctcttcttagaggtttttctgactaagcctttgagaaacgagggaactctccttcacagcatcctattcgtttccttcacagtgcttggcaaaagtaacaatagcatcaagccactctcttgagacggcaagcttcctgaaggcaggtgctatggtatcctctccaaaatttatgttgaaacttaatctccattgtggtggtatgaagaaatgggtgcagaagatatccacaaccaaaaatataaataaataagaagtgtggccttttgtgaagtcaggagggctctgccctcatcagtgaactagtgccttataaaagggctggaggaaactagcataggccattttttttgcccttctgttcttctgtcatgtaaaagcagtgttcatgccctttctgttccttccaccatgtgaggacacgtaggtggcaccatctacaaggaacaggcctttaccagacacagaacctgccagcgccttgatcttggacctcagagtctccagaactgtgaagaattaaatttctagagctgggcacagtggcgcacacctgtaatcccaactactcacgaggccaaggcaagaggagccaaggagtttcagaccagttcgagcaaaatagtgagacctccatctccaaaaaagaaaaaaagaaattaaatttctattgtttctaaattacccagtcccaggtattttgttatagaagcacaaatgaactgagacagcaggaaacttgctgatcttgttcactgttattctcagttgctggtgttgaatgtttaatagtaactcaataaatatttgctggaagaaataaactttttttaggccgtgcacagtggctcacgcctgtaatccaagcactttgggaggccaaggcaggcggatcacttgaggtcagaagtttgagaccagcctggccaacatggtgaaaccctgtctctactaaaaatacaaacattagccgggcaggggccagagcctcttatcccagctactcgggaggctgaggcaggaggattgcttgaacctgggaggcggaggttgcagtgagccaaaattacgccactgcactacagcctgggcgacagagtgagactccatctcaaaaaaaaaaaaaggaaaaggaaaaaaaagaactttttgttttcttctgaaacagggtctcactctgtcgcccaggctggagtgcagtggtgtgaccagagctcactgcagccctgaactcccaggctcaagggatcctctgaccttagcctcctgagcagctggaactatgggcacacgctaccacacccagataattaaaaataaaataagccctcactgtttgctaggctctggggacacaaaggtaactaaagacccacccaagccctgacccctagggactcataaagagctgagcagtgggagagctctatgcaggatgttgtgctgtcacggtgaatgcctgcctgttcaagaacccctcacagcagccacacactgcctttttgtttttctctactcatactgtttcctccccagcttttgctcttgcacatcccttagtctaggagtgtccaatcttttggcttccctgggccacactggaagaattgtcttgggccacacataaactacactatcactaatgatagctgatgagccttagtctgaaatgttaatgttgtctccatgctctaatccctctcactctcagggcccctcaatatggagtccttaaagaggcaatgagaattcttcagtggcagatggggatgaggttgcatttgcctccttccaaccctcagcccagagtaggcacttagatatgcttggggaatggaaggcgttttccaaaaagacctcataccttgagatgcccaggcctacttgtcacttccctgctctgcacccctcctcccccaggcttccagactacagccctctgtgtgaggctccctccttactctgtggcttgggctgtgacactgactagctgggctatcttctgccaggctatgactgtccatgcctttccatgtccagctataaaatgtggcacaagacagcagctctctctcagagactcagctgcccctcctcctcttgccctgcgctctagaactccttgatcctgaggcctggcaggccccacagggccatctccagcctcggcaagggcggatcggacctagaggtgctcatgttgggggtgataaggttaggcgaggccttggcatctgtccccataacagctttagccttctaaacacaaagccacagccagacgttgctgcctggagccaaagggctgcctggaaggccctggcctgagctcagttagtggctgtcactaaggaaggcaagcagtgcactagcctttaatacttaacccatctcagactcagtctgctcagctgcaaaagtgcaaatcacagtgggcacctacttcactggttcgttatgaggattaatgaggcactgcatgtaaacaactgcacgcagcgcgcgcctgcctcatagaacactccctgtgaatgtaagccattcctcctctgaggctcaggaaaggcaagtatcttgtctcagaccacagggctagacaactggaggaggagggttgtaaatcccccaccaactccacacagcagacacaaaagggaacactccctgggagtgacacctgaaggtcagggtcccacatgctgttgacctcttccacagttggcacttcacttcagagtttactagctagaactccgtttgtcatcaaccccgcgccttcagcaggacaggaatcacgtcttccccctcccctacgtcttgggcaagcaaactaacggccaagacattgaataccagtccgggtctccgccccaaaggggctcaggctaccgcgtggcagagagaacgaaagtgaagaacaagagcaagacaaaacgccgagtctcggaggccagggcactggcccttccattgctcggtgctctcggccagtttcctgcccttcccagcctcagtcctccacggtttcccaaggcatgggagctcccaaggcggctccagcaggacttttcgcttctggggaaggtggtgcccctgctacccggaccttcccaccatgctgacaagggtcgcaatcctgcgagtgtcaggaaacccccactgactggaaccaggcgggtgtgggggcgaggcgggagtcggcccaaggtcgcgcgactggaccctgccccgcgctagggaggggtccctttcgttcctagggtgaagactgggcccacagagaggcactgaccgggctcgagcggcggccccgctgcctccgcctccgtcctcatgacccgggcggcgcggggcgcccatggccccggcccagagcgggctacagcttccgcttcggctggggcgggagggcggtcggtgcgtgtcgagttccttctccgccaccgccgccgctgcggaggggagaacgggaggcggcggctgggccgccccaagcgccgccccagcccttccaggtctcgaatctggaggccccgccccctccttaggccccgccccaaactttgatcttagaggtccccagcctcttgatttaagtctgctccggccattcgccgcctcagcgttgagtggccccaccctctcgcccaatcctcgcgcagacgcgcagcccaccaggacgcgggccccggaagccccgcccctttctttgagccccgccccaaagctcgtgcatttcctgaatagaggctcgtcccttcggcaagccccgcctctgccgggtcccgctcttttgccagtcctaggtgtaagccctgatcccgcccagtgcatccccgaggccccaagcaactctcctccaactgtctttagggataaccctgagcgggcagccgctctactctatacctaactttatccgtaccagatayctagcctcactcagggccccccttacctggcggtgccgggatcaacaaatgaaattgtgacgggaagtcctggcccttggcccaacctcctgctgtccccggtctgagggcccaagccccgcgtctccgccttgccgtccagcctgtccttggtgtggggtgcttggaagtgtgagcaccctctctggctctttgccggccccaagggtcgttgcggcggcccccgggcccagtcatcagccctcttttccggtgccggaactatcgtactggtgccctagtttcccagccggcaggcggagtgaggaggaagcggaggcgagaccgcgctcaacactggggaaaggaaggaggcgggccctgcgcgcagcattttgggaaagagtggaattctgggtgttaggcccgccattcgcttgactcacgccttcgccgtagcatctttcgcagcggaccgaagagaagaaaagtaggccagagccggtgaggctggggacgggcgaggggaggtcgaggcgcctgtgaggggccaggggctggagaaagacttgctgcatggaactctgcggggctcggggagggaagaaagcgggaagcttgggccacccaaacatcagcgtcgcctcactagctcctggaagtaagttcattagctttcccctcaacgtgcatgcttctcacattctgtatctctccaggtgagtgtttttcaaagcttccaggcagtaatctcgaagtcatttctgattgactatctccttcccccaaatcctatgagtttttttttgttttttttttttaagtagagacggggtttcaccatgttgccctggctggtctcgaactcctgggctcaagggatccaccggcctcggccttccaaagtgctgggattacaggcgtgagccaccgcgcccagccggtcattttttaaaaagttctttgtatctctgccccagtcccctttcaggcaatggtcccctcatgctttccacactgttgcagcagttttaactgttgcagaagttttaacaagtttctctgcttctaaaccttacgttctatccattttgtaaataaatgctgctatcttttcattgcgtcattctttacatataattctgcagtggttctccactaccttcagcataaaatctagactcctaaggctgaaagccagggatcctcaccaaaggagcctgtcctttcaacctcatgttctcctgtcttaggtacgcttaagttgaaacttagagttgttgctcatctcaataaaaagttcactgcttgatgcttttgattaggtcaagtcaggtgctttccctgattttcctccatgacaagcatttcctgcatatagcacgttgtcactttgatattttctcaatatccttgatagtaaaataagtgaagggttaaagggctgaattaaaagtacagcctgctctcctagatgtgcatggtcctttggtctgtatctgcaccttccatagggtagycactagctacatgtggccgttgaggacttggaatatggccactgggattgagggactgggtttttttattttaattctattgtgttttagttaagtttaatttaaatagctacgtgtgtacatgagctgctgtattggacagctcgggcctgtattattctcaaaacgtantcatctacaattaagggttaanaaataacagtgcaacaaattaacattccantccccctcccctgacacacacagtattggctaatggtcctttagctgaagattaagggacrtagggtagnggggacacatgacccatgggagatgctctcttttcattcctagttttacttctgtccatcccatcattcctcctcaccccacatcttgcacatatttgccagatagtttcctccaaaccaggagctgagctttttttttttttccttggtagaaaatgcagctttggtgtttttgctaagttttatggagtgccaggccttaaaggaagcatgatgtgtgccgcatgccttttcagactctgaaagatgaactgactgttgtctctctcattgtagaactctcttcctgccaagatgtctattggtgtgccgattaaagtactgcatgaggccgagggccacattgtgacatgtgagacgaacaccggtgaggtatatcgggggaagctcattgaagcagaggacaacatgaactgccaggtattctgctttgcatgtgaggctgtgtgggaggaatggccctgtgtcttgaaggacagaaaagtgtgtgttgagggtctctggaaattgttctcattcagcagtgatttcctaagtgcctaatgcataccagtcaggtgctgttataggctctgggggtgtgggcatgaacgagacacataatcttgaggcagaaaagccatttggaggtttggaatattttactttgtcctttttgttttttccatccccaaatatgggggtctatttgggagaagtgctacttccttcagtagaatccttcagattcagggccattatccatttgcctccacttgctttgcgattagcagaatcttctcacctactgtrtttgtttcccttttctcttggaggaggagtctcakttgattattgcaactaccttgtgaggtaagcaggtttggtgatagtcttgtcatccataaaatagggagaatgagattaaagggctcatcactctgatgataaataatggagtagtttcctgatatggtgtccttctcatggcacaactttgccttttgcatagtcatctgaatttttatagcattgtttttcagttgtatcttcacactttctttgttctttaaaccactggttaagaacttggacttgggagtcagagagagatgtgggtttgaatcctaattatatgactttagatgtattaaccactcagttttctcatctgtaaaatgggggtggtattatgttgggttctttgatgtagatgccaagacagaattttgcaaggtatttattgggggaaatgacaataaaggataaaagagcaaggaagcagtagtaggcagggaaattttcagtctatggtgctggtctgactggtgaaatgagaggggaaaggaaggaggattgagcaggaagagccttagactacagcgtagttttgaggaaatctcagcaaggcagcgattgctcgttagaagagtctagcatggggcagaaatgggcggactggcacccccggtgtgttcaggctggcaacatggggagagagtagyctcaagttgaatgccatggtggactgcaaagatggagattgtcggctgcctgcactcctcatagcctgttctcttttgaagggagatgtgagcagcacacccttaagactgccacaggggtaatatccacacccccaggacttttacaaagatcagatgagctgtatgtgtgccatagctgctcagtgcctcacatactgtgagtgttcaacatatgatacctattgcttttttccagatgagaaggtcagagaggtaaagcaccttacaccgcggtcaggcatcctgaccatccattggtttgcagggttcatttatttgtgatttttctgtagctttgagcgtctgtcatcttcctgcgaggttgacaagcttggtcagttccctgaatgcagagaagtagacctctggtgactcaggtttattgcattactgtcaatagatcagtttatctattgagggtagataagtttatcatctctcatatatccagtcctctggcttaaggcatgctcatccactttaaggttctttaatttggtgaggagaatgcaagacttgggttagtgaagcttaatgggtttgttcaattagctgtatgtatttggacaacttgctgggtttccagggcctttgtcatcccatccgtaacgtgaaggtgtctaaccagataaccttggtagccattcagagatgcagtcaacatgacacaaagtgcacagaccttggtgtccgacagacctggaatcagcttgtagcctgccccctagggtgacytggggcgagcttagctttggacctccttcatcctctggtccctcctctaaatcagggataaaaatagcaccttggcctcagaaggaaccaygcctgaccaatggtgggggacagccacctgcctccctgcttgtatttgtatgctagtgctaccataacaaagtttcacagactgggcagcttagacaacacaaatttattttctcatagttctgaaggctggaagtctgagatcaaggtgttggcaaggctggtttcttctgaggaatgtgaaggaaggatctgtttcaggcctctctccttgcttatatatggctctcttcctgtgtcttcacttggtcttccctctgtagtgtttctgtccagattcttcttataaggataccatgcatgtaggattagggcccactctaatgacttcatcttaacataattatgtttataaagaatttttttttttttttttttttttgagatggagccttgctctgtcacccaggctgcagtcttgctctgtcacccaggctgcagtcttgctctgtcacccaggctggagtgcagtggcgcgatcttggctcactgcaacctctgccttccaggttcaagcgattctcctgcctcagcctcctgagtagctgggactacaggcatctgccaccatgcccagctaatttttgtatttttatatttttagtagagacaggtttcaccatattggccaggctggtctcgaactcctgaccttgtgatctgctcgcctcgacctcccaaagtgctgggattacagatgtgagccaccatgcccagcttgcttgcttttttttttttttttttttttttttttttttttttttgagagtctcactctgtcgcccaggctggagtgcagtgrcatgatctcagctcactgcaacctctgcctcctgggttcaagcacttctcatgcctcagcctcctgagtagctgggactatgcccagctagtttttcgtatttttagtagagatagggtttccccatgttgcccaggctggtctcaaactcctgagtttgcctcagcctcccaagtgctaggattayaggcgtgagccactgcacctggccytttttttttttttyttttttttttgagacagaatcttgctctgttgtccaggctggagtacagtggcacaatctcagctcactgcaacctccgtcttcccgggtttaarcaactctcttgcctcagcctcctgagtagctggggttataggcatgggccaccgtaccccactaatgttaatattttttgtatttttaatagagatggaggctcatcatgttgcccaggctggtctctaactcctgagctgaggcaatctgcccaccttggcctcccaaagtgctaggattacaggcatgagccactgcacccagccttttttttcttttcctttttcttttctttttttttttttttttttttttttgagattaagctttggtctgttgaccaggctggggtgcagtggtttgatcatagctcatgggcagccttggacttctgggctcaagagatcttttcacctcagtcttctaagtatccaggactaccagtgtgccccaccatacctggctaatttttaaatttttttgtagagacggagtcttgatatgtttttcaggccagtttcaaactcctggccacaagtgatcctgctgcctcagtctctcaaactcctggaattacaggcatgagccaccacatctggcctgtaaagattttttgtctctaaatatgatcacattctgaggtgctgggtattaggacttcaacaatgaatttttttgagggatacaatttagcctgtaacaggatgtagaggcctcactgggtctatcaaaacctaggcacattgaataagagccagcagactgtggcgtagctaaagctggtggtgggtgaactctgagcacagtttagtttgttcagcacatctcaggctgtgaggcttgcctgtccttcccagatccagtcattctgccttttgggaatgagaacatcctcttagcacttttccttgcttgttcaataacattttctgttataaaagtggggtgggacaaaatgtggtggctactcctataatcccaacactttgagaggctgaggcaggaggatcacttgagcccaggggttcaagaccaacctgggcaacatgacaagactttgtctgtaaaaaaaataaaatagacggatgtggtggcacatgcctgtagtcccagccattcaggtggaggctgagttgggacgattacttgagcccaggaagtcaaggctgcagtgagctatggagtgccactgcactccagcctgggcgacggagtgagacctagtctcacacacacacaaaagcacaccacaacgattcggaaaagataaatagaggatctcactctgttgcccaggctagtcttgcactcctggacttaagcgatcctcccaccttggcctcccaaagtattggaattacaggcctaagccacacctgccctgttttggggttttagtatttactttttattctatcctctttcagaaatagttagaccctgtctcttctgaaaagcaaaaaagtttaaaaattatctggatgtggggctgggcactgtggctcacgcctgtaatcccagcactttgggaggctgaggcgggcagatcacgaggtcaggagattgagaccagcctggctaacacggtgaaaccctgtctctactaaaaaaaatacaaaaaattagccaggtgtggtggcgggcgcctgtagtcccagctactcgggaggctgaggcaggagaatggcgtgaacccaggaggcagagcttgcaatgagccaagatcgcgccactgcrctccagcctgggcgacagagcaagactccatctccaaaaataaaaaatatattatctggatgtgatggcttatgcctgtagtcccagctactccataggctgaggcaaaaaggatcacttgagcccacccagcagttcaggctgcattaagctctggtcgcaccactgcactccagcctgggtgacagagcaagaccctatctctaaaattaaaaaaattctatggcaggataaaagtagatgcatagatcatggtgcaggtaagctggggtagaatgtaaaatgaagccaagcagtcagtatccagaaatgtaaacctgaatctctctgtacattgaataaaggtatattccagtgtaagattaagcagggaagatcatcagttccaaaatgcatagtgttcttaagttaaaatagcaattgtgtggatttccctggcactcagatacaggagacactattagatgatatcctcgacaacatccccatacaaaatacccttttatggtccctcaagtagttttaaagtatcctgttatcttagcactgtttttgacatttgaaaatgcaaaatatggccaggcacattggctcatgcctgtaatcccagcactttgggaggctgggccagggggatcacttgatcccaagagtttgggaccaccctgggcaacacagtgagaccctgtctcatgtgtgtgtgtgtgtgtgtgtgtgtgtrtgtgtgtatgtatgtatatgtatgtgtatatatgtatgtatatatatgtgtgtgtgtgtgtatatatatatatatttttttttttaaaggaagaagaggaaatatgtgtatgtgaaactcaggatgaggtccctgaaatggtgcttatcgggtcagagggtgtgcatctgaggttaagctgggaaggcagggagcttttgttctccttctcattccgacagctgcaagccaagcactggtggccagtgctgcaggatagggcatcagctgcaggatatggcatgttggtcaaaatgctgttggcataagtgagaaaaataacaatactccaaaatatgtccccagttttataaaaatggacccaaattataaatgatacaagcaaatacagagagtaatggtcaaacccatttcactacattcaaaatgacttaattcttagaagttttggtgggagaatgtggtgtagagctctgcacaagcagacattgtgcttttggggcttcaacatgaccacccaatcactgatgggactgtttgaaatctgttttgttggctttggcatataatagccatctttggaaaactggtctctgtatggaatatggtcttgtgtcactgtataaaaatgagaacccaaaagaagctctcacatgattgggtcagaaaattgcccataactattgctaggaaagtttttgaaatctctgaattcaatgtaattgaatttctttagacacctagccctctaggttgaaggaaaaccagtttttaaacttatcgtatactttttttttcctgtactgtttgtgtgtggattgcattcatcatgctcctctaccccataatacttttgtatttcctaagaacaaagataggtagatggccttagttggtattcgtattatagcagtggcatccaagcgcctctgcctttgtgtatgtgtgaaattgtcctraagaatgcatttctggtgtattgacaggcctgagacaccccaacacaccttcacagtcctggagctagctttctccatcttggccccaggtatctaagaaagtcccaccactttgtgctacaaagattctctctctccccctcaggatgtcatttcagttgggtacctggcttataccatatgtgtttcattgtggctgttgaggaaagttgattaaactgggtgttcctgcctggagttgattaggatctggttcactcaaaagttgctgccttgggcttgtgatacaaacacaggtcaggcttattagcaagctctagcaggcatgtgtgcagtgagactgtggggttttgtccacagcaagctgttcttagccagtgctacagggaaagcgagagcagtagtgagcctggttgttagggttaaaataggagtcagatgacactggactctcctgcttcagccaggacatagttcatttatggaaatgcctagattaagtcttgtcggacttatgcaacagcttctgtcaggaaaggagtgagatgtgcccctgtgctggagggagtgtggcttagcagtggcacagctcccaaaacacattttagctgtcaatcagatttagcatgtactgagtctctattatgtattaggcaatagagacagcatttagacatactttgccttgttcwtttttttttttttttttttgacagggtcttactctgttgcccaggctggaatgcagtgtcataatcatagctcactgcagccttgaactcctgggctccagccatcctcccacctcagcctcccaagtagctgggaccacaggcatgcaccaccacacctggctaattgttaaaaatttttgtagagataggatcttgttacatttcccaggctggtctcaaactcctgacctcaagcagtcctcccaccttggcctcccaaagtgctgggattacagacatgaaccactgtacctggcctgatttgctttttaacaatttcaggaaatgtgcagtggttaagagtgtgagttagaaagaactgggttcaaactccagccaggccatgtaagcgtggtgtgacctcaagcaggagaatagagggaaagggcatgggtttctggggacagatctgcctctgaatggctatgtcacttcatctctttaccttgtaggattttgtggggtaacatgagctgccgtggggaaatcacctgggccagcacttgatgtctaataagtgctcagtaactgttggctttgttgtcttgtattttcaaaactcagctttgtagttgagggaacggaggctcagggaagcctggagatatacctagggttacacttctgacaaatggcagagctggatctcacctataggtctttaggcctattttgtgtcttctacagagtcatgagtgtggcacagtccccaaaacacgttttttgtttgtttggtttgttttttgttttttgagacggcgtcttgctctgttgcccaggctggaatacagtggcgtgattttggctcactgcaacctctacctcccgggttcaagtgattctcctgcctcagcctcccgagtaggtgggactacaggcacctgccaccacacccggctaatttttgtatttttagtagagccagggtttcaccgtgtttgccagactggtctcaggtgatccacccacctcggcctcccaaagtgctgggattacaggcatgagccaccgcgcccagccccaaaacacattttaattgtcagtcagattcaggtgagcctgagttgtatccagtttctgtcttgggtagtctgaccataaacctggcgttcatttgtggcactagaggttatggtattcttcaggggaagaaaaggattggtaaggacttgggaactggatgaaaatttaataacaggctgggagtgaggagcctggagcagaaggtttatgagaaactggagccctgttgcccctgaaggtagaacagggatagtgggtagaagctctagaaaccattcctctagaaactgctcatatacaacaggggcggccccagagcatagttttgtttgttttmtttttgagaggatcttgctctgtggcccaggctagggtgcagtggctccatcacagctccctgcagcctcgacctcccagaaccaagtgatcctttcacctcagcttcccgagtagctggactacaggcacatgccaccacacccagctaatttttgtagagatgaggtctcactgtgttgcccaggctggtctcaaactcctgggctcaagtgatcctcccaccttgacctcccaaagtgttgatattacagacatgagccaccacacctggcccatagttgttcttttctgagtgttcaagcagaggctgggtggccagttagcacttgaggaaaagaatgaatgagtataagatggcagctagccagacagaaatctgcagagacagcacatctttctacaataagggctgacccattctaaataaattatagttctctctcttcagaaggttcatacaataagctgctttttctgtaaatgtggtgcttgttgaggttgatgctggcagattggtatcaccctcccatgccaagctggtctcaccttcaggctccccatttgtccatcctgcagtctatccttgttgccacatttatctttcctgagtgctgccttaaccctattgatctttcctctatcgacaaacttgactgactcctttatctgaagtaacgaccccgtccagtgtcattattcgactgctctggtcctcacatcctgtaggctcctgcccaagtgcctgctcttttccttgtgcaagctcttgcctcataaccctccagtaatttcaggccctttttacaggccttgtggtaccacctccatttctcagtccctagtcactcaacctagagggttctgtctcaccttctagagtatgcactctggagggtcagaaccacatctggtatatacttgtgaccttcatggtgcctttgaaatctgagtgccaggcagtgcaggggaagacagtttggaccagcagtttgaagctgttttcgttagggtttagcaccttcaagagctcttcacatctttgctcagcaggcagtgcagcacagccagggctctgaagctaggccagctggttcgaatctggagttccctgcattccagctgtttgacctgggataactgctttggtttttttaacatgtaaagatgggagcactcggctgggcgcagtggctcacacctgtaatcccaacactttgggaggctgaagcgggcagatcacctgaggtcaggagttcgagaccagcctgtccaacctggtgaaaccccacctctactaaaaataaaaaattagccgggcatggtggcgcatgcctgtaatcccagctactcaggaggctgaggcaggagaatcgcttgaacccgggaggcagaggtcacggttagccgagattgcaccattgcacttcagcctgggcaacaagagtgaaactccatctcaaaaaaaaaagggggggagcctcatacccacgctgaaggtgttgtgaggactgtttaggtaaagtgctcagtgcagtccctggtgtacacagttagtaccgatgattgctgggtaattcaccagctttgtcacaatgtcagtctgcttttctggacttccccctcccaccagtcaaggccctccccaccgctggtgctgttgaccgttaacttattagctggtgatttccttccagatgtccaacatcacagtcacatacagagatggccgagtggcacagctggagcaggtatacatccgtggcagcaaaatccgctttctgattttgcctgacatgctgaagaacgcacccatgttaaagagcatgaaaaataaaaaccaaggctcaggggctggccgaggaaaagctgcyattctcaaggcccaaggtaggtgcttttcatgcacaggttttaaaatataggtttgtcttgtgtcttgtagaaaggggccctattactgcctggagacagagagggtttgacctctgctctctccacacccaccacccactgccaccccttccccttgcagcgtggagtgatcctgtgaggccattattttatttttttgagacagagtctcgctttgtcacccaggctggagtgcgatggtgtgatctcagctcactgcaacctctgcctcccaggttcaagcaattctcctgcctcagcctttcaagtagctgagattacagtgcgcactgccctgcctagctaatttttttatttttaatttatttttatttttattttatttttaattttttttaatttttttatttttttgagatggagtctcgctctgtcgcccaggctggagtgcagtggcgtgatctcggctcactgcaacctccgcctcccgggttcaagcagttctctgcctcagactcctaagtagctgggattacaggcacccgccactgcgccgggctactttttgtatttttagtagaaacggggtttcaccaccttggctaggctggtcttgaactcatgaccttgtgatccacctgcctcagcctcccaaagtgctgggattacaggcgtgagccactgcgcccggcttatttttattttatttatttatttttgtatttttagtagagatgggatttcaccatgttggtcaggctggtcttgaagtcctgacctcacatgatccacctgcctcggccccctgaaatgctgggattaccagtgtgagccaccgcacctggagaggcccatcttttctagaagttctgtgtgagaggtgtgggatcgcttgcccttgtctagtttgccgagcagacacagcccggagcagatgagctgactcgagtgtgagggcagcatttcctagcgagactgggtcttatggatggacaccagcatgtacttagggaggtctgatagtggagctccgttttcagaaataaagccaccttttagtacattccaaaagtgggactgtccttttcgcagtcccctagtctggtcttgcttcttggttagcctaatttggttttatatttaggttcatgaaagttctgtcatgttgattagacaacaaagtaattgtggcccttggaaactgtcttagtgttggtaaaaaaggtttgcagccaaggaaggcactggattcttcattggtatctttagctgctgtacatgttttatatgtgtgtgaggaaaaaagtcaaactgtgtttttcctctgctctcacaacacaacaatcaacaaagacttctgtgaccaagcaagcagtcagttctgcagtagacaccagctgggtgtccttcagttctgacactatctacctggagatagcctgaaaaaccacaggttgagggctyggtcccacaagacagcccctgcaccccccactattattcataagcacaggcctccagaacatctgaatggcttcaagccagggttctcacgtctcactccttgggttcgattaatttgctggagtagctcacacaactcgggaatcacatacttaaatttactggtttataacaggatattttataggctacaaataaacagccacatgaagagatgcatagggtgagatctggaagggtcgcaagcacaagagcttctagccccatggagtttcctcccggcacatggataagttcttgttcaccttcctgtcaggctgcgcatgatcagctgtcccgaagctcccctaaccctgccctcttgggccttttatggagactttattggatagtcatgattaaaggatggacaaccatgtggaaatgccattagacaaaatgggtgtgatctaacactaatagacggggttgggaaaccccgcgaggcctgtccagattctttttggcctctctctgcagcatttgttcctccagggtatagggcaggacctttctctggagtgaggtcttatgacccacaatcagattagggtcctgccttgggcaggtgaaaggagggcaggagaagtttcaagagagagattctgtctcctgagtcctgcttctgaggcctaaagtgccccaatgttataacaaaagactataacaaggactataggagttacgagctgggaaccatagatgaaagctcaagtttaaagatgtaatagtgtgaggggccgggcgcagtggcccatgcmtgtaatcctagcactttgggaggccgaggtgggcagatcacgaggtcaggagttcgagaccagcctggccaacacagtgaaaccccgtctctactaaaaatacaaaaattagctgggcatggtggcaggtccctgtagtcccagctactcgggaggctgaggcaggagaatcgcttgaacccaggaggtggaggttgcagtgagccgaaatcgtgccactgcactccagcctaggtgacagagctagactccatctcaaaaaaaaagaatattttatttgttcttcaaagcctgtcttctcctagaacccctgggttacagaggagaacagcagtcttatcatgctatttatatggagtgtgttttctttttgctactatgaaataattctttttttttttttttttttttggagactgagtctccatcacccaggctgcagtgcggtggcttgatctcagctcactgccacctcctccaactcccaggttcaagtgattctcttgcctcagcctcccaagtaactgggattacaggcgcataccaccacgtgcagctaatttttgtgtgttcagtagagaaggggttttgccatgttggccagtctggtctcaaacttatgacctcaagtgatctgcctgccttggactcgcaaagccctggggttacagacatgagccactgcacccagcctgaaataattattttctcagaaaaaaatacaaaagataatataacccttctcccagatctaacacatgttaacacttaactatatttgtttcagaattgaaaaaattaattcagtgcatctataatgtttttcagctcacccaaggccagccccaaggatttgtcttttctgtagctctcagaccaccttctttgccctcagcatgctgcctcccagcctcttgtagagagcagtgtgggactggaaggcaagagtgtgctgctagctcctgctttgatgccagtccccagcccctgcccctccgtctccatcccccctgttaaatgcagtggctgtcagctggacgtgttggcttatgcttgtaatcctgacactttgggaggccgaggtgggtggatcacctgaggtcaggagtttaagaccagcctggccaacatggtgaaaccctgtctctactaaaaatacaggaaattagccgggcgttgtggttcacggctgtagtcccagctactcaagtaggaggctgagacatgagaatcgcctaatcccaggaggtggagattgcagtgagccgagatcatgccactgcactccagcctgggtgacagagtgggactccgtctcaaaaaataaaaaaaaaaaaaggcgggaggtggaaatgcaatggccagggtggtgttggaccaggtaacccttcagaacccttctaactggtgtcctagggccctggctactctgtgctatsagcattcacygaccacactgacctggcctcatattttctcttccctttcagtggccgcaagaggaagaggacgtggaatgggacgtggaaacatctttcaaaagcgaagataattttytaagttgaacagaactttgtccttttttctttcaggttatctgagttcattggagtgggtgcttgtgcatatatgctaggtatcttttgccatctttctctttagatcaggggaaatgtttaagctaaataaatctggggggttttttgttctgttttgttttgttttctttgagaaaataaggactttgtgttcatttgaagtttgctttggctaaattttgacaccctgggggatgtcctgggagaatgccagtactttgaaatagcacagctattgatgagattttaagctgctgttcctggccagttgcaggttaagccccagaaaagttcaccttggagaagctccgagaacacacagattgtgtctcattcatcttcagacacaggcacatagtgtggcactttgttcagttaacatttgtggagctgtcatcagctcagctttaacaacacaggtgactctttcccttgataaagtcataggtaattcaggggctgggtgcggcggctcacgcatgtaatcccagcrctttgggaggccaaggcgggcggatcacgaggtcaggagttygagaccagcctggccaatatggtgaaacctcgtgtgtactaaaaataaaaaaattagccgggtgcggtggcatgtacctgtagtcccagctactcgggaggctgaggcagaagattcgcttgaacccaggaggtggacattgcagtgagcagagatcatgccactgtactccagcttgggtgacagagcgagactgcacctcaaaaaaaaaaaagtaattcaggggatcctagtggccagcttccttggctcgtatactggctacaacaagtagttttgtggtgatttgtggaaacagattcttgggagcatatcagagcatctcagcattgattggcacatccatagttgttaatgtaggaagggtgaccagcagctcagcacagtggcttgcttccagcactctgggaggctgaggtagaggattgtttgagaggagttcaaaaccagcccgcgagacatrgtgagaccctgtctctacaaaaaattttaaaaattaacttggcatggtggtgcacacctgtagtcctcgctactagggaggctgaggtgggaggatcacttgagcctgggagtatgaggctgcagtgagctatgaccttgccactgtactccagcctgggcaaaagagcaagactttgtctttaaagaaaaataagtagtagtaaagagtataagatacacagggtgaataattgtgacaaaaacacagaaactggaaaagcagcctgaaaaaatcaaatcaccaaaaagaggtcttgccaggtattcattatggtatgagctacagcataagccatcaagaggaaaactgatcaattattggcttttagaatattgctcattgaacagattattcaagtaatgaaagaggaggggaaaaaaatccagcacattagttaacctggcatcaattaatgaggtkctaataagctttgtcttatgatactacctggaggttacagagctggtattctgaggaataagcatcagtgagttggtcagatacaatagacgtttaaaatagggcttcaggccaaacatggtgccccacgcctataatgccagcactttgggaggtcgaggcgggaggatcacttgaacctaggagtttgagactagcctgggctgttaagctttgttaaccaagaccgcatctctacaaaaaattgaaaagtagctgggcacagctgatgcctgcagtcccagctatcctggaggttgaggcaggacgaccacatgagcccaggagattaaggctgcagtgagctataattgcaccactgcactccagcctggatgacagtgagaccctgtctcttaaataaaaaacaaatgaaagcagtggttttcaacatcaactaaggatcttattagaaatgaagactgcaagccgcacacctggagtggggcccaggaatctgcattttaaacaattccctggtccccagataagtaattcttaagtattctatcttaagtagacctaaagccgtattttgaccctgtactagtatgttattttagtataatcattactgaattcatcatacttttacagtaaacagtacttactttgartaataacacattacacttaatagtagtgaactgcatcctcgatatcaaaagcgacttttgatgtagttcactctggacccgtacaggaacaccagccttgcagattctccacgcaatggaaactggctataaccctacctagatctgaaaagtgaagggggatcaacctaaaatatgtagctttgtaaacagttttatatcctgcatcttaggggggaaaatcagttgacgcagattgaaaacaagttgttccataaggtttattatgaaaaacagtagccctcctaccctgcctttaccccactttccttgcctcacagtagtctgtccaactcttggctgatttgtttgtatttacctccatgtctcaatatgaacrtgttttcatgactattccttgatggttttttgtttgcttgttttaagacggtctcactcttccccaggcgggagtgcaatggcacaatcatggctcactgcagcctcaaccttctcgggctcaggtgattctcccacctcagcctcctgagtagctagaaatactggtgcacaccaccatgcctagctaatttttgtattttttgtagagacagggttttgccrtgttgcccargctggtcttgaactccggggctcaagtgatctgcccgcctcggcctgctgggattataggtgtgagccactgcacccggccaccattatcttttgaatcctctcttcctcctgcccaccatgaatttacttcctctcacccatctccctgatattgtaattctggttagatcatattcagtgtcaaattattaagatgtgattaaactttttaaaaatatgacagtgtcatagtgatcacagctgagtcatacaatagactagattactgtggaacttttccctgaaagtaatcctcttgcatttttatttgcttggttttctatttgtcactaattcaaccccaatcatatctraagatcatgacatcatttatcagttattattcttgacccaccccaatctggactggtttctccccgtgcttggtgtgtcactgtcaccctgggcactccccacactgctcctctgttggatctctgttttctgtgtaacctcttcttttatcaccttattttgggggagtatctgcatgtctaaaaatgtgctcacacttgatttgattgggtatgaaattctatgttggaattagtgccgggcgcagtggctcattcctgtaatcccagcactttgggaggccgaggtgggtggatcacacagtcaggagatcgagaccatcctggctaacacgctgaaaccccgtctctactaaaaatacaaaaaaattagctgggcgtggtggcgggcacctgtggtcccagctactcgggaggctgaggcaggagaatggcatgaacccgggaggtggagcctgcagtgagccgagattgcaccactgcactccagcctgggtgacagagtgagactccgtctcaaaaaaaaaaaaaaaaaaaaaaaaaaggaattagtatccttcagaattttgaagttatggctactttgtcatctagcattgctgtagagaagtctgaagtgattttgagtccagatctttttttttttttttgagacggagtctcgctctgtctcccaggctggagtgcagtggtgcgatctcggcttactgcaagctccgcctcacaggttcatgccattctcctgcctcagcctcccgagtagctgggaccacaggcgcccgccaccacgcccagctaatttttttgtatttttagtagagacggggtttcagcgtgttagccaggatggtctcgatctcctgactgtgtgatccacccacctcggcctcccaaagtgctgggattacaggcgtgagccaccgcacccggccagagtccagatcctttttatatgactttttttttttttcccttctgttatcagtgttccaaaatttcagaatgacgtattaatacctgccttggcgaaggtctgtttccatgccaggcccctttccgagtgaactcttgtccttaatttctgggaaactttcttgaattcattctcagtgattttcttccttaggttgtctgtggtttttctttttctttttttttttaaagactgagtttcacgcttgttgcccaggctggagtgaaatggtgccatctcggctcactgcaacctttgcctccggtgttcaagcaattctcctgcctcagcctcccaagtaactgggattacaggcacctgccccaacacccggctaattttttgtatttttagtagaggcagattttcaccatgttggtcaggctggtctcaaactcgtgacctcgggtgatccacctgccttggcctcccaaagtgctgggattacaggcgtgagccaccaggcccggctgtctgtggtttttctttctggaatttctgttactcagatggtggacccagaattacctctcctccctgtgtgccccaaccccaattttcttttcttttgatcataatttatggaggattactccaagttgattctctgattgttcctttatatacgtagatatatagggacagtaccttgttccttgttgcaacatctttgaggatattaatatgctctgtagaagctttcatctccctgcatatgtctttctgctttctgttcttcaatttaatctttcatgttacagactttctttagctgcctggcaatcgttggtaatcttgcttatatttaagagtggagtattaaaaagaatatgtgattgtaaggtgatctcattgagcttctttggggaaatccccagtgtccatacttctagaactttgctccaggctggacaggttctcttggagaaacttttggtttcacatcaggagggtttactctgagctgctggattgagagctctgttggggaagagggtgagaatttcagcattctagtatgtccacattcagttccttcatccaggtctctgggagggctcctagtccagaaaccttctaaccccctctggagaataagcttccaacttttttgccaagattggggaagtcaggtcatgtggaaatatgaatgtttcagcatgcttttgctttttttctttgaaaatatattactttaaaatgaagaataagactgggggtggtggcttatgcctgtaatcccagcactttgggaggctgaggtgggcagatcacctgaagtcaggcattcaagaccagcctggccaacatgacaaaaccstgtctctactaaaaatacaaaaattagctgggtgtggtggcacatgcctgtaatctcagttactggggaggctgaggcaggagaatcgcttgaacccaggaggtggaggttgcattgagctgagatcgcaccactgcacaccagcctgggcaacagagcgggactctgtctcaaaaagaaaaaaaaaagaataactcagatttaaagaagatatagactaaaggatgatgtcataaaggtaattagaccagtatttaacatgaattctgagcaggacacggtggctcacgcctgtaatcccagcactttgggaggccgaggcaggtggatcacgaggtcaggagttcgagaccagcctggccaagatggtgaaaccccatctctactaaaaatacaaaaattagccaggtgttggggcgggtgcctgtaatcccagctactcaggaggctgaggcagagaattgctttaacccaggaggcggagcttacagtgagccgagattgtgccactgcactccagcctgggtgacagagcaagactccatctcaaaaagaaaaagaaaaaccaaaaacatgaattctggttctgagtgccaccgtgaccacctctcccagcctctggttggttatctgtacaagggtggatgtggactcacttgattcactgatactatcccagcttctacactggtagaaccataaccttaaaaaacaatcaaagcatacaggagtttttctgccactagccaagatgaaagtaattgatttatcattgtgtctgaaaaaacacacacaaaataatatgaaacaatggttttcaagacatcagacattgaaggagactaatccctgagaaacgagaaataaataaggggagttgtacaattgccccagctcactgcttacaagagtctccaagctgtggcacagggaaggggactgaagctgacctaccagcctgcctgcattgagaaacgagagctaagagttcagagaagccaccaaggcagctaggactataggacagratgtcaagagaagaaagccacacagagaacccaagagatctgcagcgggttgcttttgaacattcagcagaatactgatgagcacaccgatgtgaggaagttaacaggctggggaagacccataaagaattggaacagtgcttggcgtcatgctaggctgagactaaacattttcctatcagtcagacaagaaattcacaggatatggagtacagtgttgttttaagatgyaccatatctgattttgttttaatcaggtatggtaagacccagagacagctgccttgaaagaatgtattacagttctcaaagaagggggcaaaccacgttacgtgggccatatggggagacaccagcctgagtcaggaggcagaaggagcaatggcagagcaagacccagagccttcattgtagttttctcatgaaggaatgagtgaggcagagtaggcaagtttgagcaagtttaggattggatagtctgaataattttcaactgggttataagtggtctctgtaaagtaccttgccctgaggtgattgagggtaaaggaaatactggcttagtgtatgagagttagataaaggaggcagttttgggtgtggactttggattgtttggtttgtacatgaaagacacgctgccagcaagttgtttactatctctaggaattagctaaccctgggaggagcatccttcaggattagcaaggcccaagataccaaagcatcataaaacagaaaacaaaaggcatgattaatacaaatatccaggaaggccttgcctggtaaatgaggaataattagcccaagactgagcgctggacctgaataacaagtcataaaaacaacacattaaaacatgaaactgtttttccggaccaattaaatatatccaagaataagactcaaaaagatttataggaatataaaaatgtccagtaccccacacagtaaaattcactgtctggctccagtcagagattgctaggcatgcaaagatgcaggaaagcacagcacataatgagattaagagatccaaaactacacagatgttagaattagcaaagaaggacattaaaagttataactgtatatttcaaaagctgagcagattttaaaagaagactccctgatttcaagaattactatagagctgtactcatcaaaacagcatggtatttcatcaagttaagcaaatagatcaaaggaacagagtctgaaaacaaatccacacatgtatacaaaatgagttttttcaaagccacaaaggtaatgcactggagaaaggatagcattttcaacaaatggtgccagaacaattggatatctgtatggaaaaatccctcaaaacttgggtctatacctcatgccatacaaaaaaattaattccaaatggatcatccacttaaaactataaaacttctagaagaaatgtaaccctaaaccttgggttaagcaaaaattcagatataataccaaaagtactatccatgaaagaccaaactaatatattagaccaccaaaataaaaaactgctttccaatgacactgttaaaagactaaccacgaaattttggcaaagctaagtctaataaaaaatgtgtatccagaatatataaagaatttgtggccaggcaccgtggctcacrcctgtaatcccagcactttgggaggccgaggccagatcacctgaggtcaggagctcgagaccagmaacatggagaaaccccgtttctagtaaaaatacaaaattagcccagtgtggtggcacatacctgtaaccccagctactcaggaaggctgaggcaggagaatcgcttgaacccaggaggcggaggttgcggtgagccgasatcgtgccattgcactccagcctgggcaacaagagcaaaactctgtctcaaaaaataaagaatttgcaaagctcaataataagacatggggaaaaaatttgaacagacttgagaagatacagatggcaaacatgcacattaaaacatgttcaacatcattagtcattagggaaatgcccaagttaaagccagagagatattgctacacacccagaagaatggctaatgtttaaaaaactcaccatgctatgtgctgttgaatatgtaaagcaacaagaactcccaaacactgctgatggggatgtaaaactgcaccaccactttggaaaacagtttgacagtttcttaagacattaaaaatacatctaccttatgatccccacattccattcctaggtatttacccaagagaaaaggaaatatatgtccatgcaaaaacttatacatgaattttcatagcagctttatttgtaatagccaaaaactggaaacaactcaaacatccatcaacagatgaatggataaattgtggcacaccgtccagtgcaatactcggcaataaaaaggaactactggtacacgtgagtgagtctctaaataattgtgctaagtgaaaagccatatagaagagagtacatccggctgggtgtggtggctcatgcctgtaatcccagcactttgggaggctgaggcaggcagatcacttgagatcaggagttcaagaccaacctggccaacatggtgaaaccccatctctactaaaaatacaaaaattagctgggcatggtggcatgctcctgtagtcccagatacctgggaggctgaggcaggataactgcttgaatctgggagggggaggttgcagtgagctgagactgcactccagtatgggtgacaaagtgagacttcacctaaaaaaaaaaaaaaaaagtatatcctatatgattccatatatccccaaatctcacaaatgcaaactgtaaaaaacaaagcaaatcaatggttgcttttggatgtcagtgggcatggagaggcgggagggagggattaccaagaggcatgacaaaactttcggggtgacaggtacatttactatcttgattgtgatagtggcttcatagatgtatacatgtgcaaaatgtatcatattgcacattttaatcttgtgtagtgctcggaatgtctactttttgtgtttcaattatacctcaatgaagggttattttaaaaaataaaatatttttaaaaaacaagccgagcgcartggctcatgcctgtaatcccagcactttgggaagccaaggcgggcagatcacaaggtcaggagttcaagaccggcctggctaatatggtgaaaccctgtctctactaaaaatacaaaaattagccaggcatgatagcagtctcctgtagtcccagctactcgggatcctgaggcaggagaatgccttgaacctggtggggcagaggttgcagtgagccaagatcatgccactgcactccagcctgggtgacagagtgagactctgtctcaaaaaaaaaaaaaaaaaaaaaaaagttgtgcatagttggaaaagaaaatactagatttcatgggtgattggcaactagctctaagtggaacaagtgcattttcctttccttccaggtcccagagaaaaacctccatgctgggttgatagcagcagctaggatcagttgcccaagactctggattctcgagatgaagaccgtcagcagaggctgatctctcctgtgggctcatgtcctaaagcaccttatttgggctcaaatatcctcccttttaggacagaaaagaagttcccgagtcttggtcatgttgggcctgtggagcacatcatcttttctacgtgtttccttttgatgttctcagcatccctgcaagatgttctcagcatccctgcaaggcaggctaaggcatgaggagctataggcccagggagctgaaggcagattctaagagctgggtgtggatgctgcacccctgagcctgggccgcctgggttttgctcagtctgggaagtacttccaaacccactctttgctagtcttttacaatcctgcgggagggcaaagcccagatcatcatggctgcttccaccatgtagctgcagatcaggaaactgaggtccagggaggtccttactggctttgctccagggacaacgaggcttgaggtctgttccccacaggaggaccatgatggttctcctgcttcaaatggcccctttggaaggggcttgctcatttaggtgaatcctggggccgagcagccccagtgatagtccctgggatggctgtaggagagggagcagcatgcaggcgttaacgtcacagactggcaccaggccacccgggcttacactctggctcctccagttcctggctctttgaacttggacaagtaatcccctttctttattttttgtttttttgagacagtctcgctccgtcacccaggctggagtgcaatggcacaatctcggctcactgcaacctctgcccaccaggttcaagcaattctcctgcctcagcctcccaagtagctgggattacaggcacccaccaccacgcctgactaattttttttttttttttttagtagagatggggttttgccatgttggccagcctggtcttgaacttctgacctccacccgcctcggcctcccaaagtgctgggactacaggcatgagccacgccgcctggccaacaagtccccttaacctctttctgcctcagtcgactcacctggaaaacagagcacctacctccttcaaatgagaagagaagtaaaggagtataaggccatcagaacagtacctggcccaagggaggctatggaagtgcttgttgaataaaaaaatggcttcatctctggcctagccccaaaggtttgagttcctgccattgccacccagacagccctgggtggaggccctgctgacattgaagagtgcctgccctcctcccctcaatgcggtagacactttccaaaacttacgtcatcctcactctcactccagtgggataatgggaggcttggtgtacctcattcccaagatgagggaacaggctctgagaggaccacatcgccagcaagtgacaggctgggaccaaggccaggcctgtctgcctcctagactaggcctgagtgaggaccggcctgagtayggcccacctgcttcctcctccgtttagagcttgggctggagctgtcctggccagtgctctctgcctcaccaggctgcatgagccacaagctgccacttgtggagctcggtggccctgccctcgacagccttgctggtggtcgtgaaggctctaaacacctgcatggcaatgaggccaaccttctccgcttgatccgtttcaggctctggctccgctactgcatcgtgtgcttctgtccaagaggcagagagactgaaactatctgctgccgcctggattctcccagagattgcctggaacaccagctcgggtcctcgcacaccatcctggtaggaatctctcagtgacaattgagagtttgtgggctggcttagggccagtggtgggcagggagtcagcagggcgcaagggactggagagcttggcatttctccaacaggagtttcagggagagctcagaggcctgcttatgtgacaggtttatcagcttgcctggcccagggccggctctcataccgttttgatttaaataatagattgctcacagaataaatgtatgttggtttaagctttcactttctcataatcctctctgctggcccctcccaccatctaccccattttgcctcactctggggagcctgaacaccctgttccagagtaggggcatagggaaacacttctatggcttctgagctgctgggcagggccagtccctaaaacaaggagagctgggagggagctggaccccaggatggagtgctgagagctgaaagtcctatttaacagaggggagggagcagagatcccaaaaagggaaaggcctggccaggtcccacagcaagtcaggagcagagcgggcctgaactgtgagatctccaatctctccaaagcctttgggtaagaagtccgcctaaagcagtgagatcagtggggtctgaggaaaatccttttcctcactgcctccatcccagtcctgggacccaacaccatcctgtcctcaccctccttggccatctccttttgccctgagaagctgttatgcatccagccagactgggaatgtgctggaatccatgcaccacaggggatggatgcgccgcttacagtccctgtgggccatggctgtgagggaaagtcagagctggtggctggggtgtgtaggcccaggaggacccctgcctcctccttagccttggagcccccctctgctgctgagtctttcctcatctagcagggccccactgcccccagaccttacctcctggcttagcacatgacttccccactctgggcctcagtatccccccggacatctctaaattcctttcccgcctgccctgcctgtcttctggttgggctgaactgtaactccccacacagggctgagggtgactgtggcattaggcttctggctgggagcccaccctgatggtgcttggggaggaagggagacacttccccctgccaagggcagccctaggactactctgcccccaaggccccctgctgctggtgatgcgcacctccacccgctgcatgctctcccacacggggactcccacacggggacccccagggcctggagggaacacacaagcactttgtctctggcttgctgtctcctaaccccacagagctgcccctcgccaagtacaagaggcctggggctgggtcctgagggtggcaagcagcactgtaccctgtgggaggcaggcaccaagtcctctcacttagtcggctgtggcccctgcctctggtctgtgcagccttgtcccctgcccagagggctgtggtggtgaggctggcagcctgggctcagacgtgagcttgctgtggggctccatgtagagctttgctcctcctggggctcccgacccgctccttcgcagctccccttctcaaggagcccaagccctgcccagatgtgagggcccgctccctggaggcctcctctaactctccagcccacagggatggacccaggacccccacatcttagactccatgggggacttgcccaaagagcacctgggggaaggtcagtgtgacctttgtcccacccttttggatagacacagccaccctttctccccaccccagcagcagggctgttgctcagtgaccctgaggttggtgatgcagaaaagcagaggcgggtgtcactctttattgcggggtccacactgtgggtgctggggcccctcccactgagggaaggctgagcctctagccagggctggccacctggccacctatgagtccattcttctgtccccttaatctcaggctgagcatttacactggatttctgggggcctgtgagtcctccttgaccttcatcgcccactatcatgtgcttgagagcatcacaagtcagtagcaatgagccaggtgggtggtgggtcacctggcacagcaggcctggggctcgggtcccagcccagcagctgtggagtcccaggtggaggcaggggtggtggccccggccgcactgccctcaggctcaaggtccaggccctcgtagatggtggggagtgaggtgcgctggctcagccgccggcgcaggccgaccagcaggggctggggcagggaagccacatccacgttgttgcccaggtccacccaagccaaagcagggaacttggtggtgtccttgatggcatcagtgagcttgcgggcagtggcccgcgtcagtcggttgccgttgagcaggagctgggtgaggcggggcagcgcccacaggctgggcagcaggaggtgcagcagctcatcactcagccccgtgaagctcaggtccagcaccgccagcacagcaccatggctgctcaggtagcgtgtgatgtgttgcacgtcctgtgtcgacagcgggatgcctgagaggtccacagtctcccctgccagcagagtcttctggaggctgctcttgaggctatgggagagtggcaggtggggatggactaggcaaccaggcagtccccccactgaccacagacagtgacctgtcgggaacagcccaggcctacagtctggcaaagccagattcaaactgtgtctttcgtattttttgagacwaagtttcgctctttttgtccaggctggagtgcagtggcacaatctcggcttacggcaacctctgcctcccggattcaagcgattctcctgcttcagcctcccaagtagctgggattaaaggcatgtgccaccacgcctggctaattttgtatttttagtagaggcggggtttctccatctttgtcaggctggtctcgaactcctgacctcaggtgatctgaccgcctcagcctcccaaagtgctgggattacaggcgtgagccactgcgcccgggcccaaactgtcactttctaagtgggtggccatgggcaatgctcagaggctcagtttcccctttggtgaaaatgggacgtggttgttgtgaggattaaatgcacacacagtaaggctctttcttcatgaactattatttgaaatctcactgtgtgcccagcatcccacacctgttttattgacatctcacttatttttcagataggtgaagtaactcttccatggccacacaccactaagcggggaaccaggtcctcaaactgagatgctctgactcttgagcccacatgtttttttccctgtgccccttctgatgtcgattcttttagggtagggagaaattctcctacaaagggacggctattaggctgtacagggcaccggggatagagagggacaggcccacagtagtgaaaggggaggtcctgggtgtgcaggctgggggccggccatgagggagggctccccgtgttttctcagttagaagggaagttcagagactgagaaggacccccgcccccaccaaccctctaggtctctccccagttatctgaacagagcccactaggcagacaggccttttgggggactgacagcagtgagcacaccctcaggacccccaccagccatggcagggaacaaccttgtggggtccaagctcagcgtggcctattaggcccaaggtgggacaggggtggagggcagacaggggaggcctgctagggtaagctcccggcagcagttcaggcctctgggcctgggtgcctgtggccagctctggactgagcctgtgtgtgaggctccatggatggagtcactccaggatggagtgtctgagagggacccatggcagagggagctattgggcagccacggaagcctcagttttaggcagcctggcagtggcaaagaattcccaacaaggtacaggaaaatcagggtagagtgtggccttaggcaagccacttctccgaacctgtttccttccctctaaaatgagaatcgcgatccagaatctgcctcccccgcaacctgttgggaagtctcagctgaagatgcctactgaggtcaccttggctgttgggtggaggggtggggtgtccaggccgtgtaacagaccagggattgagggatgtatgaatggcaggaggcaggaccgtcctgtgggaaatgccaaacgggtcactcagagggtgcagcttggcttggggagcatctgctaccacgggccaggctgacttccagggtagggccctcatgcggaccaggtragggcctcaccaggtgggatttcagcaccagcctcttggtgagagtgcaggtgtcaacctgagaagggaccttggagcagcagtgaggaggggcagtggctgggctacccttaccagckctgggtcttcctctggcgcaggctggacccttgctgctgcttcgagtgaggggtgaggtggtagatgagctgtcggcagatcttgtccgaggacttccagagctcatagtcctgtgggagggcagtgtcaccatggtgaatctgagcccctcctgcccacctcagggccttggggagagggacccaggcagccaagtgtgtgtgtgagcacagtcatgcaccatgcatcaccgagttgcccaccagggcctccccctcctaccccccaacccggctgtggcctggcacagagccaggggaggctgccctctgggagctggacaggctggtccagtcccgcagtgcccggcgggaggaagcccagacaatgagcccttgttccctgtcctcgggcccagggccagcgtctcgggctatcagccggctgcctgcccaccctcagcacccttcggggacttgccacagggggaggaggccagaccaggcccctcgagggagccgtgctccactgacgccaatcccagggagtaggaacaagccaggtcagcgtgttcttcttcctctcactctccaagcgagactgcgcctgcggggtctgggtctgggctgacagggctgggggatgtaatgttttacagcaccaccacctggctctctctcagtcctaactgggctccggcagaggcccagctcagggtggaatccgaggtgcgcggcccacaaagctggcactgagcatgctccactgcatcctttatccagtccctctgtgagcagccccaggagcaggcagcacacacagcagctgcaagccctggctgttcctgtgatggccgtgggctaggcgcagagtcctaggggccgactgtgcagagacctgggcattcagagctggcagggcccagagcggataccctggttttggttggggactcactgtgactaggagtctgggtccggtggctggtcacagccacacatcctggggctgtgtcgatgctcatggcaggacatctgcaggtgctgtcagcatggggttctgggcagctgtggggtggaggctgcaggtggcaaactcccaccccagcaaggaggagggccttgcttatgaccccagctgttgtaggggaaagcagtgagcacccgtccgcaagggtgtctgtacaggatggagacctgcggacagacgggggctctagccgagagcggctctcttctggcccaggaattcagaggctaggagtttgtttccgttggtggatttctcagaacagtctgtgacccgcagggtccccatatgacttctgcccagctatagtcttcctggtctgggcccccaggcctggtgcacagtgctgccacacagaaaatgggtctgcccaggactctgagggtcctgcaaagcacagctcacacttgctctagctggtggccagcctaatatactgatgctggcagcaggtctcagacagggacagtgacttgcctaaggccacacagcaagccgcagaaggacctagcctcccagtccccagccctgggctctgttggcccccmtgtccaccacagtgcccagcccagggcccgtgcctgccagcctcaccttcttggggcactgcaggtcccgggccaggttcacaagcaggtcatgggakatggggtcgaccgggttgaggaaggccacatctctgtagaggatatcaggaaggagggtcctctcaaggcccaggtcctgtgagtggtgaagagagagttgagtgagcccgttgggtctcccatctcgaggcaccaccccagccagccagatgctgcttatgcccgttcctgtctctccatctcctccctaaggctggctggattctccccacaggcggccatgggccaacagtccagtggcgggtggcccccttctttttttgcttatttattttttgagacagggtctcgccctgtcacccaggctggagtgcagtggcgtgatctcagttcagtgtaacatctgcctcctcaaggaatcctcccacttcagcctcctgaggagctggggctatagacaggcaccactatgctcagctaattaaaaaaaaaatgttttgtagaaatggggtctcactatgttgcccagactggtctcaaactcctgggctcaagcgatcctcccaaagtgctgggattacaggtgtgagccactcagccttggaggaccctttggataagtagaggggagggacatgggagccctcagggaagtggtaagtgaatcccagaacccttagaccagttcccttgaggtagtgttgtgctgtgacactgccttctctggggttaggacttgtcagtgggattctttggggtctttcgtcttatggtgggggggtttgctcttcttatgacccctcaaattcccctgtcccccagtgttcccttcagatcctctgccttcccacctatcccttggttttcctaagctgcggccagcatctgtttgcggacaggtatggatccttcccttgggggcggacctctctctcagatgtctcaaaggcatgccaccctgaagccagcctcaccacccatgccccagctcagtatagggcacctccatgaccatcttcccaggcactggggccagaagctctggaaccccccagcactcttccgtcctcctctctcccccagctcacctagtcatcccttctctctccccaccactcctgccaagattcaggcctccagcctcctctcctacccatccctcaccccaccgcctgcatagacctgccctggccttcctgcctcactcctccactttctcctcctgtctactcccacaggactggtgtggggctgaatactctttcagagggtctctttgttttgagacggagttttgctcttgttgcccgggctggggcgcagtggtgcgaggtcagctcaccgcaacctccgcctcccgggttcaagcaattctcctgcctcagcctcctgagtagctgggattgcaggcatgtgccaccacgcccagctaattttgtatttttagcagggaaggggtttctccatgttggtcaggctggtctcgaattcccgacttcaggtgatctgcctgcctcagcctcccaaagtgctgggattataggcgtgagccactgcatctggcccagagggtctctttagaggacattttgagagctgatggggcagccacagccaggaggggcctctagaccccatgtgggccttctccaatccataggtgatatgctctgtgcgtgggtcccaagcacaggaagttgggccaggcaggggaggccgtgggtcacagctgcagggtccctgcaggttatggagcaggataggccccggctggacctcaaatcccaacctctgagacacaaagaggtggtctctgaggatccttctttccctctagtttcccagctaaaatgcccaactggtgtcttggactccaggcagcatcccagactgagatctgtgcctctggttgtctggctgattcagtgctgctctgctgtttgccacagatgccagctagggaagatccaggaggaaggctggctgatgagcctggcagacccagacagggccccagaccgcaacctgccagcctgccttccatgggtctagacagctcctcttaaacggacagctccatttttccagcctgctgaatccagagttggaggaggtggagaagggaagggaggaagaagggctctggccctggcttgccccacattttctctgtgggccctgggrtgaccacttcgctccatgcctcagtttccccatttctaatctaccttctgcaggccgaacacctgcatggctgacttcctgctcacaggatggggcaggtagtggtggtagctgctgtagggggtggggacggggtggtgagggaagtggcatgcccaggtgattggggggaccagcatcctgggacaacccaggggttgggatctgggtttagtgtacctggtgtgtgtaggagcagagccaccaccggaccgagtgttgtgatgcacagatgctggggatgtgtactctaagggcatgagccgcctgttggagaactggtgatgcatggatggctctctgtgggctgccatggtgtcttggggtgaggctgcatccctagaccagccctgggtcctctctccagggtccactgtctcccggatcctggaggagggggaagttaccctcttccattgtctctcaatacaagatgatttgacctcacttgccactcctcccgggcccctcccatcttgccagggcctgaatttgggctcttaggtccaggctaccgggccaccctcaacacacacaacccctctcaaaccccaaagacccggacacactcagcagccccctcctccacacggtccgccgacctcacccagccctcactccaggcggtcgccctctcgcccacgcaagaccccgcgtgctgcagcctgtcgcgccctcggaacccgcctgcgcgcgccagagaccagctccgcctcgcctcccggcggatacaggcccacaacccatagccccgcgcctcccagacccccagacccccagaccctccctggccgccagcccaggggcggacggctccttctctcgcctggcgcaggaggcgcagcagctgccgggcgcgctccggccgccgctcgcggagcgtggactggatctcgcggagccaccgcacccggcgytcgtagggcgcgggcccgcagccggccgccgccccggcctcagagccagcctcgggcccggcccgccggcccagccgcgcccccatggccgccgcgcgatggtcgccgaacccacaggaggccgggctgtctgcgccccgctcccggggccgcccctagtcgccccgcctccaatcaccgcggccctgccccgtccgggtccgaaggctgagcgcccgccccaccccgcgccggagcgaggccagtgggttcctcggtttggcctgatcacactggaggaggccctgcttgcgtcagtcttggcgctagaacccgagggcctggagccgccaggggagacgcggagctcggccgagacgaggtggcttttggcacctctttaccctctggccccagtgctgactggggaatagtcgctttgaccgtgcaaagagcattctaggcggggtgggggggttctgctgtgtgtgccagtgttaggtattgcccccattgcttttagaaatatgccctgcatggtgaatctccgtctctactaaaatacaaaaattaggccgggcatggtggctcacgcctgtaatcccagcactttggggggccgaggcaggcggaatctaaggtcaggagttcaagactagcctggctaacatggtgaaaccacatttttattgaaaatacaaaaaattagccgggcgtggtggcgggcgcctgtaatcccagctattcgggaggttgaggtaggagaatcaattgaacctgggaggcggaggttacagtgagccgagatggcgccaccgcactctaccctgggtgacagagcaaaactctgtctcaaaaaaaaaaaaaagaaaagaaaagaaatctctgcagctggcagttgtggtgtaggacctgctcacgctacatggacactcctgcactggcaaatatttactgcctcctgcttcttggtttggggcaggcccccacctctgaccccagcctgggaaataaaccggaygaagagtcaggttaaccgttaagcccagctctgggcaagctggcagcaggcgggctgtatctgccgctggcttcagtctgcctccctgacaaggggtgggggtggcggcaggcagagtgagatgggggycctggctcctctgaggaccagggtgaggtacggacccacccagctcaaggtgtatcccacttcccagggctccctcagcagaagcctaggtctctgctgcaggcctgctgggcccctgcagccccaatcccggctctgggacgctcacatctcctgcgtggggracgtttgaggcactgatctgcagttcccacttctctaagcaaggagcacgtgtttagcctgtgaggactggtacctgttgtgcaggaagggctgagcactgtccgagggcatatatgagggacgacagccaagcwcccgtgtgtrkgtgtgtgtgtgtgtgtgtgtgtgtgtgtgtgtgtctgctaattaccctatgaagattcaaggttccttcctttgggttaagcactgcctgcccagagatggcagtggggagagggcagggtgctaggctctgtcatcctgtggggctgggcccctgagacaaggcagaggacagcaggatgtcttagccccttgaccatccacggacccccaacccctgctggagcagtgcttgcacccccttctcccctggcacctgccagctggacccaacagcctctcctcccactccagtgcagccagcattgtcctggggccaccttggcaccacaggtttcctccctggcaaacctgcatgacggccttgcgtgccctcccccagggccaaggcgctgttgctgaactgaagtggcaacctacscggtcagagctttaagctgcagctctgatgccccagggacctctcagacccccctgcccagagcaggcagcccggtaagccctcctcctcttcccctgcagcctcagggctggagccacagctgggagggctcccaratcctgaccatatcctcccagaggctgagccaggcctgggcactgtcccctcaaatgtgagaatactgggcagggggaggggagaaaggagggaatggagggctgagcctggaggcatgaaaggggcaacctaggcagcggtatgggggagtgctcagagcttagagtcctgtggaaggcagagaactgccccagcccctgcctctcatcccccaccctctgtgtccctggccgagaggttcctggaggacatttttccagcaaaagagggagggtggtgtctgggcctagatccttggatgggcttttctctgcctgcttgtggggtgcctagggcgagtgggcttttggagacaatttctggcctaacctgacttggacagcagcccccagaggcacagctctcccctcaggcatgggggcatgattccacctcgctagcccacatgtgttcttcacggagggctgctggcccgtctccctggggttaccctgagcagcagagstgtgtttgttgagactccatggggtggagggattgcgatgttgtcctctcagttcccggggctgatgtggaagctcaagggcttgccctggattcttcagggtagccctgccatccctagtgagtcagtgagttgggaggttgggggctggagaatcaggtagggaggacacagctagacctcaggccctgatgggaacgtactaggctccaagtgggacctgccaggagacaagaattgatgacagccacacctttggagtctcaagccctctgccacccatgcggtggcctagttcaaatgacaggaacacaaggtccagctggcccaatgggcaggtagagggctgcagccagggctggaactggccttgcactgcctctgggcccttctctacccacccagtagtattgttcaagcccaggagggaaaaaggccagctcagggttaatgttacctcagcaagtagctgrgtggcactgagcctcctggtagccactgtaaagaaggacacagaatggtttgggggcattcgctaggaggaaggaagcagatggatactctatggagacagaatgtcctctgtgtttgctctacaggaacgggttgtcaaccttctgcagggccaggaattgtcatgaggctgtagtaggcagcagagcttggcggggtgaggcgagatcacaggtataggctcagggcctggattcaaatcccctgggctgccacttgttggatgtgtaaccataggcagagtaaggacctgccatagcaaattaccacaaactcagtggcttaaagcaacagaatagttctggaggctaaaagtctgaaatccaagtataggccaagccacactccctttgaggactccaggggaagatccttccttgtctcttcagcttctggtggctcctggcaatccttggccttccttggctgctgctgcatcactccagtctctgaaaccatctaccctatgtgtctgtgtggccttcacatggcattccttatttttgcagtggggtctcactatgttgcccaggctggtcttgaactcctgggtccaagcagtcctcctgcttcagcctcccaagtagctgggattatgagtgagtgccaccatgcccggctcacatggcctccttgtaataacgctagtgcctgggtgcggtggctcacgcctgtaatcccagcacttttggaggctgcggtggacggaccatgaggtcaggaaattgaggccatcctgtccaacatggtgaaaccctgtctctactaaaatacaaaaaaaaaaaaaaaaaaaattagcctggtgtggtgacacatgcctgtagtcccagctacttgggaggctgagacaggggaatcgcttgaacccgggacgcagaagttgcagtgagctgagattgcgtggtgacttcactccagcctggtgacagagcgagactctgtctcaaaaaaaaaaaaaaaaaaaaaagaactgaagctactggatttagggctcattcattctttttttaattttaatttttttttttttttgagacagtctcactctgttagcccaggctggagtgcaatggcatgatcttggctcactgcaacctccacctcccaggttcaagcgattctcctgcctcagccttccaagtagctgggattacaggtgcccgccaccacgcccagctaatttttgtatttttagtagagacagcgtttcaccatattggtcaggctggtcttgaactcctgacctcaggtgatccacccctgtcagcctcccagtgttgggattacaggcgtgagccactgtgcccaacagggctcattcattctaatcccgtatgatctcatcttaactaattacttatgtagagactctatttccaaataaggtcgtgtgaggaaaaaccaactcaaactgtgttttttggcctggcgtggtggctcacacctataattccagcactttggggaggctaaggtgggcggatcacttgaggctaggagtttgagaccagcctggccaacatagcaaaaccccatcttcactaaaaaatacaaaacaaaaattagctgggtatggtggcatgtgccagtagtcccagctactcaggaggctgaggcaggagaatcgcttgaacctaggaggcggaggtttcagtgagccgagatagcaccacggcattccagcctgggtgacagagtgagactccatctcaaaacacacacacacacacacacacacaaaacaactgtgtttcgcctctgttctcacaagacaataatcatcacagaagacttcttgtaaccaaatttgtggattctcccacacacccagcaagaatcaattctgcagcagactccagctggtgtcttccaattcaactcaattctggtgctgtctacctggagatggcctcagaaaccacaggttgagggcttggtcccacaagaccaacccccatcccaccagtcacaagtctgggcattgggaacatctgactaactggcttctagttggggttccaaggccccctctttgggttcaattaatttgctagagtagctcacacaactcagggagacctgtttatcggtttatttcaaaggatgttttattttattttctcctcagacatactttatcatcccttaaagtcagtagctcaaaggaaactttaaaagctataaataggccgggcacggtggctcacgcctgtaatcccagcactttgggaggtcgaggcaggtggatcacttgaggtcaggagttggagaccagcctggccaacatggtgaaactccatctctactaaaagtacaaaataagctgggtgtggtggcaggagcctgtaatcccagctactygggaggctgaggcaggagaatcatmggttgaacccgagrggtgcaagttgcagtgagccaagatcacacctctgcactctagcatgggcaacagagcgagactgagactccgtctcaaaaaaaaaaaaaaaaaaaaagataaaggctacaaataaacagtcagatgaagagatacatagggtaaagactggaagactcctaagtacagaagtttctgtcctggtagagctggacacatggatgagttggttttttttgttgttgcccaggctggagtacagtggcactatctcagctcactgcagcctctgcctcccgtgctcaagtgatcctcccccctcagcctcccaagtagctgggaccacaggcatgtgccactatgcccagctaacttttttatttttgtagagayggggtctctctattttgcccaggctggtcgtgaactcctgggctcaagccatccacccacctcgccctcccaaagcgctgggattataggcatgagccactgcacctggccatggatgagttcttgttccccttcctgtcagcctccacatgaaactccccaaaccctgtcctcttgggccttttttaaaaaaawtaattaagaaattaaagacagggtctctctatgttkcccaggctgctcttgaactcctagtctcaagtgatccacccacctcgtcctcccatagtgctgggattacaagattagagatgccagctgtcaggtggctaggtggattcagtgtaaagtcctagaagatgcattttagtaaaaacagctagccacctgacagctggcatccatccattcagtgaagattgttgggcactgtggatactgtggaggaggcagcagtcgcagccggcctgcagagtgagatgcagtgccagagggcttcaggaggaggtggcattgtgattgatgtctgaagagtgtctccatgataatggagtcagtgcaaagtcccaaagactgggaaggagcaagaggaaaggatagctcatatccagctgccccactccaaaaaaaaaaaaaaaaagaggaaaggacgggcaccagcaaggtaggacaaggggggcctctggagtgttttcttctcagttggggaggggtgtgctcagatttgcatgccaagtgcctgggctgcagtagggaaacagcagaggggctgggacctgtgattgggagtctccaggtgagagggttggcctatggggactggaggtcaggtgaggctggtagtgggttatagaggtgggagcagctggacaggcccagtgaggatgcaggggtagctgcccagggctagactctggctgctctggtggcagttgcttagctcaggcttgggcaygtccrcctggcgcatctgaaacattagccagcagggcgcagactcgtcagtgagagcattcctgagcccagcatccaagaagcgagggaggtmgggaaggtgctgctatgaggcagggggaggtccccaaaagtccaggtgagagcatggcatgcgtggaaagtgctgcgcagttttggcatcagtgaagtcacagggggctgtgggtgaacaggtgtgcttgggcatgtcaccagggaggccttgagacaggagcgggttggctttcctggagatcaggctgtggcatggtgtcgggactggggcatggacagtcttcctccacccccatcccctccttggagctttcagacactgcagataattaccaggtgatgtgataaatactacctgtggagggtgccttgggcagggaggacagggcggccaggaggggggccctttgggcccctgctctgagctgctcatcaggaaaggggagaagctcctacaggcctggtgttggagcctagccagaccctgtgaggccttgaaagtaggaggtgcattgtctgtgcattgtcatctcaaggaatccacccagcaactgttctagttatccctgctctctaggtaggagactgaggctaggaagggaaaggctgctgtgatacccacactatcagtggctggggttgagtttaaacccagggactctagggcccatgcctctgccatcctgcctctgagttttggagctggacttgttccatcaagtgccaggccagccctgctrctgggtgctcccaggcattcacaagctgacaattctgaagggcccacgcacttggccatgcttcagtctgtgtcctgacatcacaggtgggtgctggaataacaaatgctacaaatggcactgggggtgttggccaggctctgrgggcacaggagttctgcccatgcccacagctggcctgtgctgacctccctccatcacagctgagtagcaccagcacttccattgagctgaagtcttcctcccattccttcagtgtggtctttgtggctcagagaggctgtggccaggtacaggatctggagtggcccctgcttctctgctctgtgaccttagacagtgggcaggatctgaggccaggcccacctgcagcaggtgttacaaagaggcaaattggcgcttaatgttggtaagaacttgccagccaaccagagtcccactatctttggaggtagtgagctccccattggggaaggtatgtaagccaacctttctgggatgctggaagatcagagagcaaacacttgagattctgtgatcctaatattgamtccaatgctatgatgtttggatttgaagtcagttctatttagccagtttaccaagtgtctccttggtgcaggacaccaggagacacaaaatgtcctrgataatattgggtttctggctcccaggggtccctgagatgttgttccagcggttctggagtatgggccaggcaccgcttgcatctggaccgatccgcattgttcgatcattgtgagcctcatgatggcagttcgggatgtcatgcccccatgcgccccccaaccccaccccgccatggccctcaccatggcccactcagggcatgaggctttctgggtgattsctggtattcagtgttgtcagcttcttggacctgtcagtgggggtggggctgcaatgagatgccagttgcaggaagtggtttgcacagccttcctggtgtcatgggtcactctcttgccgagtggctttgggcaggtcccttcccctctcaggctgcaggttcctatgccaggagctcccttcttgccccaccagggccttgttttcccagatacagaggtggggcagatcccagcccgttgaaacagactgggctttggaggccacagtgggcccatttctcagagggactgtgtggctggatgctgagccaggcactggactggccctttgagcctcctgtctggccaaggcccctgaggcactgtgggctgctggtgccagcacacaagggtgataaggagatgaaagtcactaggatggtggggcggcacccgccccgggctgtgttggcagctgcccctggctggaggccagcttggccctggaaccctcctcaaggaacaaggacacaaaagagccagctcagccagcctctacctagcaccccaatcagcactcccttcttcccatgacccctaccctctgcccagctcctgtaactggccaaggagctaatggacacccaccagggtcttaatgagtgagccagggttaatgggttactgggcccggtgacacattcaccagcctcccagggctctcaaagtccacactggcctggccttgaacgtcttagctcggccacctccttttccagctttgacacctcggggctcaggacgggcctagggtggtcaagaggtcccctgcagccctcacttcctggaaaaggctccatttcctggccttcaggctcaggtggttccttccgcctggcaggtcctccccaaatccaatcccagctcgggctggattcccaaggcccctattctggtgtctgccccttccctagggctcttccccctggggtgaccatactctcatgcccagccaggtcagggctccttgagagaagaatctggaggggccaggatttgatgggagaatgaatgatggaatgaaagaaggaacgtaagyrtgagccttgctaagagtgacaatactggcaggctgcagaccatgtgtggacctcgatctgagggcttagaggcttcggcctgccagygctgtgggggcacccaccccatctcattgaatggggcagagcaggtgagggcrtgagatggayrgatgggcctcatccccctgctyccrytgcctggggtcctckgtcagcctgtytgctcagacccytgaaattgggggtyraggaaggaccctcctggatyatgtgactcccttcagtccaggtgaccagggtccttggagtgacagctcctagagccccacctgtagycctgcaagctggggagagggcctgttaggagaggcatcccctgccctggggttgtagaggtgawctaggctcctcagaccttgtggggcctcagatgcttacatctccagcccctcctggcgtgggcatctggctgcagcccagctctgtggccccatctcccagggaacctttggtctaatctgcctcccgctgaaacccagcctcattcagccccaccgaggctttcagagttcaggtctctcattcagggtttgagaccccaccgggctcagagacacctgcagcctgcagcggtcccagatcacagcctcagggatgggaccaggagccagcccacatcccacctgcagcagttcctgtgcctttaaagcctcccctccccccgccccgcccscaggccactaggggagggaaggaggagctgggtcacagcagggaatcttagcttggttttggtgtgctgctggatgaccagaccgggcgtcgggtgagcccagaagtgagagcagttggctgtgccccagtgctgtgtgacccagaggcgccgctcaccctctctgagctggtggacatcataggtggggaagctcaggtcagggcactcccatgagtgtctggaggcctgagtcccattctcagctctgccatatgcttgctgcgctctagaggagttcctcttcctctccaagcctcggtttatgtacccgtgcagtgggagtgagttgcacttcggggtgaagggggcaagacttgtgtgggcgcatcctgcagaaggatcccacaggtgggcagagccctgggttctttatccgactgggtctgggctgggggcctctgtttcttggctgatgagtttatgtgagtttgagtgaggtatgcgagtgggtgaaggagggctggggggagtcacctgacttgtgcgaagaagctcttgagagagccgtggcttcttggaattaagaggaaagagtgcagcatgaacagacaggccctggaggatctggcagccctgagtgggggcggggggtcagctctggagtagagccagagctgtgatggggttgggggaccctgtgtccttgggccatgcttgcctcgctcctgggttctgtttgtggctgtggattggggtggggcagggccggttgtgcgaggggtcattgcccaactccagggggcgcctgccacctctcagctatatatatagggatatatatagttctttcgacaggtttccagcaggtagtggttattaaatcttactgaaggggtgttttttctgattctcggctctgtgccgcaagggtggaaactgtgagagacagattccaactccacgtctgggtagtaagcatccagtccagggctgtaggcagtcctggggaagacgccagagatctgtgcattctcatatcgagggatagcgactccaggctgggggctggcagggtaaggggtgggtgggtcctgggcttacccgcaggtctgcagacttcctggggccagctgacctcgtaawatcccttttgtctaagcttcagtttcctgcctgtgaatggggttggggctgtgctctggtttcacccttgtggctctggggttgtggtgacaaagccatcaagctgggttgaaggattaaccaggaaacttcagactggctgccgtgtctacctcttcctcatactcctctctctgctgcatcctgggaagctgctctgctcagcctaratgaggctcagttgtgtgtgtgygcacgtgcttgcacgtgtgttggaagtgggtgatactgacaccagagtctgtgtctctgggtgagtgaggcttgcacatttctcgggacagggaactcactaccttatgtgcccaggacaagagctgtggggtctggagaagacttctaggccagcccctgcagtccttcctcaggtgacatggcttccccagacccacttccccctaggtgccctctctgcattcagggggtagagggctgactgggacagaatgtgacacactcagcatgtgaggaaaagcctccttcattctgtaggccctacctctattaacatgtcctttgataaagtgcctcccctcctgtctcccctctctggaatcctcagctgctgccaggcttcagctgtgccccattgaaggcagctctgtctccctactttccccagcccagggttttccttttggggtcagctgcagggatctgggccatcctttgcccactcagactttctttctgcccacctgctgctgtgaatcctgtatgtcatatatatatataaaatatgtaatatattatatattatatgtaatatataatatataaagtatattatataatatgtattatattatatattatataatatgtaatatattatataatatataatatgtattatattatatattatataatatgtaatatattatataatatataatatgtattatattatatattatataatatgtattatattatatattatataatatgtattatatattatataatatgtattatatattatataatatgtattatatattatataatatgtattatatattatataatatgtattatatattatataatatgtattatatattatataatattataatatgtattatatattatataatattatataatatgtattatatattatataacaatatataatgtgtattatatataatataatattatataatgtgtattatatattatataatattatataatgtgtattatatattatataatattatataatgtgtattatatattatataatattatataatgtgtattatatatataatattatataatgtgtattatatatataatattatataatgtgtattatatatataatattatataatgtgtattatatatttaatattatataatgtgtattatatatttaatattatataatgtgtattatatattatataatattatataatgtgtattatatattatataatattatataatgtgtattatatattatataatatatgatgtgtattatatattatatattatatgatgtgtattatatattatataatatatgatgtgtattatatattatataatatatgatgtgtattatatattatataatattatatgatgtgtattatatattatatataatatataatattatatataatatattacatataatatatcatatattatatttatataatttatataatatatcatatattatatttatataatttatataatatatcatatattatatttatataatttatataatatatcatatattatatttatataatttayataatatawyatataaatrtattatatatagtattatatatataaaattatactttaagttctagggtacatgtgcacaacgtacaggtttgttacatatgtatacatgtgccatgttggtgtgctgcacccattaacttgtcatttacattaggtrtatctcytaatgctatccctccccgytcccctcaccccacracaggccccagtgtgtgatrttccccttcctgtgtccaagtgttctcattgtttaattccaacctatgagtgagaacatgcatgtcttatatgctctcaggcagagaggaaactgctgagcaggccrgggcaggggacagagccctgtggctctccactttagacccctccyggctgactgccatggaatgcagccacttagcagggccaaatcccctgatgttcctgttggctgtctagccttcagggacaggtcatgggaccttggttcctgccctgtcatcttcccagtcaccctgatcttcacggggaggaatagcctgggaaaggacttggtcacagcacctccaccctagggctattgaggatctcacagttgtgtgtctggtgggttctgtccagagcccatttgagagcagtggatgacaggacaggcctatgtgacccaggcaggcagcaatattgggtcagccttcatgtccccttctgtcagctggggcagcctggaagcatgattgtggggtaggtgttatgggcacggaatagacctcaggtggaggctgcaggggctctccggcaccgtagacacagcaggcccaggagcaggggagggagccatgactcagggagactctggcccatatccttggcagatgagggccacaggggaatgggcagcactgtccaaagtcccctgggctgggtccgcagctgttcctggctcagacttcttggtgggctggtcagaaacatgcagtaacttggggcagttaccaggtggccaagcctgcactgctgggctctgtgagcttgggccagstcaggccctctctgggccctgcctttctgggctgttcgggtggttccttgggcctggggtgctaatgtttctggatgggcagcagaaccagtctgcactcagggccccaggccatgttcccggaacacacctttagcattgacagcagcgtgtggtgaggccccttaggctgggttctggtctagtgccaggggcaccactactccaccgcctccagagccatctctgggacactggctgtgagttcagatgttctgaacagggacagggagagccagagggamccagcctggggctcactggaggggctygtgggcagacagygccctttrgagggaactgagtctgaaaggaaggaaaccctttccccrgctcatagcayctgccatccagggccctsccagggctgcgtgaactttagtcaygtggtgacaggccgagtcaccrtgccaagtcactgtgcgcctccttgctgctgtgacgtcagcttccccatcytcccagccaggctggayctcygtgagaggcctgcctgtcctgcaccctgtgcrgatgcctcccactgtccrccrgggctgctgggcacsccctggctggtctcttggactaggtaagctcatgrgtcctcyggccgctcctgctcyttccctgcctctgctcctcctcggaggtggccaccccyagatcccagtcccaattcggaggccccctgaggagtgctgcagggggccrcaggcgtggctctgagccactctggagagtggcggggkgcccagccagttctgtggctgggactttcccaggcagacaagtctgtctcttcctccccagcrggtgcagcccaraactgtcttctgaggaagaggtgctctcctgggcccccactgtccccaggcctcaggtaagcccatcagggtcmcaaggaagggggtctgggtttgaggccaaccatggcagctgacctactttctagcctcagtttcccctagtgtgtgcagctctcacgctgtttgggtgagaaccaggcctctgggcttggacattctttcagtgagtttttagggtggagggatgggaaatggaagcccaggacctcagcagggtgtcttcctccgatccggggacatctgcctgtgggaggctgggcccaccctcccttgctgacctgccctgggaggaagggacagggcccagcactgcctactcccctccctgttcttcccagcagtctgagcctggctgggtgtcccctgctcctccagcagcctacttgggcctttgggtagacagattaacagacaggcgaggctgggtcatggttggaccaccccaggaccctgaccgggggctcagctcatgaccctgagcctgggagagatgaggccatgccctccagggcactcagcatgacccggcccagtggacgggactgggtagcttccttggtgcagggggctgtcatgctaggayggggtcactgaccaggccaggcccctgccccatgacttgtggtggaaatgtccttttgtttttgtttttttgcattttttttgagacggagtttcactcttgttgcccaggctggagtgcagtggtgcaatcttgcctcactgcaacctccacctcctgggttcaagcaattctcctgcctcagctcctgagtagctgggattacaggcacctgccaccatgcctggctaattttttgtatttttagtggagatgggggtttcaccatgttggccaggctgttctcaaactcttcacctcaggtgatccacctgcctctgcctcccaaagtgctgggattataggtrtgagccactgcacccggccatgtgatgggaatgttctgtgtccataatagatgctgcatattgctggcccagctcctgaggctctttggacctccaggaatcggtgtctctatcaggaacccttaaccctgacccggactcccrgctgggacccrgggtgtcggagtggcaagagcactgtcaggcctggtgaagggtgtgagctgtccaacrgggcagggaggaggcagggcctgttctgcagttggacagacagagccctctagctgctttctggaagactgaagggcaggtgatgttggagggagggagtgcaggcrggggctgtgagggagttcaggtcagaaacaggtggcgcctggattcaggctgtggtggtcacggtggggatgaggggctgctttggattgtgctgrggatgtggggtggtgcgctgctgcatgrctactgccaggtctctctgctcttrgtgtctgcatccagggctgggagggggtcaaatgwatcacactatcggccccaggcccaccaagcctggggaggtggccacccttccaygatggcatttggatgttccctgtgtgtggggagggcacagggactccattcrtagaccacctctgggacagtgtgtctgcctctgaggtcagaygctctgcactgggacagggtggagtggagggaaatccagcttggggctcattggaggggcttgctggcagacaccgccctttgtgggaaactgactgtgggagaggggaaccccaacctctgtcaccacatccctcttccctgttgtcacacctgtcacctgctgccatagccatgagacttcccaagggtcactgctgccactcactgcacagcctggaagggagtccacaggggacatacagtgagcaagagacctgtgccactcaggcctcctgggggtgtccccagtgcagccatgatgataatcacagctaccattcaccaagccctgcccacagtctaacctactctattcacaacactcccagcagcaaggcaagtgaggtgctgccgtcatccaggctggacagttcagtgatttgcctgaggccccacagcaggtgagtggcaagtccagcatcagagcagggcaggctggcggtgccccctgagccccctttgccatgctkaccacatgcacatcctgggcttctgcaggaatgccctgtcccctacctgccctgctccgtgcaaaaccctctttgagctgtgcctgggagacatgctgagagaattcatggaaacaaatgtgttactgacagcctctttgcctccagagttcaactggagacagagaaaccagctagaggcagagggaggtaacacggagtcccccagaaaggtctgggctgcgcgtgcttcaggtaacctcccttgaccttcaggagaacgagaaggctgcctgatcagagagtccctgaagaagattctgtggctacaggcttcagcagagtgtgagggagaccccggttatttcctcagctatttccaccaaatcctcctgtctttcgtggccaacaccccaggcaaggcttggggcccccgtctgctgctggacggtaagtcctggccccgtggcagtgaatctgtggggcgctctgattgtgggcactatggaagctaaaccccatgctccaggtggggtggagggtcttcagaggactcctggacagtgccaggctctaggctggggtgggggacacaggagaaaccaggccaggcccatccctactggagcttctccctaagcagtgraggctcagccactgtaaggaggtaggcaaggccctgcagaaagaggggtgtggaaatctgggggctcccaggaagggccgctgctggagatggggttcttaccaggatgggctctgaagataagcagggaggatttgggagggcagagatgaggcccagagcttctggcagagggcatggcctgcgcaaaggtctgggggccggacagcctgcacgtattctgggaagcgggaaggagacacmggccttgtgtttctgaggccygactttagactgtgycctgttggggaggggccagggaatgtctgaggctaggcctgaccctgcttcttaccccgtgggtgcagcagagccatgaagaagaagttagtggtgctgggcctgctggccgtggtcctggtgctggtcattgtcggcctctgtctctggctgccctcagcctccaaggaacctgacaaccatgtgtacaccagggctrccgtggccgcggatgccaagcagtgctygragattgggaggtgagcagggcagggcatgggacatgggccctgaaaactgggcaagtggacctgagcaataccttcacccccctgagactcagtttccccatgtgyaagcttcgcttggactctctcagtagcctttgggaaggggacagtgactccgagagcagggtgtgggtctctagagccaaacagggccccttttctcagttctaagagtctctgtctctttggaataaactgcactgttttgttgtttggttgttatttttacttatttcttcctatctatctatctatctatctatctatcatctatctatctatctatctatctatctatctatctatctatctatctatctatctactatctatctatctatttatttagagatggagttttgctctgttgccaggctggagtgcagtggtgcaatytcagttaactgcaacctccgcctcccaagttcaagtgattctcatgcctaagtctcccaagtagctgggattacaggcgtgcgccaccacgcccaacaaatttgtgtgtgtgtgtrtgtgtgtgtgtgtgtgtgtgtgtgtgtgtgtgtttccaagacagagtatcgctctgttacccaggctggagggcagtggtgcaatcttggcttactgcaacctccacctcccaggttcaagtgattctcctgcctcagcctccacagtagctgagactacaggcatgtgccaccatgcccagctaatttttgtatttttagtagagacagggttttgctatgttggccaggctggtcttgaactcctgaccttgtgatcctcccacctctgcctctcaaagtgctgggattaaggtgtgagccactgctcctggcctaattatggtgtttttagtagagatggggtttcaccatgttggtcaggctggtcttgaactcctgacctcaggtaatccacccacctgggcctcccaaagtgttgggattacaggtgtgagccaccacgcccggcttattctttttttttttttttttttttggttaggagacaatttctttctttctttttttttattttattttattattattatactttaagttttagggtacatgtgcacaatgtgcaggtttgttacatatgtacatatgtacacatgtgccatgttggtgtgctgcacccaccaactcatcatttagcattaggtatatctcccaatgccatccctcccccctccccccaaggaacactgttgcccaaacagggacatgaagggcttattcttttttgttgttgttttgttttgttttgttttttgagacggagtctcacgctgtctcccaggctggagtgcagtggcgcaatctcggctcgctgcaacctccgtctcctggattcaggtgattctcctgcctcagcctcctgagtagctgatattacaggcatccgccaccacgcccggctaatttttgtatttttagtagagacagggtttcaccataatggtctggctggtctcaaactcctgacctcaggtgatccgcctgccttggcctcccaaagtgctgggattacaggcatgagccaccatgcccggccgggcttattctttttttaaggtggagtcttactctgttacccaggctggagtataggggagcgatcatagcccactgcagcctcaaactcttgggtttaagtgatcttcccgcctcagcttcctaaagtgctgggattacaggtgtgagccatggtgcctggcttctactgttttattctattttagactcttatctcatgttatatacaaagatcagttccctcctaaagacttaaacagaaaaaatattatgtttttcatattttgagacagggtcttgttctgtcacccaggctggagtgcagtggcatgatcatagctcactgcagccttgaactcttgggcttaagcgatcctcccacctcagccccctgagtagctaggactacaggcgtgcatcacacctgactaattaaaaaagactgttttctagagatggtctcactctattgcccaggctggtcttgaactcctggcctcaagtgatcctccaccttggcctcccaaagtgctgagattacaggtgtaagccaccatctctagcmgggaaaaaaaatgttattaataaagtatagcaatttccctttttgtcccagttataaaagtcatgtacatttgtttgcttgataaagaggaaactgtctgggcaaggtggtccacacctgtaatcccagcactttgggaggttgaggcgggcagaccacccgaggtcaggagttcgagaccagcctggccaacatggtgcactctgtccctactaaaaatataaaaagttagccgggcatggtggtgtgcgcctgtaatcccagctactcaggaggctgaggcaggggaatcacttgaacccaggaggcagaggttgcagtgagctaagatcatgccactgcactccagcctgggcaactgagtgaaactccctctcagaaaaaaaaaaagaaagaaaagaaaagaaaaagaggaaactgtaatcccagcactttgggaggttgaggcgataggattgctttagaccatgagttcgagaccagcttgggcaacatagaaagaccctatctctacaaaaaagacaaaaaattgccaggtgtggtggttcttacctgtagtcccagctactcagcagactgaagtgggaggattgcttgagcccaggaggtcaaagctgcattgagccaagactgtgccactgcacttcatcctgggtgacaaagtgagaccctgtctcataaaacaaaggctgggcacagtggctcatgcctgtaataccagcactttgggaggccaaggtgggtggatcacttgagcacaggagttcttgaccagcctgggcaacatgatgaaaccccatctctacaaaatacacaaacaaacaaaattggctgggcatggtggcatgtgcccatagtcccagctacttgggaggctgagatgggagggtcaattgagcccaggagactgaggctgcagtgatcyragatcacaccactgcactccagcctgagcaacaaararagactttgtctcaaaaaaaaaaaaaaaaaaaaaaaaaaaaagaggccaaggcaggcggatcatgaggtcaagagatagagaccarcctggccaacatggtgaaaccccgtctctactaaaaatacaaaaattagctgggcgtggtggcatgcacctgtagtcccagctactcaggaggctgaggcaggagaatggcttgaacccgggaggcagaggttgcagtgagctgagatcgtgccmctgcactccagcctggcaatagagcaagactccatctcaaaaaaaaaaaaaaaaagaaagaaagaaactaaaaacaaaaaccccaaaactcgaatggacttctcttccatcctcctttgggcaggtgggcagcagggtgtgtatgcggggccagggtggaagcctgcaggttctcatgcctttatgtgccacatggcagggatgcactgcgggacggtggctctgcggtggatgcagccattgcagccctgttgtgtgtggggctcatgaatgcccacagcatgggcatcggggktggcctcttcctcaccatctacaacagcaccacwcrtgagtgcctcggragmggagagggagaggggcagggggtgtgggttgggccgaggcacagctgggcggtccccaggctcacgtggcataaagggtttgggtgggcgggcctgcctacctgcttctccttctaggaaaagctgaggtcatcaacgcccgcgaggtggcccccaggctggcctttgccaccatgttcaacagctcggagcagtcccagaagggtaagccatgcggcagacttggggcgtgggtgcagagctggctgagccaccgggaaggggccttgcccacaggagcctgctcccgtcagggttcaggggcagttctgtcaccccccatcccttcctgtccccatagcaccctcccacaatgagtggtcaggaccatcatcaccatggtaaagggccgggagcttctgttatttctgctaaggcctccggggccactctgtgcagcacatggagagaataattattatgctagcagacctcatggaccagggctcactggggcccacactctgctctgtgcttttcacccaygagcctctcacaaccctccctgctcctttgggctaggggatgctgtgtggattcccattttacagggtggggatgctgaggctcagacaggtcacgcaaatcagttgaggtcacacagctgggaggtggtgaagctaaaattgaacccaggctgtctataccgtgccttttcaacaggcatcccattcactcatttgttcatttgtggggatggtgctctagaatgtgaggtggagtctctcttttctaatctggtcttaagtggrgaggaggcccccaaattccccaggtacctgaagggaagccactgtccatccaggaagccactgtctgtcctcaaaggtggyacartagaktgtgagataaaagttggaggatgggagggtctcaacaactcacrcctctaatcctagcactttaggaggccaagtcaggaggagygcatgagcccaggagtttgagacctgcctggrcaacatagcaagactccatctctacaaaaaamggaaaaaaaaattagctaggtgtggcggtgtgtgcttatgktcccagctacttgggaggctaaggtgggaggatcacttgagcccaggaggttgaggctgcagtgagccatgattgtaccactacactctagcttgggcaacaaagtgagaccctgccaaaaaaaaaaaaaaggctgggcctttttttcacaggctcacgcctgtaatcccagcactttgggaggctgaggcagatggatcacctaggtcaggagttcaagaccagcctggccaacatagtgaaaccctttctctactaaaagtacaataattagtcaggcgtggtggcacaggcctgtaatcccagctactcaggaggctaaggcaggagaatcgcttgaacccaggaggaggagattgcagtgagccgagatcatgccactgcactccagtctgggcaacaagaatgaagctccgtctcaaaaaaaaaaaaagttggaggatggaggggcaggacacactcaccatagcaggtcttagacttcaggtgggggtcctgggtggtgccctttggagtcttctgcaacatactcaatctttgacttttttcttttttttttcttttttttttttttgtcacccagactgtcgcccaggctggagtgcagtggcacgatctcggctcactgcaagctctgcctcctgagttcacgccattctcctgcctcagcctcccgaatagctgggactacaggcgcctgccaccacgcccagctaattttttgtattttttagtagagacgggttttcactatgttgcccaggctggtctcgatctcctgacctcgtgatccccckgcctcggcctcccaaagtgctggaattacaggcgtgagccactgtgcccgatcaatctttcatttttttttaatactcaytgagaaactcagcatytgtagacatgaagttgctcagggtaagagaatgcgggaatcataggcttggcaccttgtggactcttagaatcatttatttaactwgaatgtattgagtattctcttaaagaatcagctgttgttcctgaagctggggtgaaaaacaaagatggcagatgaaatctgtgacactccaggtgggaggagaaactaggcaggtgcaggtgtgttacgggctgtagaaaaacaggtctggagggcctcaaaatctgggactgtatagagggtgacctagtcagggaaggggacatctgagcaaagacccagaggcagagatggggtcaggggagttatctcctggtctgctatccaggtgtgatggcagggacagagccctgtggggagctggggaggctgcagcaagtgatccaagggaaatggcccaggttgtgtgggatctcttaggttatggtgaagcctctgcttcctgtctgagggaagtgggggctcgtggagtatgtgagtggaaggggatggatctggcctatggaccccgtgggttgctgtgtaaggggcagggagcatgtggggacctgtctggaggtcactgcagtaattcgtggagagggtgctgggaagtggctgacgctggacagacacacttggaagtggagtctgtggatttgaggatgggttgggtgtgacgcttgtgtagggagtccccggggacccctgatcttttgtctgtacctggaaggatggggtgaccctaatggagacaggcagggttctcaggaagcaggttgagcagacactcaggagctcggttttgggcacgttgaagtttgagatgctttcttcragcaggcaggtagatcctcaggtctggtgatcggaggagcagcccaggccagcaggtcaatttgagagttgtcagtgcataaatggaggctgaagctcagatgtcaagcagaccaccaggagagagagcaaagacagaggggagagtaggagctaggatggcaggcgggggagactcgggtggagccaggtgctgggatgcaggggcagctctcagggaaagtgatgagcccagtaaagctgagagggggcactgggtctggcagtgtgggggtcaccagagaacttggcaagtgtgctggcatgagagtctgattggcctgaggtcaggagaagattttttttctgatattgatacatgatattttctatatttatgggtacatgtgagtgcttgttacatgcatagagtgtataatgatcaaggcagggtatttggagtctccgtcaccttgaatatttttcatttctgggtgttagcaccatagtcctctcttcgttactttgaaatatacaaaatactgttgctaagcatcgtcaccctggtctgctatcaaagattagaacttctcctgtcttggctgggcacggtggctcacacctgtcatcccagcaccttggaaggctgaggtgggtggatgacctgaggtcaggagtttgaaaccagcctggccaacatggcaaaaccccatctgtactaaaaatacaaaaattagcctggcgtgctggcctgtgcctgtaataccagctactcgggaggctgaggcaggagaatcgcttgaacctgggaggcggaggttgtagtgagctgagatcatgccactgcattgtagtctgggagacagagcaagactccatctcaaaaacaaacaaagaagaaaaacaaaacaaaacaaaaaataacttctgtctaactacaaggtggaaggaatcatgtgctgggtgtcagaccttccgggatgtatgtgcagcttctaggaattgaaaccaccagctcttggaaacttgtgccaggcttcagggtgggagaggcagttctagagccacagctgccaagccaagccaaatggccccatcatctctcgcaagagcaggagartccctgggggcagaggccatagttgtacctttctgggcaaagggtcagtgtctgtagtgtccttatgggcagcggggctcaggggggaagcaggcccaggggtgtgtttccaatgacctcctcaaaagtcagaactggaaggcaaaaccccttataggctgagtgcacctgtaatcccagcatgttgggatgctgaggtgggaggattgcttgaggccagagtttgagaccagtcttggcaacgtagcaagacccctgtctctacaaaaaataaaaataaaaaattaggctgggaatggtggctcacgcctgtaatcccagaactctgagaggctgaggaggatggatcacctgatgttaggagttcaagaccagcctgaccaacctggtgaaaccccgtctctactaaaaatacaaaaattagcaaggcatggtggtgcatgcctgtaatcccagctacttgggaggctgaggcaggagaattgcttgaactcgggaggtggaggttggagtgagccaagattgtgccattgcactccagcctgggcaacaagagtgaaactccatctcagaaaaaaaaaaaaaaaaaaaaaagccctgtgtagtggggtatgtctgtagtcttaggtacttcagaggctgaggtaggaggatcgcttgagcctgggaagccaaggctgcagtgagccatgattgcaccactgcactccagctgggacaacagartgagaccctgtctcaaaacagacaaacaaacaaaaacccttatagttggatggagaaactgaggctgggagaggggacaggacggaggttaaggctcagtcttgcctctctggggccgtagaaaagaggcagggagccctttcttggggctggctgtgtcttgaaggtggcctgtgcttgacctcggtcaaggtgggatctgctcttgttttggcacattctcgtggagcccatgagtcttacaggataaggccttgtggtcagtgagatgggagggggtctggcctggcacaggattttagacatgcaggcacctgcacagacagacacctcatcctgggacagcaaaacccagccgcatgctactgcttcccctgctgtgccctcctcagacatccctggtccatgtacactcctacctgctgagcccctcctaaaaaaaaaaattaaacatcccctcctaaaaaaaaacaattaaaattaaaaaataaatttaaaarttaaaaatccccttctgctaggtgtgctgttcacrcctgtaatctcagcgactcaggaggctgaggtgggaggatcgcttgaatccaggagttcgagatygggctgggcaagatggcaagaccccaactcaaaaaagaaaaaaaaaaaatctttcctcctaagcctcattgccccatctgtaaaatgagtcagggactgtgcctgggatgctgcctgcgagagatcccgatgtcccccactcagggtcactaactatggctctctctccccaggggggctgtcggtggcggtgcctggggagatccgaggctatgagctggcacaccagcggcatgggcggctgccctgggctcgcctcttccagcccagcatccagctggcccgccagggcttccccgtgggcaagggcttggcggcagycctggaaaacaagcggacygtcatcgagcagcagcctgtcttgtggtatgtctgtgggtgcggccccctgacacaggcagggcaggcacagcccaaggaccttgcaggccgtagcagcagtggagcrgccctctgccttcaggaccctgtgctgataatgggatgaggagatacagacccttcccaccacgtgtggggacacattctgagcgtggggtcccagtggccactgtggctggccaygtgtcctgagtggcaagggacactaggaagctcccggaagggacactaggaagacragcrctgagtgacagggccacccacctgtgacaggcgctgcccctgytctgctcygktctcctgtgtggrcggktgtgaggggtggtctagctgagtccaccccacctgctgcctcacatgagccccctctgccccagtgaggtgttctgccgggatagaaaggtgcttcgggagggggagagactgaccctgccgcagctggctgacacctacgagacgctggccatcgagggtgcccaggccttctacaacggcagcctcacggcccagattgtgaaggacatccaggcggccggtgagtgggtaacctcaggggcctgggtgaggaactctkcagtggaaaccctgagctgtagcccagagctatggggtcctcctgtcttgcctgagcctgcaggaagttcctggtggaggagggtcagtgactggccatgtgggtccacagctcctgcttatatcaaaaccaagagaggccacacagtccaggagagcaagtccctgttggggtaaatgcaggtgtaggcaagagccagggctagggaagcactagaatacagcctgaagatccaggaggacttcttggaggaggtggcggctgggctgcagataacttygttaggcagagagaggaagggattcctagcagaggaacagctgggctaaggcccagtagagggcgctttgattcaccaagagggttacaagggatgagggtctccttgagagaggcatggggaaggggatttgtggggcaggggcctggagcttggctgtggctttcttcaggtaatttttgtcacgtttcatggaggagggtgattagcgtgtcgacctttaccactgaggctggaaattggcatgccaataccctgtctgtctggagctgactccaggagaattaagagcctccctcctctattcattcatcatgaggagaagaggccaagcggcagggagactggcaggaattctccagttagaaaaggccctctgagccaggcgcggtggctcacgtctgtaatcccagcactttgggaggccraggcgggtggatcacctgaggtcaggagttcaagaccagcctggccaacatggcgaaaccctgtctctactaaaaatgcaaaattagtcaggcatggtaggttgtgcctgtaatcccagctacttgggaggctgtgscaggagaatcgctagaacctgkggggctgaggttgcagtgagccgagattgcaccactgcactccacagagtgagattccatctcaaaaaaaaaaaaagaaagaaagaaaaggccctctgaggccaagcttggtgtctcatgcctgtaatcccaacactttgggaggctgaggtagaagttgaggycaggaggtccaagacaagcctgggcaacatagtgagtctacaaaaaaaatattgagaaactacataaatatagtgggggtgggggtggggaacaagaaaacaaaaaattcaaagcatagtgaaaagaaatatagcaaaacccggccgggcatggtggctcacgcctgtaatcccagcmctttgagaggccgaggcgtgtggatcacggggtcaggagatcgagaccatcctggctaacacagtgaaacctgtctctactaaaaatacaaaaaaattagccacgtgtggtggcgggcgcctgcagtcccagctacttgggaggctgaggcaggagaatggcgtgaacctgggaggtggagcttgcagtgagccgatatcgcgccactgcactccagcctgggcgatagagcgagactccgtctcaaaaaacaaaaaaaaagtagcaaaacacaacaaaaaaattaaaatttgctgggtgtagttgtgcctttagtctcagctactggggagggtctgctggaggatcacttgagcccaggagttcaaggctgtgattaagccactgcactccagcctgggtgacagagcaagatcctatctctaaaaaaaaaaaagaaaagaaaacactctgtggccacagatgagagaaggcagacaggaagccagtaagccaagcaggcaaagggcaggtggccccagcccggctgttgggtggtgagcagtgtcagggagacaggagtgccggagctgatgaggttcccaaggaggtgaggttgcctgtggccccctcccagggcacagtcccacccctccagtagtgcactctgtcctccctggtaggtacaggcttttccccaccaccatggtgcagccatgcctgcccccaacaccactgctgcagctccatcctccacgcagtggtgcagccccatcccagcacccatttgagctgctgtcccattgcagggggcattgtgacagctgaggacctgaacaactaccgtgctgagctgatcgagcacccgctgaacatcagcctgggagacgcggtgctgtacatgcccagtgcgccgctcagcgggcccgtgctggccctcatcctcaacatcctcaaaggtgagtggtcgcaccacagccgtgtggtaggacccatgacactgcctctctctccccacgccccacccctcctgcatctctgctcgccccccatgccacgtctttccatcactgagctcctgaggtgtgtccctgcgtcacagytcaccatgtcctgaaggaggcagtgcagagcaacagggctgaagcgggcaatgctcaagggttggaggaggaacaggagtcatcaggagggagagaggtgcaggagctcagggctgcagggccggtccagagggtaccccggtccagtgggtgaccctgccacttggtcattgaatggccagagctgatgcgtgacgtgaggtccaggctcrggagccctcaccttacttcactctcaccacagccttctgaagcagctgctgctattgrttattaaacgctccttgaggtgggcaaagtggctcaggcaggtgttaaccctctgagcccctcagagcctctggggctcagcaacatgcacctggctctgatcaaccagggtacaacttctcccgggagagcgtggagacccccgagcagaagggcctgacgtacyaccgcatcgtagaggctttccggtttgcctacgccaagaggaccctgcttggggaccccaagtttgtggatgtgactgaggtaaggggcaggggctggcycactgtgggtgtggggcctgccgtagaggcatcaggtgggctccccagggtggctacarcctcacatatgctttatgaatccattcctgccacagaattygattgcgggcctactgtgtgctcggatggactygtgggtgacccccagtcttggcttctgccccacagaactgacagtgyggggaattagtggccaccctcctacctcaggtcctttgcacatgctgtggttcttgagtgctcagtgctgagatgaggaatgcatgggggcattgcagccctcrggcatggtgagatggatgggtgaaagggagagggccaggtgaacagagaccttggccacccactccctgtcactccaaactaaygcttcccagatgccaccctcagccctgcaccacctgacccactcactcagtagttgccccagctccayactgggtccctataagaccctgtcatatcccttcccgctgaggatcctcacatccctccttacctacttgggtccttggcattcctgggcggatctgcagacccccccacactgaccagtgacctcccaggaggggcgtcagctgcccrggtggtgtcttctctttccccgtgagcattctgcacctctgactcccgctgcagccagtgacctggtgtcttgtctctctraggggacagagccactgcagygtgtccctctgccctcctttttggctaaggccagstccttcatctactcrctggctcggggtgctgttcctacaatgctcctttctgcctctgatgatttacttctttatcacggcttattcccgaaagaaaggcagctgttrttgctctagaaacttctatctgctgcctccttctgtcctttgctcctcttagagcaaacatggctgggctatgtcctctctcccttcagggtatcccctcccctgctctatccccatgccaccagatcgccatgtccagcctcagtttccccatcaggccccactcagcagcatctcacacagctcaccacactctcctcgagttttcattttgcaaattttcgcacctacaaaaatgtaaaaaaaccccaaaactgcccaagcatcaatgctcccttttcctggagtctgcagtgtggatgtttctgtcggatttcctaactctctccgtctccacccacatctattgggattcgtgtttttctgagggattccacagtaggttactgatgtcgcacctcaggrtgtgtctcaaaagtgagacttgaacatagcacagcaggatgtcggggtgacacaacctgttgtcccttctctttacctacagtaggctcccttggctgttttgtttttgttgtgtttttgtttgtacacagagtctctgtcatccaggttggagtgcagtggtgtgatcttggctcactgcagcctcaacctccagggctcaagcaatcctcccacttcagccccctgaacagctgggaccagaggcacgtgccaccaaacctggataatttttgtattttttttagagacagggtcttgcccagactggtctcaaactcccgggatcaaactrtcttcccacctcagcctcccaaagcgctgggattacaggtgtgtttttttttttgagacagagtctcgctctgttgcccaggctggagtgcagtggcgctatctcggctcactgtaagctccgcctcctgggttcacgccattctcctgcctcagcctcccgagtagctgggattacaggcgcccgccacaccgcccagctaattttttgtatttttagtagagagggggtttcaccgtgatcgcgatctcctgacctcgtgatccgcctgcctcggcctcccaaagtgctgggattacaggcatgagccaccgtgcctggcctgttttgttgatttttaaagcccagggcagtagtcttggaaaatgtcccacatcgtggatttgcctttctgtttccttgagggcagattcagacagaacacctttccctgggattggtcarctaatccgtggggtgttgctgaaactttattttattttattttatttttgagacggagtctcgctctgtcccccaggctgtcccccaggctggagtgcagtggcgggatctccgctcactgcaagctccgcctcccaggttcacgccattctcctgcctcagccccccaagtagctgggactacatgtgcccaccaccgcgcccagctaattttttgtatttttagtagagacggggtttcactgtgttagccaggatggtctcgatctcctgacgtcgtgatccgccctcccaaagtgctgggattacaggcctcggcctcccaaagtgctgggattacaggcgtgagccaccgcgcccggtgttgaaactcccttgaggcattttcttcggccttcgggtccatcctctctgtctcctccttgacctcctcatctcctcgccactgccttggggaccttggccaggctcatggcatccagcagccactcaatgtcaatacctccatgttcatctctcagcccgcccttgcccgtgaacccatgcttatttatttattttttttaatacgtgcacccatgctcttcaggtctgatgaagtatccaaaatcaagctcctgaccatccccaaacctgccccttctgcagggtttacctcgctagtcggcgccatccttgattcttctctttctcccacccaggccatcatctcttgcctggttgatacccacagcctcccctttgggctttatccttatccccatcatagctgccagagggatcctgtgaaaacactccccagcctgctcattcctctgccctaagcctgcatggcacagagcaaaagccagttgttatgggacctaggaagtcctgtgggatgggccccagcctgcatcttcatcctcttctccccaccccactccattcactctctgcctatcgctcaccagcctataccacctgcctcagggcctttgcactgaccatttaggccacattccaggctcttttcacacgttgcctcctctgagaagccctccctgaccactctgcccatacctcatgcctcttgattccccttacctggcttgtggtttcagcactttccctgtgtgtgtttgtttttcttggcatgagagcaggacctaagtgtctgttccctgttgattccccagtgccaggcatgcagtgcaaactctagaaatattttttgcatgaargaatgagtgattgaatgyagcaagggtctggaggctgaggaccaggcagacagacattcagagttgctggaacgcgacagagacagggagtcagactggtcatgcaagatcctgggcctgcccttgggtcctggggagccacggaaggttgtgggtgccagagggttgcggtcagagtcacagtcaagggccttctgagacctgtgccccctccccaccctccctccccacctcctcaggccagctctggggtctcggcaggtggtccgcaacatgacctccgagttcttcgctgcccagctccgggcccagatctctgacgacaccactcacccgatctcctactacaagcccgagttctacacgccggatgacgggggcactgctcacctgtctgtcgtcgcagaggacggcagtgctgtgtccgccaccagcaccatcaacctctagtaggggctgctgggccgcctgggtgggaaagggccaggggcgggtggcccagggactgcccacttatccagtaaggtggctccgtcacctcttttcctggtgggaaactgaggcccaaccttggtagcttatcctgggcctctcagtgagtatgtttgagcctcagtgggtggatagggaccaggctgggccaggcaaggtcgggcactgtctgacctggctgggcggtagctttggctccaaggtccgctccccggtcagcgggatcctgttcaatratgaaatggaygacttcagctctcccagcatcaccaacgagtttggggtacccccctcacctgccaatttcatccagccaggtatggggtggaggtccgggggtgggggactggggtggagaggggcgggtgtcctgggcaggcagctgacgggcatccctgtcttctcccatcggccgcagggaagcagccgctctcgtccatgtgcccgacgatcatggtgggccaggacggccaggtccggatggtggtgggagctgctgggggcacacagatcaccacggccactgcactggtatgtgtcacaccttttctccctggccgtgcccaccctgcacagcccccaagccatgctgatcacactcccatgccccaggccatcatctacaacctctggttcggctatgacgtgaagcgggccgtggaggagccccggctgcacaaccagcttctgcccaacgtcacgacagtggagagaaacattgaccaggtgggccrggggttggagaaactgagtcacggtgtggggccccagggcatcctgggctggaggcctggatcatcacagagtggacaattgttggtgtcctctctctagtgcctgggccatctggagcccctgtgccatgagggccaagccccctgctccagtgagacccagcaggccccaacctgctcttcctgatgacctggcccgaaatggcaccacctgggctgaggcctgtgaccacacaggtgtggttcaggtggcatctggagccctgctcaggcttcccctctcctcccacccccaggcagtgactgcagccctggagacccggcaccatcacacccagatcgcgtccaccttcatcgctgtggtgcaagccatcgtccgcacggctggtggctgggcagctgcctcggactccaggaarggcggggagcctgcyggctactgagtgctccaggaggacaaggctgacaagcaatccagggacaagatactcaccaggaccaggaaggggactctgggggacyggcttcccctgtgagcagcagagcagcacaataaatgaggccactgtgccaggctccaggtggcctccctgccctgtctccccactctctgggcctcagtgtattgtgtgtgaaatggagccatctgactggggaggaacagagaggtgggattcggagatcttcacaatgcgggcactggaactagcctcagcatcttcagcatggggagagccaggcacatggctgggggccaggggaaggttcacaccaagctctgccccttcccaccctgatccctcrgactttggggccaggccctcccttactggggctgggcagtgacactacctaggatcagccaccagggggtaccacgaccctggcactttcttaggcagagggtggccagctgatgctgggaacccgggtgccttcttagacccgtaggcgtccagctcaccctgccgatgacactggaggtgaagctgaggtccgaggaatggggactgggcaacaggctggaggaaaacatctcggtcagagccacgcccctggggggtttccaagtttaagcccagagtgaaacccaagcttgtgatcctctccagagggaggcctggttctcagggaacagcaaacgggaagatgtccccagatcccagggatcagggcttggaccagccggggacgcagcccagagggagtgggtccagaaggaaacagctagacacagcagccttcaccatcggcagcccctccaggcctccctcagggcctgctccctcctctgtgcacagttccaacacctggggcagggttctgggaagggctggtggaggtgggctggtgggaggcggtgatcacagcccagcacctggatatcaccaggggcactggggccaggggccaggtgaggccaggtcggggctatccttcaggatccccgaagacctggtgattccaaagggcccatagacaaacagggttttctgcctgtggagtcaagtcccactgggtctgagctctggagggctgtgtctctggggctctgcaggggtgagatggaggtgggctcaactggtgtacaagtcactcttcaatccttattttatttatttaatttttttaaaaaaaatttaaaccaatagagatggggtctcactatgttgatcaggctggtcttaactcctgacttcaagcagtccccccatctcagtctcccaaagtgctaggattacaggggtgagacactgcacccggcctcaatccttattttggcctgagaggaaaggccgtggccccatttgcaggggagaagactgaagctggaggggcaggccttgctctgggttgcacagcagcaacagaagtgggagctggccacgaggcttcctcgactcgacacactggtggggtacaccctggttctccaggtcccatggggctcagcccaggactacctcggggggtgagggacttaaatcctctccttcattctcatcgccccttcccccatcatttcctgaggaaggacattcagggacctgaaggagcggcctgcccctccacatctgtgggtgtttctcatcaggtgggacaagagactgagaaaagaaagagacacagagacaaagtatagagaaagaaaagtgggcccaggggacctgcgctcagcatacagaggccccacgctggcatcagtctctgagttccctagtatttattgatcattatctctaccatctcagagagggggatgtagcaggacaatatggtaatagtggggagagggtcagcaggaaaacacgtgaacaaatgtctctgtgtcataaacaaggttaagaaaaaggtgctgtgctttgatgtgcatatacataaacatctcaatgcattaaagagcagtattgccaccagcatgtcccacctccagccctaaggcagttttctcctatctcagtagatggaatatacaattgggttttacacattcctttgcccagggacgatcaggagacagatgccttcctcttatctcaactgcaaagaggccttccttcctcttatactaatcctcctcagcacagaccctttacgggtgtcgggctggggaacggtcaggtcttttccttcccacaaggccatatttcagactgtcacatggggagaaaccttggacaatacctggctttcctaggcagaggtccctgcggccttctgcagtgttttgtgcccctgcttacttgagattagggagtggtgatgacttttaacaagcatgctgccttcaagcatttgtttaacaaagcacatcctgcacagccctgaatccattaaaccttgagtcgacacagtacttgtttctgtgagcacagggttggggmtagggttacagattaacagcatctcaaggcaaaagaatttttcttactacagaacaaaatggagcctcttacgtctacttctttctacatagacacagtaacagtctgatatctctttcttttccccacagggaccttcctggctgtgcctcggatcaggaccagaatgacacccattcatttccctgggcctttgctccggtggtccctgcaccctggcctctgcctgacgaggatggtggggagaggaggggggacatcccccacgctgctgtctccactgtggcctctgagcttccaggactgcagcgggtgggtgggtggcctggcctaagcccaggaatgcacttcagctcctggttgagcaatgtcactgaggcttgggagtcgggtggggacgggaggaggcgtccgcaggccccccctaccgtgagaggcagccgtgggaacagcctacctctaaacaatcgctgcagcccaggctgaccaggggctctggccggacataggggcctggcaggctgtgtggcctgtaaggacacagtctgtctctgtgcctcagtttctctgctgcccagatggagaggcccagactccaggtgtagacatctggagcaggcagtgttcagctggggagggagcggggaggactatgggggccacgtgggaagaagtccagcccacatcacctgcacccctgctgagcctggtcaacagaggccctcagtgggtcctcactctcctggctgcctcccatttaggcaccctgaggcctggggagaacagagccaggccagtgtccccagagaggctgcgctgccagcacagtagtagcagatttggattcagggaagtagacctgcagccagggtgggaaagagctgcaggcggggtggagcccccacatggcacagcccccctccttggaggtctatgctgcatttccaggacagcaagtcccagggatggatggtgcctggtgccaagggctagaggcatggtctgtctgcattccctacaggggcatcttgtagtcaccagcatttgatgctgtcaagtccccctgtcctctgtgcagactgggaagcccttggtcaccctggggggggttgggggacccaggccaggctgcagaaacataaggacttgaacccgggtcctgagtgacaccaccttgggtcctcctccctctgcctctgttcagctccaccttgatggtgactaggctgggccatgcggagagggttaggggatagagatgggagctggggagcagggctccactctgggaggggggcagccttgccggatccagggcagagttaagcggccccagctctgctttcctagagctgctgagaacccgggaaatggtgtggaggttccggggagccctgcccctacctggcaaccgcagtgcagcaggcaccaagttctcctgcacattgcgacagtgtgaccctgggctctggcgggcagtaggtggggcctttggacctaccagcagtgagggagttaacacagcagctgactcctctaggcaaggaaaactcccctcagacgctttgctgcctggcctcctgccagcaacaagcaggagctgaaaaccagaagttgaggcgtgagtttggtcactccgtagtgtgcacttggtgagggcagcagctcgccacagctgccagccgtctgtccattcacccatctgtccatctggcagcccgctgttcagacccgtctgtctgtccgcccatctgtaagcccatctctgtcccattgtctatctgaccatctttctcttactgtcctctttgtctagctatctggcctatctgtcgatccatcttcgtgtctgtcttcagcccccacctgtttgtccatctgtccaattacctgtgagtctatctatgcaccttcttgtccattcatctgcccacccatctgtccctccgtctgcccaccggcctcccctctccttctgggccgcagagccatggcccaggactgcagagccatggttggcctggtcctgctggggctggggcttgtgctggctgtcattgtgctggctgtggtcctctctcgacaccaggccccatttgacccccggcctttgcccacgccgctgttgctgnnnnnnnnnnnnnnnnnnnnnnnnnnnnnnnnnnnnnnnnnnnnnnnnnnnnnnnnnnnnnnnnnnnnnnnnnnnnnnnnnnnnnnnnnnnnnnnnnnnnnnnnnnnnnnnnnnnnnnnnnnnnnnnnnnnnnnnnnnnnnnnnnnnnnnnnnnnnnnnnnnnnnnnnnnnnnnnnnnnnnnnnnnnnnnnnnnnnnnnnnnnnnnnnnnnnnnnnnnnnnnnnnnnnnnnnnnnnnnnnnnnnnnnnnnnnnnnnnnnnnnnnnnnnnnnnnnnnnnnnnnnnnnnnnnnnnnnnnnnnnnnnnnnnnnnnnnnnnnnnnnnnnnnnnnnnnnnnnnnnnnnnnnnnnnnnnnnnnnnnnnnnnnnnnnnnnnnnnnnnnnnnnnnnnnnnnnnnnnnnnnnnnnnnnnnnnnnnnnnnnnnnnnnnnnnnnnnnnnnnnnnnnnnnnnnnnnnnnnnnnnnnnnnnnnnnnnnnnnnnnnnnnnnnnnnnnnnnnnnnnnnnnnnnnnnnnnnnnnnnnnnnnnnnnnnnnnnnnnnnnnnnnnnnnnnnnnnnnnnnnnnnnnnnnnnnnnnnnnnnnnnnnnnnnnnnnnnnnnnnnnnnnnnnnnnnnnnnnnnnnnnnnnnnnnnnnnnnnnnnnnnnnnnnnnnnnnnnnnnnnnnnnnnnnnnnnnnnnnnnnnnnnnnnnnnnnnnnnnnnnnnnnnnnnnnnnnnnnnnnnnnnnnnnnnnnnnnnnnnnnnnnnnnnnnnnnnnnnnnnnnnnnnnnnnnnnnnnnnnnnnnnnnnnnnnnnnnnnnnnnnnnnnnnnnnnnnnnnnnnnnnnnnnnnnnnnnnnnnnnnnnnnnnnnnnnnnnnnnnnnnnnnnnnnnnnnnnnnnnnnnnnnnnnnnnnnnnnnnnnnnnnnnnnnnnnnnnnnnnnnnnnnnnnnnnnnnnnnnnnnnnnnnnnnnnnnnnnnnnnnnnnnnnnnnnnnnnnnnnnnnnnnnnnnnnnnnnnnnnnnnnnnnnnnnnnnnnnnnnnnnnnnnnnnnnnnnnnnnnnnnnnnnnnnnnnnnnnnnnnnnnnnnnnnnnnnnnnnnnnnnnnnnnnnnnnnnnnnnnnnnnnnnnnnnnnnnnnnnnnnnnnnnnnnnnnnnnnnnnnnnnnnnnnnnnnnnnnnnnnnnnnnnnnnnnnnnnnnnnnnnnnnnnnnnnnnnnnnnnnnnnnnnnnnnnnnnnnnnnnnnnnnnnnnnnnnnnnnnnnnnnnnnnnnnnnnnnnnnnnnnnnnnnnnnnnnnnnnnnnnnnnnnnnnnnnnnnnnnnnnnnnnnnnnnnnnnnnnnnnnnnnnnnnnnnnnnnnnnnnnnnnnnnnnnnnnnnnnnnnnnnnnnnnnnnnnnnnnnnnnnnnnnnnnnnnnnnnnnnnnnnnnnnnnnnnnnnnnnnnnnnnnnnnnnnnnnnnnnnnnnnnnnnnnnnnnnnnnnnnnnnnnnnnnnnnnnnnnnnnnnnnnnnnnnnnnnnnnnnnnnnnnnnnnnnnnnnnnnnnnnnnnnnnnnnnnnnnnnnnnnnnnnnnnnnnnnnnnnnnnnnnnnnnnnnnnnnnnnnnnnnnnnnnnnnnnnnnnnnnnnnnnnnnnnnnnnnnnnnnnnnnnnnnnnnnnnnnnnnnnnnnnnnnnnnnnnnnnnnnnnnnnnnnnnnnnnnnnnnnnnnnnnnnnnnnnnnnnnnnnnnnnnnnnnnnnnnnnnnnnnnnnnnnnnnnnnnnnnnnnnnnnnnnnnnnnnnnnnnnnnnnnnnnnnnnnnnnnnnnnnnnnnnnnnnnnnnnnnnnnnnnnnnnnnnnnnnnnnnnnnnnnnnnnnnnnnnnnnnnnnnnnnnnnnnnnnnnnnnnnnnnnnnnnnnnnnnnnnnnnnnnnnnnnnnnnnnnnnnnnnnnnnnnnnnnnnnnnnnnnnnnnnnnnnnnnnnnnnnnnnnnnnnnnnnnnnnnnnnnnnnnnnnnnnnnnnnnnnnnnnnnnnnnnnnnnnnnnnnnnnnnnnnnnnnnnnnnnnnnnnnnnnnnnnnnnnnnnnnnnnnnnnnnnnnnnnnnnnnnnnnnnnnnnnnnnnnnnnnnnnnnnnnnnnnnnnnnnnnnnnnnnnnnnnnnnnnnnnnnnnnnnnnnnnnnnnnnnnnnnnnnnnnnnnnnnnnnnnnnnnnnnnnnnnnnnnnnnnnnnnnnnnnnnnnnnnnnnnnnnnnnnnnnnnnnnnnnnnnnnnnnnnnnnnnnnnnnnnnnnnnnnnnnnnnnnnnnnnnnnnnnnnnnnnnnnnnnnnnnnnnnnnnnnnnnnnnnnnnnnnnnnnnnnnnnnnnnnnnnnnnnnnnnnnnnnnnnnnnnnnnnnnnnnnnnnnnnnnnnnnnnnnnnnnnnnnnnnnnnnnnnnnnnnnnnnnnnnnnnnnnnnnnnnnnnnnnnnnnnnnnnnnnnnnnnnnnnnnnnnnnnnnnnnnnnnnnnnnnnnnnnnnnnnnnnnnnnnnnnnnnnnnnnnnnnnnnnnnnnnnnnnnnnnnnnnnnnnnnnnnnnnnnnnnnnnnnnnnnnnnnnnnnnnnnnnnnnnnnnnnnnnnnnnnnnnnnnnnnnnnnnnnnnnnnnnnnnnnnnnnnnnnnnnnnnnnnnnnnnnnnnnnnnnnnnnnnnnnnnnnnnnnnnnnnnnnnnnnnnnnnnnnnnnnnnnnnnnnnnnnnnnnnnnnnnnnnnnnnnnnnnnnnnnnnnnn

SEQ ID NO: 94585 - DNA, 33609 bp, Homo sapiens
aaataacagtgtaatggcgtgcacctgtagtcccagctactcgggaggccgagccgggagaatggcttgagcccaggagttcgaggctgcagtgagctatcattcctgtcactgcactcctcctccagcctgagcaacaaggcgagaccctgtctcttaaaaagaaaaaaaaaggtacagctcgattaatttttcagacatactcataaaactcgtgttaccaccaccatgatcaagacacagaagacttccaggccctagaagtctcacatcttcaggaataaaccagtgagggagaggtcaccatctgaaaccctggagttgtctgtttttgcccctctctgctctggcagaccctctttgggcctcagttgcctgtgaagggaagcaaggagctgaggtgacgtgcattgcgtggtttatatcttgcaaatcgctttagatatttagctaactttaacccggataactattgtatgaggtcggtacttggtttatacccaggttaatgatgtgaacactataacttggagagattagctagtctaaattcagatagctcttaggtggtggagtttgagggcctaactcatctgtctaaccttaatgctcatcttttccttcttcccttccttggcctctacaggccgggcgcggtggctcacgcctgtaatcccagcactttgggaggccgaggcaggtggatcacctgatgtaaggacttaagagacccgcctgaccaacatggtgaaaccctgtctctactaaaaatccaaaaattagccgggcgtggtggcaggcgcctgtaatcccagctactccggaggctgaggcaggagaatcgcttgaacccgggaggtggaggttgcagtaaactgagatcgcaccactgcactccagcctgggtgagagagtgagactccgtctgaaaataataataataataaataataaagaatggtacaagtaaaaggcactgaggggcggggggcaggccacgtcctatctcctcgcctttgtgcaattagtaccttctactggggactctcttctcttccccaaggttttgtctccgaggcaagctcctacacaccctccaaagcccactagagcatcatttgccctaaagccttctttaagagcagtcctcccagggactccctccaacagacagtgattgccatttttcctctgtgcggtccagtccgtgcacaggcacccacctcccacagcaccagaaaggcccctggaggctgcacctaagttcaaccctcaaggcgcctggtgcccagctggtcttcagtaaatgtgtttgtaactaaaacgggaagagaggttttgaaccttggtgtttataaccttggtgtgtcagtaaaatgcggcccgctgcccctgcctcctgtcactcaaaatatattgagctggggaaagagcttcccgaacacctggggtggaaccgcagggagaggaaggctgggcccaccccgcactcggttaggaaatggactcgtccgcgcctccgggcgggcgggacctcaggggctgcctgggaagaggtcattccttccacgggggagcgtccactcgcctaggccagaggaagacttggcggcctagaggaagctctagggagccccggaagcccgggacatagctttccttccaggcccctgcccggtgagagacagccaattaagtggagtgattttcactttacacccctatttccttccacacagaattggaggcagtttgcaggatattccaaacagtggtgaaatataagaaagggctaggaccagaaaaagagagcgagcgagagagattatatatacctatttttaaaaaataattgagcaagtcccccattctctcttccataaatctgactttgaacgtagaatttgctttgttaagtgagaagaaaacagtccttgccctttgagctaaaggaaatttccctctttgctttcccctgcagcaggcacatttttgagtgttgggaaattgaggctcagagacgtgagggacttgctggaatccacccagcagcagggacagatcgtgaatgaccatgcaggtggccagagtgctggcaggggctagagccaaatgttttccgtgagtaaagggtttccccttttctccatggggagctttgaaagtctccacctgggagcctagtgggcacaaaagaggtggggctaattactgtggacagagccttaggactttggggagaggagagccatgtgactgaccttggggagcaagagacaaatttgagccccgatttcctcatctgtaaaataaggacatagtatccatttcatagggacatcaggaaaactggatgcaaagagcaatggctaagcacctgcaatacttcatttctttttgagacagggtctcactgtcacccacgcccagtttcaagtagagtagcgcaatctcagttcactgcaaccttgacctcccaggctcaggtgatcctcccaactcagcctctcaagaagctgtaactataggcacgtgctaccacgcctggctaatttgtgtgtgtgtttttttttttttttttttgagacggagtctcactctgtcacccaggctggagtgcagtggcctggtgttggctcactgcaacctctgcctcctgggttcaagcgattctcctgcctcagcctcccaagtagcttggattacaggcgctcgccactaatccggctaatctttgtatttttagtagagacggggtttcaccatattggtcaggctggtctcgaactcctgacctcaggtgatccgcccacctcagcctcccaaagtgctgagattacaggcgtgagccactgtgcctggccataatttttgtctttttttttttttttttttgtagcaatagagtttcaccaggtcgcccaggtttgtctcaaactcctgggctcaagagatttgcccacctggcctcccaaagtgctgaggttacaggcatgagccactgcgcctggcctctttttagttttttctttttgagacaaggtctcactctgtcacttagtttggaatacagtgatgtaatcatagctcactgccgcgttcaactcctgggctcaagcgatcctcctgcttcagcgtctcaagtagctggagccacaggtttgtcaccatgcccggctaatcttttttttattttctgttttcttaattttttgtagagacaagtcttgctgtgttgccttgactggtcttgtactcctggcctcaagtgatccccctgcctctgcctcccaaagtgctgggattacaggtgtgaaccaccgtgactggcctacatctgtctttatttttcccatttatcagatgagaaagctgaggcccagagaggggacgtggcaggctcaaggccacagtggcaggcctgggacaaggtctagcccctggagccattcagcttgggttccttcccctccagcaccacggtccctcctcagactctccctggccttggccagtttccctgtggtcttgaggaaataaagggaaggggaggatccagcctcattccagccccacgtcccccccaacacacacagtgggggctgcttcccaggaggacagatgttttcaccaaatggcacttgcacgtgcttttctctggcttggggaggaggtgggcgctgagaaggaaatgccagctggttgggcagagacaaccgcagccacacctgagggatttaaatagcctccgccttctctgggcaccggctgaggaggaggcatctgggcagggttggaggggagcggggaacagaagggccattcggaacctgccgcagctcagggatgagcgcctggctcctcctcccagagggacctggtctaggcacctcacctccctggacctcgaggttcatcccctgcaaagcgaggctctgaaggccgctgaaccacgtgcctgttgatggaaagaacctgagtaacaggcctgacccatgcctggcacccagatgctcagtacttgacggctattggggtcaccacctccctgccagggcaggagggcctgctgctgagtctctgacaaatgagcgtccaccggccgctcacccacctctcgcgacagggtgctcatcacctgccatggcaacccacagtgtaagggaatgatttcatggtagaccgtgtgttggaatctgggctacaggactgcttggtgtctgtgtgacctcaagcaagttatttagcctccctgcctcgctttccccatgtgtgaaatgagaatgaggccactgcttcctcacagtgctgtttagatgagtgcctttggaactttacagttaaacacgatccccaggggattcgtgtgcacatcggagtctgattcacccgggaatgcctggggaggggctgagattctgcattcccaacaagcggtagcaatgctgctggtctttggactgcgtttggggtctcaaaggactgccttggctgggcgcggtggttcacgcctgtaatccccgcactttgggaggctgaggcaggcaaatcatctgaggtcaggagttcgagaccagcctggccaacatggtgaaaccccatctctactaagaatacaaaaattagcctggcgtggtggcgggcgcctgtaatcccagctacttgggaggctgaggcatgagaatcgcctgaaccagggaggcagagattgcagtgagcagagattgtgccactgcaccccagcctgggccacagagcgagactctgtctcaaaaaaaaaaggactgcctttccctgggaggaaaagtagggaaagtagggggcatagggagccatagaagggtcttgaccactgaagtgacagatttttatcacagaaaagaggctggccatagtggcttatgcctgtaatcccagcatttggaaggctgaggcaggcagatggcctgagcacaagagttcgagactagcctgggcaacacagtgagaccccatctctgtttaaatacatttgtcatggaaaagcctctctggttatctgtggcaggaggtgggagtgggaggaggtccgttatttagagagagatgagggcgctgaatgggaggagggcttattcaggtcaaggaggggaggctaagggccctcagctcacctggtccactctttcagacgcagagacttatatccagagggggtggtggacctgctcagaccacacagccctgggaggactccctcccaccagggacccttcactccccacccttcctggtgctcagccctcctgggtctctcctgtcctgtgtgtccctgtttaacatcctagtaacaccaagaagagggaaggcacgaacgagggccctggatctccctgaccagcttgacctcctgcctacccacaacaacccgattttacaggtgagaaaattgagaccaagagagaggaaggcccaccgacccaggctgcagccgaggtcagtctgattctgctgctgagtggtgtgccattaccattgtccacctgcagcaagatcgggtcccgaccgggtggacaaccaaattaacagacggaggtggggactccgcttccggctcgccccgccccaccccactctcccagggagggagctccagctccgggaagatgaggacaatagcaggaatcgccccacagggtacttccacgtgctggctcctgccaagcgctggcaccagtgttatggggcctgtgtacagatgaggaaactgaggcagagattggggcttggtggcaggcctccagtttctgcggagggaaggcagagggcacttggggcatgggcgacatgggtcgtggcgggcacccggcgcacacggcagccgggcgcaggccagaagcccccccgcgtcgccgggccgcccagtccgggagccgggcgctgggatgggcgggaggcgggatctccgggccgcgccgcttcctggctccccaccctgcgccggcggccgccctggccacgtcaccgcccggccaagagtgcgtgggcggcggcgcgcgggtgcgatcgcggagctgtgaggcgcaggcagggctctggggcacctagagaccggggccggagacgtggcagccgccctgcccgccagaaagtttcctagaagtttgctgggcgcgggcgcacgactgactggctggaccatgaacgtgttccgaatcctcggcgacctgagccacctcctggccatgatcttgctgctggggaagatctggaggtccaagtgctgcaagggtgaggggcgcctggcagggaggtgcgggaccccctctctggccagcctcatgcccctgcgtgcagggcagggcgctccaggtgtctgctcagggtggggactccggcgtgggggtccttgaaactttgcrgagctccacttccaaaaacaatgtaaagttgtataaaatcagaggaggaggacccctcgagatgatgggaggcgggtgggtttgttcctgcacagacgccccctcaggttggcagtgtcactgctggttggaagagggggttataagggaggtgacaacccctccctcccaccagttacacccattgttccttccaccatcgactgtggggagaagcagatatgcactcaggaacggcccacgattctcaaggtcttctcttccctgccccttcccagaccccaccccgccccccaaagtgagccctcgtccctcccctgcctgcatgtgtggcaccggtggctgtgatgtggcaggagggcaccagccgggctcaggcgggtatggagctgcctctaaacggaagccggggaaggctggaggggtcccctgtttgcattctggctgccctgctgggggtttggagaagcttggaggctggactcgcggtcgccaacagatccagagccacgaaaggctgccagagcctcctccagccatctttgtccaccggcatcctcgtggtgccctccctgtgcctggcactgggtgtgcagaggcaggagtgagctcaggctcctcgtggggctgaggaggctgagaaggctgagagtgggccccgaaggccctgtggaaggagcagctccgtgctggtcccggaggacgagcaggtgtcaatccaggaagtgtgtgctgtggagggctccggggatgaagaggcatggaggtcaccaagcaccgggcatcccccgggaagggtgggcagccagatttggggtggtctggagggagatgagtccaggagggaggctggtccagatgtgaaagggccttttctgccaggccagggagttgggtctggggagcccttcatggtttgggagccgggaaggggcctggaagggggcctgaacaggttgctttgcaagctttgagagaaaaggcacagagcagggggaggcctggcagggtgggggttggtgcagacatgagcaacagtacggtgtggagggagtggttctaggcctggaggccatttgggtttggggtctctggagagacaggtacagagacagttcaggttcttcctcaggggaggtggccaggaatgctgagtgggggacccggagcagcaggccctggtgaggggagaatcagctccaacctcttcctgcacttttgcagaaggccctgcacggagtgagcaaccatgaccaagaggggacactggtacctggccgctgtctgccagacactgctgggcacctagaatacagcccggacagcagaggcccagccctggtggagctgactttcttttatttattttttatttttattttttaacagagtttcgctttgtccctgaagctgaagtactgtggtgtgatctcggctcactgcaacctccacctcccaggttcaagcgattctcctgcctcagcctcctgagtagctgggattacagscacgcaccaycacacccggctaatttttgtatttttagtagagacggggtttcgccatgttggccaggctggtcttgaacgcctracctcaggtgattcacccacctcggcctccgaaagtgctggtgctgggattgtaggcgtgggccactgcgcccacttctttttttttttttttgagacagagttttgttctatcccctaggctggagtgcagtggcgcaatctcggctcactgcaacctctgcctcccaggttcaagctattctcctgcttcagccttccaagtagctgggattacagacgcccgccatcacactcagctaatttttgtatttttagtagagacggggtttcgccatattggccaggctggtctcgaactcctgggctcgagtcacaggtgtgagccaccatgcccggccaagtggtggacctgactttctagtggtaggaagccatcaataaacaatagtcctaggaaactgagcaaatgacacggtttgttggaggccatagtgagtactatgggaacagaaaaagggcagctgggtggcagggatgggcctgtgtgtgcacagagagaagtcagaggtgatggaggcagggcctggtatgacctcaacagacccagccccaaagrccagagacttgggcttcactctcactcctccccttgactcgctgtgtgaccctgggcctgtgttttcccatttgtcaaatgggagtgagggctgcccctggcagtggggtccacctatgcttagtggaccccggagggactctggccagtccaggctcacattgtcctctgtgtcccgggtctccatgtgcagcttcctggtggaaatgattgttttcaaaagtgtgaaaactattgtgctcaagatcaccggggggctgggcacagtggctcacacctgtaatcccagcactttgggatgccaaggcgggtagatcacatgaggtcaggagttcaagaccagcctggcacgtggcgaaaccccgtctccactaaaaatacaaaaaaattatctgagtatggtggcaggtgcctgtaatcccagctactcatgaggctgaggcaggagaatcgcttgaacctgggaggcggaggttgcagtgagctgagattgcaccattgcactccagcctgggcaacaagagcagaactctgtctcaaacaaacaaacaagcaaaacaaaactgaagatcacaagggttcccaaagtgctaaggaaaatgtgagtaaaacccaggggactggcaggctgaggatgaagagaaaagaggggtaggggaaggcccaagcgggtgaccaagcgtcccccaccagggctgcctcccaggcagtccttcgtggggctgagggcttctctgtcaaagtctgtgtgagggctcagtgagatgaacatcaggccatcccagagctggcctcaggtcagtatggcctcccccagtggggttcattacccactgccagccccactgttgccctcaccccggctagtgcacgtgcgcgcgtgctagaccccccagagggactcaggttctcactgagcactgtgtattcctcagctcagtcctgccactctgcatgaggggccgtttggcaggtgaggaatgtgagaccgaggctcgccctaaagccagcacattctccagaatgttagggacttcaggggtgttccttcttgctcattaaaaatgttcccccaggctgggtgcagtggcttacccatgtaatcccagcactttgggaagctgaggcaggaggatcacctgagcccaggaatttgagaccagcttgggcaacatggcaaaatcttgtctctagaaaaaatataaaaattagctgggcatggtagcatgtgcctgtagtcccagctactcaggaggctaaggtaggggggtcatccgagcctgggaggttgaggctgcagtgatctgtgattgtgtcactgcactccagcctgggtgacagagtgagaccctgcctcacaaaaaaagaaaaaaaaatgttctcccaccccaaatgtctggaaccagagggatggttagagaaggcacagttcaggggtacaggggaaccagaccctgaattagacagcacagtagttcccccttatccacggaggatatgttccaagactgccagtggatgcctgaaaccacgggttaaaccaaaccctatatatatactgtttcttccatctgataaccaagactgctgtccgggcacagtggcttacrcctgtaatcccagcactttgggaggccgaagtgggcagtcacttgaggtcaggagttcgagaccagcctggccaacacggtgaaaacccatctctactaaaaacacaaaaattagccgggcatgatggtgggcgcctgtaatcccagccacccgggaggctgaggcaggagaatgacttgaacccgggaggcagacgttgcagtgagtcgagatcgcaccactgcactccagcctgggtgacagagtgagactctgtctcaaaaaataaataaataaataaaaagtggccaaaggacactaaggagcatgacaacaaaatgcagcatggattccgggatggaatccaggaatggraaaagggcagcagtgggaaaactggtgaaatcagaataaagcctggagttcagtcaacagtgctctactgatgttgatttctttgttttgataaagtactgtcactaaatacgatgtttttttgttttgttttgttttgttttttaagacagagttttgctcttgttgcccaggctggagtgcaatggcacgatctcggctcactgcaacctccacctcctgggttcaagcgattctcctgcctcagcctcccaagtagctggggttacaggcatgagccaccacacctggctaattttgtattttttagtggagatggggtttctccaagttggtcaggcttggtctcaaactcccaacctcaggtgatctgcccgcctcggcctcccaaagtgttggattacaggcatgagccaccgcccccggcccaaatacgatgttaacactagatatagctggatatgtgggattctctgtactgtctttacaactctgttgtaaatctaacattctttcaaaataaaaagttaaaaaaagaaagagaccaaagtgggtcaagaaacagcatttagactgggcgcggtggctcacgcctataatcccaacactgagagaatgaggtaggaggatcacttgggcccaggagtttgagaccaggctgggcgacatagtgaaactctgtctctacaaaaataataataataataattaataataaaatttkccagtctgatggtttgtgtctgtagttaccagctactcgggaggctgagataggagaattgtttgagtccaggagatagaggctgcagtgagctatgattgcaccactgcaccccagcctgggagacagagtaagaccctttctctaaaaagaaaaaaataaaaaagaaagaaacatcatggagagtatgaacccttttttgtcaactcagtgcatccatgtgcatcatatgtgtacacataggtgtcatgtgtgtacatgttcacaaagatatggaaggatgaacactaggggtttggaatatttttatctttgcatctttgtatattgtttgatttttgttttgcaaagagtaaatataggcataacttttgtaactagaaaaaaggctttttggctgggcgtggtgggtcatgcctgtaatcccagcactttgggaggccaaggcgggcagatcacttgaagtcagaagtttgagaccagccatgaccaacctggcgaaactccgtctctactaaaaattcaaaaattagccaggcgtggtggcaggcacctgtaatcccagctacttcggaggctgaggcaggagaatcacttgaacccaggaggcagaggttgtggtgagccgagatcacgccactgcactccagcctgggcaacagagtgagactccatctcaaaaaaagaaaaaagaaaaaaggctttttaaatcttacagtttgaaaaataaaatagaatgctcccctggccctgaaccttcctctgcctgctctggtctccctggtgaatcaacaccttgtaaagtcagtgagttgttcctcctaagactgagctttggggactgtcagtggaactctgggggtggagtgaagagaagcctcaacaacccccaccaagcccgactcacaccacccccgacatcctccccagagcaagagcccaggcaggcacacgcagggggactgggaactcggtgttcgtgtctttatttggagactgggagacagattacagtttaatgagaggaacgacgactcaagtgatccgatgggaagggtgagtttcctggcccttagggagcgacagtgccctggacaggaggtctttgagtgggagtggacactctagaggcctccccagctccaggctgtgcacctcttgagggtgggcaggcttgggagtctgtgtcctcattgtctcctgtctacccttggccacaggcatctctgggaagagccagatcctgtttgctctcgtcttcaccaccaggtacctggacctgttcaccaacttcatctccatctacaacacagtaatgaaggtgaggggctgggtgatgatggttgggggaagccaccaagcccccacaaactgtgaggtagcctgcttggaaactcattctgtggagccaggccgacctgggtttgaatcctgactttgctgcttagtggctgcaagacctcatcttgggcctctttgtatgtcagtgtcctcgtgcaaaaatgaggacagggctgggcactgtggctcatgcctgtaatcccagcaatttgggaggccgagtcgggcggatggagaccatcctggctaacaaggtgaaaccctgtctctactaaaaatacaaaaaattagccgggcgtggtggctcatgcctgcagtcccagctactcaggaggctgaggcaggagagttgcttgaacttgggaggcggaggttgcagtgagccgagatcgcgccactgcactccaccctgggtgacagagtgagactctgtctcaaaaaaaaaaaaaaaaaaaaaaaaaagacagtaccattacttagctcagagggtttggttgggaacattaaatgagataataaatgtaaatgtaaaaaaccctgccatatattaaacattcaataaagggtcacacctgtaatcccagcactttgggaggccaaggcgagaggaccgcttgagctcaggagtctgagaccagcctgggcaatgcagtgagactccgcctctacataaaatttaagaaatttagctgggcgtagtggtgctcatctgtggtcccagctactcaggaggctgaggtgggacaatcacctgatcttggtagatcaaggctrcagtgagccatgatcatgccactgtactccagtctgggcaacagagtgagatcccgtctcaagaaaaaaaaaattatttaggtgatagagaaggattagagagctacttcagggagtgtggtcagggcatcttcaaagagatgacatgtaagctgacagcttagtgacaacaaggaaccagccatgtaaagatcaaaggacacaccttctttctgtttttttaagacggagtctcactgttttctgttgcccaggctggagtgcagcagcgcaatctcagctcactgcagcctccacctcctggtttcaagccgggagcttgccttgtgcctcagcctcccaagtagctgggactacaggcatgtgccaccatgtccagctaatttttgtatttttaggagagacagggtttctccatgttggccaggctggtctcacgctcctgacctcaagtggtccacccacctcracctcccaaagtgctgggattatgggtgtgagccaccatgcccagccaagatgtagattttagttggacacattatctaataggaatcttatttcttgtgcagtggtgcgatcatggctcactgcctcaacttcccgggctgaaggggtcctcccacctcagactcctgagtagctgggactacaggcacgcaccaccatgcctggctaatttttttgtatttttaatagagacaagatttcaccatgttgcccaggctggtctcaaacccctgggctcaagtgatctgcctgtgtcagtctcccgaagttctggaattaccatgatcagctaggagtcttttttttttttgagacggagtctcgctctgtcgcccaggctggagtgcagtggggcaatctcggctcactgcaagctccgcctcccgggttcacgccattctcctgcctcagcctcccgagtagctgggactacaggcgcctgccactgcgcccagctaagttttgtatttttagtagagacagggtttcaccttattagccaggatggtctcgatctcctgaccttgttatctgcccgcctcggcctcccgaagtgctgggattacaggtgtgagccattgcgcccggccaggagtcttcttttttgttgttgttgaaatggagtcttgcactgtggctcaggctggggtgcagtggtgcaatctcggctcactgcaacctctgcctcctggattcaagcaattctcctacctcagcctccagagtagctgggattacaggcacccaccaccacgcccggctactttttgtattttttgatagagacggggtttcactatgttggccaggctggtctcaaactcctgacctcgtgatctgcccaccttggccccccaaagtgttggaattacaggcgtgagccaccacacctggcccccccttttttttttttttttgagacagagtggagtgcagtggcacgatcttggctcactgcagtctctgcctcccgggttcaagttatttatttatttattgtttagacagaatctagctctgtcgcccagggtggagtgcagtggcgcgatctcrgctcattgcaacctccacctcccaagttcaagagattctgcctcagcctcccgagtagctgggattacagatgtgtgccaccatgcctggctaacttttttttttttttttgtatttttaataaagacggggtttcaccatgttagccaggatggtctcctgacctcgtgatctgcccacctcggcctcccaaagtgttgggattacaggcattagccaccatgcccagtcttttttattttgagacagtctccctctgttgcccaggctggagtgcagtggtgtgatctcggctcattgcaacctccgcctcccaggttcaagcgaattctcctgcctcagcctcctgagtagctgggattacaggtgcacaccaccatgcctggctaatttttgtatttttagtagagacggggtttcactatgttggccgggctggtctcgaactcctgacctcgtgatccaccctcctcggcctcccaaagtgctgggattacaggcgagagccaccgtgcctggcctaggaatcttatttctaaggaacaagggttccatgggggaattctatcttgcagggctattgagaagatcacatgagataacatacagcacctagaaaatatttaactaaagtgagttgtccttttcttccatatcagagacatccctttgggatttcaggcatgttgttactagttggtagagtggaggttgctgttacttgtgaggtgttgaactcattcagatttagtgaatgtgaatctgaggactggaaatcaccgtctacttaagttcacacatgtatcaaacatcacctgctagttcatttctcagcccaagtcagccttgggcattcctggcagagacagcagactcagcccttgccatagctgaatgaggtctaggaagctcaaagaggctagtttctacatttatgaaatgaaaaagtgaccacctcattcactcattccagcatttgttttgtgccagggactgagttaggagctggggattaggaggtggaccttgccacggagtcctctcttagaggggagatggacttgtacctagacatttacagagcatgtgatcacgggctaaaatgagtatgttcacatggagctatggcgacagaatgtgtgcctcattgtagtgaaaaaaagactgcttcgaggaaataactccaaataggagtacaaataggagtgctctaggccagtgtggtcctgctccggcagtatcagcgtcacttgggaaacttgttagaaatacaaacttttaaggctgggctcggtggctcatgcctataatcccagcactttgggaggccgaggcgggcggatcacctgaggtgaggagttcgagacaagcctgaccaacatggtgaaactaaaaatataaaaattagccgggcatggtggtgcacgcctgtaatcccagctactcaggaggctgaggcaggagaatcacttgaatccaggaggcggaggttgcagtgagacaagactgcaccactgcactccagcctgggcgacagagcgagactccatctcaaaaaaaaaaaaaaaaaaggaagaacaaactttcaggcccatccagacctatgaaatcaaaagctcttggggcaagggaagagacagcatctgtgattttttttttttttttttttttttttttttgagacagagtctcactcttatcccccaggctggagtacaatggcatgatctcggctcactgcaacctctgcctcccgggttcaagcgattctcctgcctcagcctcccaggtagctgggattacaggcgcccgcatgcatgcctggctagtttttttatttttagtagaaacagggtttcaccatgttggccaggctggtctcaaactcttgacctcaggtgatctgcccaccttggcctcccaaggtgctgggattacaggtgtgagcctccacacccaggcagcatctgtgttttgatgcacactcatttgagaagtgctggcctggaaggttggaggccatatcaaaatgaaatcattatatgccagaggacagctactgtgattaggagagcttttctgaaggagcaatggtcagttagttcaagggatgttagcaggccataagtagtcccagcttctagggaggctggagcaggaggatcactcgaccccagggtttgaggccagactgggcaacatttaaaaaaaaaaaggctagtccttgtggaagaatgctcagaagtcactgatgcatatccaggaaattgttttaaaattgtttcaagagccctggaatgcctctggtaaatcccctgaaatagaccaatcctgtttcacctaatgctccacaaatgaaggggacgacaagggcacctttgttcatggcagcactgtcagtcccagtatagaagcatggagttatttaatgaaagggtcactgatttcaaattctaggcaactggacccaagataaattgcaaacacatttaacctcttcatgttacattatggcagaacactgacccttaggtttggtaggctaggagcgtagtaaataggcygggaaatgacttcatagattcgattcccatgtctctctccccttttaggtggtttttctcctctgtgcctatgttacagtgtacatgatatatgggaaattccgtaaaacttttgacagtgagaatgacacattccgcctggagtttcttctggtcccagtcattggcctttccttccttgaaaactacagtttcactctgctggaggtaagggaatggactgagtaccagttctcaaagggaaatatgctccctgcatccttccctccagaccctgggcttgccttctgcttacaactgtgaccattactcatgtatctttcagttataagttgagaagaaattgacaagctatttacaatgctttagttggaaatgagcacatctcaatagtcatgatgcccataaaccaagcaggcatcacagccctacttctggctgttgagacgttctgttcaaccgattagcagatccctgtatccctgtagcacagtccaggcccagaaatttcaactcagtaagtttggactgtggcccatgaatctgcaggcaacaagcatcatgggagattctgatgctggtgtttatggacatgactaattttttattatttttttgagatggagtctcactctgttgcccaggctggagtgcagtggcaggatctcagctcactgcaacctctgcctcctgggttcaggtgattctcctgtctcagcttcccaagtaactgggattataggcacgagccaccacactcagctaatttttgtatttttagttgagacggggtttcaccatgttggccaggctggtctccaactcctgacctcaagtgatccacccacctcggcctcccaaagttctcggattataggtgtgagcctggcaacatgactagattttaagaaactgtggcttcaattatgattttatactatgaaactatcatttaagttatttttggccgggcacggtggctcatgaggtcaggagatcgagaccatcctggctaacacagtgaaaccctgtctctactgaaaaatagaaaaaaaaaaattagccgagcgtggtggcaggcgcctgtagtctcagctactcgggaggctgagacaggagaatggagtgaacccaggaggtggagcttgcagtgagccgagatcgcaccactgcactccagcctgggagacagagcgagactccatctcaaaaaaataaataaaaaagttatttttggctgggtgtagtggcacatgcctgtatgtagtcccagctactaaggaaggtgagatggaaagatcacttgagcccaggagtttgagactgcagcaagctatgatcatgccactgcactccagcctgggtgacaacagcaagaccctatcttaaaaaaaaaaaaattaaaagtagttttctatataaatgctcacgctacactgtgaaaaaagcagtgtactgtataatctttcaaaaattagaaaaaaaaacccttatatttacctagagatggtaggttaaactgattaaaatattataatttttattgagaactttttycctccttactgtaccttctccagcaagctattgttttagtaattatgttcttttaagatgggcctcttcttggtcttgctcagtctctggttgctttctctttggctcagatcctctggactttctctatctatctggaatcagtggctatcctgccccagctcttcatgatcagcaagactggagaggctgagaccataactactcactacctgttctttctgggtctgtaccgggcactctacctggctaactggatcaggcggtaccagactgagaatttctatgaccaaattgcagtcgtgtctggagtagtacaaaccatcttctactgtgacttcttctacttgtatgkgaccaaaggtaggtcctgggatgacagcaatgctgacactggcctaaggagttactcatccatttaataagtattccagcagatacagatgtgaacagtcaagtctctgccatccacaatgcttgtgttctaatgcaagaagacaaatattttcaataaagaaacaaatgccataaaaacatgcaggccaataggttatgtgtactatgcaagacagctgtgagatgacatttgacagaatacttggttagtagtgaaaaacattccagaacttattacaagccccaaggcaacmaccagcttggtgtgatggaaaaaagcctagtggggtcaaaatctataaacctggagatgagtcaaccaagaccagttcacatagggcaggggtgtccaaccttttggctgccctggcccacactgaagaattgtcgtgggccacacataaaatacactgayagcttatgagcaaaaacaaacaaaaagacacttcataygttttaagaaagtttacaaattcgtgttgggccacaaagccatcctgagccgcgggttggacaagcttgacctagcgcctcgtaggccagggtaaggggcttgcactacattctgattgccaagggcaggtattgggtcattaaaaaacccaatccactagctgctatgtagggtagaaagcagtccaagtacagtgactagctatggggcagttgcagttgatcaggaaaaaggctctaggtagaaagacatgtggacacaagttctaggacttgagaaggactgctgatttgattgtatgagatgtacaatagacaatttgaggccaatcgctaagtttacagctggggggaagggtgccagtaaccaagtcggggatcagtaggtccatagtcaaccggagatggactccccctttgctttaacaatcgaacatatactgtgagccggccattaagagatgataccaagattatgcatcaagttataaagcagtcctttcatcagatggtaaattcttatttcatctccattttcttccagtccttaagggaaagaagttaagtcttccaatgccaatctgaggaccttcagagacagtctacgccttaacaagcacatgaaggaaactattttgaatgttctctttggcaacttatccataatttgggatcaaatgttaaaaccagaaaagtgtttagtgtggatttcagcaaaacctgatcatcccacccagaagaccttctcatcaatagatcgcccttaaagacccattgtaaggtcataaaaaacctcggccamctgcacaaagatggtgcctcactgcaacaagaaaccttaaggtgtcttaccgacgaaataaaaaacataaatgattgttctccaaggcctgagggcaagactcatgatgagcaagtcaaccccaatctggaacaatgtccctcctcttagaatgtcccaactaaagaccagttaaaatattagggtacgttcttgtgaatttccactttccaggtagatgaccaaatttaggtggtcaagatataaaggtgwcagctagttttaagtgtgaaacttatttcactttcacactgccttcaggccagaagcaaaccaaatttaccaggtttggctggaggagttttgtgactcatcttttactggtttgaattttttcaaaccagtggctgatacctgccttgtacttagtaccttaataccaataacctaatggtacttaggcgagtaccatttgcacaatcactgttttacttatgagcagatacagatatatccaaacccttacctactaggtatcctgctagggttttcaattccaattcttgtattaagttttttcctttcagttttaggtgcgaaagtaatcagtcaatccaatatcccccatctttgtcttgaaacaaaaactgttttaagacgtctacgttgaattattcagagaattaagcaataaaagctcacaccttattgtcaacagtgtttttatttatacctacaaaaagaaaacaagatgatggtatcaaaaggacaatttacaaactaagaatagtaacatagctttcagcatcctgtgcctgaacatcacacatytacaagtctytcaagtcttaatgcaacaggaatgtgtctggagaccagcaagaacatcaatagagagcactgatcccaagcaaaagccactaaccttttagatgagaagtccacacaacraattgttagggaggattggggagaagcagcccattgcttaatacattggaaccctttccctaagttgagtttcaaccatgaatgcaataactagcataaaacgattcttctgctcatgttctgaagccaacagcagaacctgaattataagtgacagacatggaggcagaagagttaaactctgctagatttcagctgtgctcaggccataatagtttttgaggtttggaatttactgttattttatgattrcaatgtcccaggtggaaaaagggaagcaagcaatccaaataaccacttgcttgcccagagacctttccctcaaacagatgctttcaagagctgcgagagagtagggcatcccttgtggtggtacctctatgtttaaagaaagaagaaaaaaacccagaatttggttgtagaaaacaatgcccacaacagactggccagtgcttagacaaatttggggttggggggaacactttggtttgaaagcacagagcagtttgccatgtttcttctgtgcctaccattctcccttggcctcaacttctgtaagatgggggggggacaaaaagagaagtaaagttaagaagaaagtggaaaattaaaaaaaaagatgtcaaagtttttacatgcatatatttcagcttatgctgaagacctacctgtatgttgcacattgaatcatactttcagaacccctcagaaaccatccctctctccctaaagaattttaaaaggaaaacaaaacctcgagtatagatcttacagatgagcaagcattcaggccttagccaaagaatgcagtggagccttcccccttcaactgcattgtgaatgaataccaattaacagcataaaaattaatagtcccatatcagatctggaaggggtttctggggctgtctgatgtccctatcctgttgtagtgaacacaatagcagaaaattctttctgggtccatctgctataaagtcttggtaaaacagcattacyatgaagaggatgaactcacctaccttcagatggaggaaaagtgaaaaggacttaggctttagtcctccatgacttttcttaagcactacctacctgtaataagctgagtgcaaaaggatgccgaagaaaatctgcacccagaagctgttagaaagcactgcagagaacagggtatgaagaaaataaagagttcttaataaacccttaagattctttgttcaaggtaactttgccaaaagggcagagtaggtggcaaagagttgcttttaatctagctctacactgcatttgaaaataaaatttgcccattttgaatatattgtttataattaaatgtgctttttacactgcaggtcaatataaaaactggttagtaaatttccagcgagcatttatgttcatttgctcacagcagctgtctggatggaaaattaatttcacagatggtccccagttaaactgggaaraaatataggcagcttccacccagatgctgagatgctacagtttaaccactacaataaacacttgtggtttttaatttaaaggatacacaaaactcagcaattcaatttctagcctgacactaaaatggttatttttcagtaacggggggagaagtggggaggcagagtgtgaagggaaataaaaccaattagtaatttttaactatcaaatgcactccagcaatcagtcaaaacaggcccgaggaaacctgttccaacttaagaaacatttaaaagcacaaaagaaaatgtgcagggcamtccctctttgttttctaacccagtaatgagaaatttaaagcacagatgccatcttcctctgcaaaacaattcagccctccccctccctccctccccaccaactcagaaaaacaaaacatggggctcccacaaaagggcctaataccttactcttttagatgaaaaatagctcaaatatcttcaacatgcaagaagttgggggaagaaattaatctcttccagtcagctatatatatatatatatatwttttttttttacaaaatgttattccagactggatcattttggtgggcagaagaaacctggcagtgaattctaactaatctgcatgaaaagacaaatcacgatggttggggggaaaaattaaaaaaaaaaaaaagaaaaaaggaaaaaaaaagaaaaggcgaagaggaaaaaaaaaggaaagacagtgttccttaaaatgtaattaagtctgctggagtcactaccacttgagtggtttcatttacgtgaaggaggaggagggggaggaggaggagggtattggtaggcagtctgccccatgtaacctatcatattggtagctccyggaggctgtgcaaactgttgtgacatcagtggctgtggctgctgcccagaccggcctatcccactaaactgctggctagagctctgtgaacttctcccagttgaggtggtgctactagctccataagtgccagcaccatattcttgagctgtatagctactggtgccataagcagctgccccataggtgccttgaccataggtgtattggcctgcttgtgctccaaaggcagaatttggacttccatagccactgccattagcataaccagctctatcggtttcactacgatcccgatagcttgcagagtctctccggccaccatccttgactcctcgaagccttcggtcacactcatcctgatacatcagattgggattgttggctgaagaagtggtccggtaacgagaacgaccacctaatgggaagatacaagaagatttttaatggcagatataggacctaaacataacaatgtaaaaattctactgggtacaaaagtattaaacatgtctccttgatatttagttatgctggccagcctcccaattagtactgtaaaaatatactcataatttgattctttaatggggcacattcaaaagcacagtaaaaattaaaggacactagaccttttcacccttttaggccccttacttgaggatgatcaagaaacacggtattacaatatgaaaccttgagtcaggaagcccagatcctaggatattctgcaactgtagatgcaactgctatgtctcagtttctacccaccactaaacagtgtaaaatgactgacctctccgtatggaaaactggaaacctaatatactactaagcatttttgaaagtattaaaaaagcaaccatgaccgggggcacactggctcactctcgtaatcccagcactttgggagatcaaggcaggagggtcacttgaggtcagcagttcaagaccagccaacatggtgaaaccctgtctctacaaaaaatacaaaaattagctggacatggtggcacatacctgtagtaccagctacttgggaggctgaagcaggagaatcacttgaacccaggaggcagaggttgaagtgagccgagatcgtgccactgcactccagtctgggcaacagagtgagactgtctctgcccccgccccgccaaagcaaccacattaaaactcagaccagcctcagctaggtttggtggctcactcctgtaatctcagcactttgggaggccaagacaggtggatcaccagaggtcaggagttcgagaccagccaggccaacatggtgaaactccacagaccagcctcagctaggtttggtggctcactcctgtaatctcagcactttgggaggccaagacaggtggatcaccagaggtcaggagttcgagaccagccaggccaacatggtgaaactccacctctactaaaaatacaaaaattagcagggtgtgctggcgggtgcctgtaatcccagctacttgggaggctgaggcaggagaatcacttgaacctgggaggcagaggttgcaatgagctgagatcgcgccattgcacttcagcctgggcgacagagcaagactccgtctcaaaacaaacaaacaaacaaaaccaaacctcagaccagtctctaagaaaaaaaaattcacaatttagcttaactaataggactatcacaacaaacttcacgttttcttagttgaaaaaggttataaaaagcattaggcagtgtcctttgctattaagcaacatacttacagccttcttaaaaacagcaactaaaagcaagtcacagaaggcgtaaagagataccttggcagtacctggaaaactccaggacttacccttacccccgcctccgccgcctcctctgtggtccacaagctgcatcagttttggattgatagcctgattggcctcttccagcactttgataagctctctggcctgttttaggttccctggggtgaagaaggtataggcggtacccttgttggtgctacgggctgttcggccaatacggtgcacataatcctctgagctgtttggatagtcatagttgatcacaaacttgacatcttccacatcttccacgtcaatgatgagtcagtgtgtaggttgatgtggcagggaaaragaaggtaaaggacatgccaacaacaggtgggaagcacgaatgcagatgacagcaagaggaaagaaggtgaagttagtaaccactctgaacagaaamaaaaaaagactcatcccaacagagtaaaagaggattactgattcctgggacatgcataggaaataggatctttattggctgtagaatcctaagggaatcccatccaaacatccaaactcctgcctctgctacattttaccaatatactgacaggagttacaccaatattggtcttcagacgcaaattccagtactatcctttacaaaaccagaacatagaacaaagtggtaaaccactgtgaagttatgaggccaaatcacttctactctgttgggagaagcctggcaaaatctaccaacaacataacaaacttacctttaaaccagtcacagagcaaagtaaaaaaaggagcttcatatattttattactacaatttaaaggaaacttaaatgttttgattaacatttaactttttttgctcttatctttttaagaaactgagtagagccaaagctgttaagtacacacctattttcctttgcagaaacatccagattatctatcccctttcaattacaagagcacattacactaaaattttactgtactaccaagcccagcttctgccaaaatgaggatatttttgctcaactcaaggttatttcaactcaggacttgtttcaattatcaatgattgtctacgtgacctgggaaattaaattaatagccaaagaacgtgggaaaaccatgaaaccttgagacacaagtttagtattctctctactgctgggaattgggctgaataacctcctaaggcttaaaatgtaaatgttagtgtaatgctttcagctgaatgtatatttttacctacttaaacaaacaattttaagaatataacaaagaatcctactgttttgtggaaaaaaatctgcattttacaaagaatattcmgaaaatatcctagataaaacacagatttytgtgatakaaataattaaaaaacattctctgtttgttaccagaccgatgcacactccctcctcctttgggaaaccgctgcagccgatcccgtctctttgccttttatwtttggcggcctcctttcgaaaactccgccttctgacacgggaccactggagcgcggggagcatgcatcaagggtccgtggcagtgagaagtccccacacacgctcgctctgtgaactggcttagatgcttctctgtagccccatttggttgccaagcgccggagaacctgggttcgggtaaaaatttcaggtcctccaacgcctcccccaaggataattggggtgattgtagaaaaaaataattaataaaaaaaaatgtaagttacatccaaagggtcagactgcatctattgcccagactggattaatttcaagggagaaaggggagatyaaaaaaaaaaaattagctgttgttacagggcttgtgaagaaggggcattatgtctgtttcttattacaataaaggctcctcggtctttactgacccctaaagtcctgaatcacaccagaaagacgagaaggcacttatcacagggggcagcttgagtctccggctagggtcgttgacgcaacaaaggaaaaaagaatttacagggccagggtggatgtaagacagggggtggggaattctactccatggtatcttcagagctaggataatgctccttatgcaatcccactgcatatgaccatggcagtagaacaagttcaattactacactggatgcgttaagtgtgctttcctagcagaaagcaccagggtggagtcaacagttcacatgctaatacttggaagtatttctagaagggggtgctcaatagagggcagacatgatgcaagttcttcatactagaaaggtgtcctgtgtgtgcatgcacagctggatgggggcacacaggagcaagcgcagaatttggttttctccagtcaagtctaccctgatgttatctgtgcactgccacaatattatcttgctgcctttctagaagatgctgtagcagggtaagaaatccaaagttaatgttttggccagctgactgggataagaaccttttgtctgaaaggccctatgacatggcctgaatcgccaatcactaataaggagggactaagtctagccaagaggctcatctagagctgcttccggccaatgtagatttgtctcggccatgtattgagtgatctgcagctgatatcaaagcttctgttaaaaaacaaaacaaaataaattcaatacttttagtttaacagtgtgtagttcaaacaaaaaaaaggaaaaataaaaaatatcccagtggaaagggaagtggtagcctaaggatgactattataaaattatgggaatcaaagaacttacctgaagggaacatttaagagaccatcgcttgacaggaagtgaaaaaaggccctggtgactcagctgaaaattgcacccctgtctatgaggtagaagccttcactttccaggatcttgtaggacattggtcagaattctgccattttggtgggttttctccctcttttgattttttacaaggcagcaaacaaaggggcccaaaacaagcactgatgttgagtaacaagaaacagactcgggtaccttccctctcccctcacttggatgagtgggggtgggatgaagagtctaagttattctaatggtagccaattaatttggtttagaaatgcaaggggacatggagcaaatatttttaattgtctaggcaagatgcacaaagaagctaccagcacatagcaagcctgtttaaaaaccaaccattactgaaagctttatgtaaactgctttcaggcctccgcctcctctcccaacaggcccaagttctaatggcacagatccagacatgacctcagagggcagaggggcagagagaactttccatcatggctgcaggtcaccacctctgaaggagggaatgatgagtgcaatgcataaaaaggcttcattacttttgtattccagtttgaatacctgttctctttatattatatagtataagggaataatatggtacttctcaccttactgggcaaattaaatacctgtcaataatttaaggatttccttgtaatacaaataatctttttttttaaaatatagaagttctgagttagacctgtttagctcagaatagtgggctaaactaccataaaattctctgtatatcttaaatggtaatgggtcaaaaactccagaaaatcatcagttgataacacacctacagataagtgcatgggtaggaggggatagccaagtgcccatgataatttgacctcagtaaattaaactgggcaatacacatatttgctattctgatactgcattagacttataaaattccatctaataagcattcataaaactggacctctctgtatatatctagcttagacagggatagggaaaagaataactgaagaaactagcttacaatagctaggtttcgtcaggcttattctatccagccagaaaccaccaccagagagaagctgagccattcagctgtctgtctcctctccctctgtttgaatagtcatgcctaggccttgctgcagaccaaagcctgtttgttaggagcaggaagagactttgaaaataaaaggggggtgggggaaaccaaagttaaaaaaaattgtggggggggcagggaatggggagaatcacgctttgtatttttttctttcaaatatttatctaaccacatgtatatacaactttctaaacttgaagtctgaatttgaaatgacgaatctttaaaccaaaagatacatataccattgacagagacacctatctatacaaacctagcccacgggaggctacatctgtagcaataaggatgggtgcctttccagaacggaactctgtaaaaacaaacaataatcatcatcaaataagcattccttgctatctgatctgtttacataaccatgttaaaatttcaaataatggtgccagaaaatcccaagctcttgtaatgactgacagtgattcttttgaaaatctttattacactcatattcagcagcacaatagttacctctactaataatgaaataccgttaagagagtgtggcaatttgttacataattaatatgagctagatttttttccccttaaagttatttcccaaatgagacacaaccaaaagttgggggtcagtaggaaacaagttcaaaagatgtagaatgaaaagaactgaatttccccccaaaaggtatgcatattatttatttttctttcttttttttgagatggagtttcgctcttattgccgaggctggagtgcagtggcgcaatctcagctcaccgcaacctccacctcccgggttcaagcgattctcctgcctcagtctcccaaatagctgggattacaggcatatgccaccatgcccggctaattttgtatttttagtagagacggggtttctccatgttggtcaggctggtctcgaactcccaacctcaggtgatccgcccacctcagcctcccaaagtgctgggattacaggcgtgagccactgtgtccggccacattttatttcttaaacaaaatatggcctcttccatttctcaatggcttcccttaagagtagtcctgaaaaaaaggactgaaaggaaatatgctaaaatatgactcattaagaaacatttttctttaaatatttcagtaacagtttaattctccccaaacggtagttatatttttataatcagaaggaaaaaattgaagactttattaataaagggagggtggtgaaagttgtgaaaaagtttaaagagccagcatcgtggcccttaaagaaccatgagcacacgctaaaagtaccctcagtaattcaatcaactatacaacaggggtaagacaaactggcctttgggccaaatctggcacaacgcctatttttgcaaataaatattgtctgaacatagccacgtttatctctttgagacagggtcccaccctgtcacccaggctggagtggcacgatcttggctcactccaacctgtctcctagactcaagcaatcctcccacctcaatctccggagtcgctggggttacaggcgtgcaccaccaagcttggctaagttttgttttgttttgtttttcttttagagacaggatttcactatgttgcccagaccggtcttgaactcctgggcctaggtgatccacgcgcctcagcctcccaaagtgttaggattataggcatgagccaccaacggtgcccagtccaggccacttctttacatattatctacagcctacagcttttgtcctaaaacagcagtgctgagtggctataacagagaccaccatttggtttacaaagccaagcatacttactatgtggccctttacagaaagtttgcctatccctgaaatagagcatgaacattcacttatgggcagggggtggggaatcaacagaaaatgcttagttttaaacttaccattaagtacccaatctctttctggttgactcttgtctccatggatacacatagctggccaactatcagaagaaaagtgaccaatattttaaaaatcttttaaagtggagaaaatcgaactttaaagccaaatgctatcatgcaatttttgtaaggtttgtcaggcttcatgaatagatgactgtgctcattaaaagagcaaactgcatggataggcattattgaaatattacacaacatttggaataccaatttagaaatttccagttaactataaaaccagaggttaattgccttggtgctatactcacccatctctgcgcatccttcgagtcagatcatcacagcgtctctttgtctccacaaatattattgttttgttttccttttcagccattatttcttccattagttggatcaacctgaaaacatgaccaacaatgcagtcatcacacagaaagttattatgtggacgattatgtctgcaatatcaactcccaaggctacagtactttctttgcacattacgcttttaaaatttttaataactattagagtactgagtcaggttctgctatgtgctcaagaaatactaactcataccatcctcacagcaagtctcatgtaagtggtattactcccatttcacagatgaagaaactgcagcaccaagacacaaaattgtgcaaaattatacagcttgtaatcagcagagctaaatttcaaactcaagaattcagaatccttgcatttaaccataatgctctgacaaatgatatgatgatggattatcagaaacctagcaatgcttttaatgttctcaggcctcaaaatatactggtttctacagtactaattttggagggttattagaaaaggtttatcagcattatcaaatcagagtaaaatatctttcatacttgtggtctttttcactttccatgcagacatccactatctggaggatgttgtggttggcactcaactccagattgcctacgttgatctgggtgtaatcacgaaggaaatcctctgcaagctgtcttacttcttttggccaggttgcactccacatcagtgtctgcctatcaggctatcaaaaaaggaaaggctttctttcaggctaaggaacttggacaaatggcataaagactgcttattattagctttacacaccctgatttggtcaacaattttacggatctggggttcaaaccccatatcaagcattctgtcagcttcgtccaatacaaggtaagtacatcggcgaagatttgtctttcctgactccaggaaatctatcagacgtccaggagtggctatgcagatctcaacacctgtaaaacaaaaccaatgatcgagccaatcgactaggtgcagtggctcacagctgtgttctagcactttgggaagaggaggcgggaagatcgcttgaggccagttcacaaccagcctggtcaacatagcaagaccccgactctacaaaaatgcagcagcagcagccctggtggctgtactcaatgctgcagagaagctatttttttttttttttttttgagatggagtcttgctctgtcacccagactggaatgcagtggcacgatctcggctcactgcaagctccgactcccaggttcacgccattctcctgcctcagcctccccagtagctgggactgcaggcacctgccaccacgcctggctaatttttcgtatttttagtagagacggggtttcaccatgttagccaggatggtcccaatctctggacctcgtgatccgcccacctcggcctcccaaagtgctgggattacaggcgtgagccaccgcactggcccagagaagctaaattttaacaaagtaaccgcaaaaccatgtcaggacttatgtacaatcaccaaatcctcacaaagtttccagccatgctgaaccttctctctcaaaatagctgttttagtcacatc

SEQ ID NO: 94586 - DNA, 19440 bp, Homo sapiens
cccattatttgccttttaacacatccattctgatagacattttgattggtctctgaaccctgaaagagccaattcctcaagatgaatcctgggcctgaatttaaatttgagacaagtggttatttgctgaccagaggtcacacacatactttgagtttctggaaaaactttgggacttacatagctgcctgttcctgtttacgccaccagtagactgtgacctgctttgactaatcagaacccagctagagccaagtaatcagaactaaaaagtttgaatctttcatttgcataagcagacctgagtgggattctgagcgggaattttctctagaaaagacaaagcctccccttgttctctggaatgtaacttccttttgtaccaaaagttgtgtctgttgggtttgcaaactgtaactgttcactggaataagtctctttcctctaaattccttttcagagaactttttttcaaaagtccaacagaagaagtgaaaaaaatcaatcggtcatacatttgaaccatagccccaaatccaatcagggttagtcgtgggcaaagaatgtggaagtgattaaacttcctcctctttttatcaaacaatggacctaatcaggttaatctcatcagggtgtattagaggagcttccaagggggtgattccttggaaatcagaccctccagaactccagcttatcattctctgctgatgggccaggcttccatgacatccagccagcaggaggcagtattccccaagttcacttaaccttcagcttttcataatgtgagaaacagtctcgcccatcccaacccaaagaatggactcggagacccggagaacagtgaaagtgagacttttaatgacagtcttgcaagatcaggtgtctgacaggcacacccagcacactttcaacaagcagtttatcccctagtgcacaggtccctcccccagttcctcataggctgagtactacggggtcataaacttctcgcctgttgattgttgggtgggagcgccaggagttttttgttttttgtttattttagggtcgttttgctgcattttgttgcagcccacaatgcattgtaatcttagttagcttaggggctcttcaagtgttagacttatgacctaagtagctgggcaggctaagaacagacaaaacaagctattttgcaggctagtaaactttcatcttagactaaactactttggttcaggtgaaggcaactaaggggcgaaggtggggaagggggaggctgacaagcaggcattggctggctatccaagcagggacctagtgtatcatgtttcttctgtaggttgctgacctaagccaattcaaagcattttgtcttagaaacggaccactgtaggctgggtgcagtggctcacacctgtaatcccagcacgcactttgggaggtcgaggcaggtgaatcacgaggtcaggagtttgagaccatcctggccagcattgtgaaaccccatctctactaaaaatacaaaaatgttctgggcatggtggtgcatgcctgtaatcccagctacttgggaggctgaggcaggagaatcgcttgaaccagggagtcggtggttgcagtgagccgagatcacgccacagcactcaagcctggcgacagagaaagactccgtctcaaaaaaaaaaaaaaaagaaatggaccactgtatacgttatttccttcaataaggaattgggttgaccaaggtccttgttcccaaagtaccattttcccgggttgtttgtttttctgtttgtttgtttatttgtttgtttgttttgagacagtcttgctctgtcgcccaggctggagtgcagtggtacaatcacagttaactgcagccttgacctcctaggctaaaacaatcctcccatgtcagcctcccaaatagctgggactacagccacatgccaccatgtccaactaatttttgtattttttgtagagatagggtcatgccacgttgcccaagctattctcaaactcttgggctcaagagattctcccgtcttggcctcccaaagtgtcgggattacaggtgtaagcycccactccctaccttttctggtatttagatacaaataggatataaaaatacctccctcctcctctctttctctcatttaaattactactaagagtcagatctcaacacttcctgtctgcagagaattgaggaaacataattccaatctgaggaccaaaccttagagggtggaaattgaagaagtctgtggctaccctgaggtcctggctggactccccccatccaactcattgcaacatgtgccaaccatcaggacctagaatctgagaaatgggtgaatgagatcatttgatgtgggcatttctctaatccccttttgtaaactcgggtttacaaactcagatgcctgcaatgatcacctagggaggcaagtagaagagaggactagaagggattgtggtaatggggagaccctgtctgaatggggaggcagcttcccagtagaggcctagagttcttaacttggtttttaggagaaaaacatctcaggagaaattggaacttgggtttttatatgacctgttctttggtctaacctgttagggctgctctgtgagactctctggtaagagcagacactgtgaatgtgcatagcccctcctcccatgaagcttagagtctagtggggaatcttgtgggagtctagcgggaaaataatgacaacaacattttttttattgttttgttttggttttgtttggttttgttgttgttttttttggagacagagtctcccaggcttcagtgcagtggtgcaatctcagctcactgcaacctccgcctcccaggttcaagcaattctcctgcctcagcctcccgagtagctgggactacaggcacacactgccatgcccggctgattttttatattttaatagagacggggtttcaccatgttgcccagctggtctcaaactcctgagctcaggcaatccacctgcctcggcctcccaaagtgctgggattacaggcgtgagccaccgcacccagccaacaacatgttttaataagtgtcataagagagaatgtccaggcacctggtctggaatacgtagttttcaaaggacccctgacaaaggaaaaaaataggatgacagctgaacagtgggaagggcccagccccaatacacaatttgccggcagtgtatgaactaggcagagatgcggtgtgtgggaaggctgtgtttcaggagagagcttggtgtgtgtttggaaatagaagaaggccagtgtggctgaggcctagagaaacaaggaggagaatgtctcaatttaggctagagaaagaggccgggccagattccatgggttactaagggggatgccccctgtaggatcatggtgatgggggacctgctttaatttggtggacagaggtctaggaatactacacattcaggaattctcaacactgttccaccagcctagagccatcttccatctgaatcagttctcaagtgccccacccaaagttcttatgttagaaaacctattgacaactatatgagtctacaacttatttccactttacatataatcttaaaacaattgcttgtgatgtttctatatacactgaattttcttttactgcaacaaccatgtaaaaagagagacactgtagtgtagtaaaatggagccaggcaaagctgtgcacacctgtggtctcagctactcgggaggctgaggcagaatcacctcaactccagctgaggagttggaagctgtagtacactctgatcacacatgtgaatagccattgcactctagcctgggcaacatagcaagaccctgtttctttaaaaaataaaaaaaacataaaatacacataacataaaacttaccaccttatccatttttttttttttttgagacaaggtctcactctgccacctaggctggagtatagtggcataatcacagctcactgcagcctcaatcttttaggctcaagtaatcctttcacctcagcctcccaagtagctgggaccacagacatgcaccatcatgcccagctaactttttgtggagacagggtcttgctacattgcccaggctggtctcaaactcctgggctcaaacaatccacccacctcagcctcccatggtgctgggattataggtgtgagccaacgcacccagtctcaccattgttttttttaaagatacggcttcactatgtgttgcccaggctggagtgcagtggtgtgatcacagctcactgcagcctcgaacatccagactcaagcagtcctcccacctgagactcccaagtagctgggactacaggtgtgcaccaccacacctggtgaatttttttaaaaatgttttgtagagacagagtcttgctatgttgcccaggctggtcttgaactcctcggctcaagcagtcctctgccctggcctcccaatgtgctaggattacaggcatgagccaccatgcccaggcaaccgtttttaagtgtacagctcagaagcatgaagtacattcacattgttgtccaactaatccagaacttttttatttggcaaaactaaaactccatgccattaaacaactctccatttccctctcccctcagcccctggaaaccaccattctactctgtctgtaggaatttgactactctaggtacctcatgtaagtggaatcatacagtgtttgtccttttgtggaccggtttgttttgattagtgtcttagtgaggtcgggctgccataacagagtaccatggtctgggtggtttataaacaacagacattgatacctcatggctctggaggctggaagtccaagatgaagggctagcatggttgggttctggtgagggccctctttcattcacagacttctgacttcctgttgtattgttacgtggcagaaggggtaagaggggcctctggaatcccttttataaggtcacaactcccatcatgggagctccaccctcatgacctaattatgtcccaaactttgaatctaataatcccataccctaataccatcagcttgggggttgagatttcaacatatgaatacagtgaggtagggggtgggtacccttagtatatataaagtcttcaaagttcctgcatgttgtcgcatgtgttggaatttccttcctttttaaggctgaattgtgtggagagaccacatcttgttgatccattcatctgtcgatggacatttgggttgcttctaccttgtggtttttgtgaataaggctgctgtgagcatgggcgttcaaatcaatgttgtatttgatttggtttagttagaaccatgagaatttgttccaaaaaatcacaaccatgacagcaaagttcttgtgataattatcccaagtggatatttttatttattatcacttatttatttattattattactattatttattactattattattttggagactggatctcgctctgccacccaggctggagtgcagtggtgtgattacagtacactgaggccttgaactcctgggctcaagcaatcccccgacctccacctccagagatgctgagattacaggcacacaatcaacttggccagctaattttgtgagtttttttgtagagatgggggtttcactgtgttgcccaggctgatctcaaatgcctggactaaaagcaatcctcctgcctcagcctcccaaagtgctgggactacaagtgtgagccactgtacccagctaatatttttttaatgtggtaaaatatacataacataaaattcagcattttaaccattttttggtatgcagttcggtagcattgaaagtagccacattgtcatgctacatcaccaccgcccatctccggaatgatttatcttttgaagggactgaggagctgggagcactgattgcaggaaggatctcatgaggactcagctggaggaagttgggcactgcagtcgccmtgactgggggcagcagcctgagcagtgccgaccacagcgcacacgcagaaccaggagccatggagccccaccgtgtgccccaccgtgcagcctcctcggccaccttcaaacagctgcatcctcaacaggttatgaggccccaaggagaacaggaaaagatgatctctaggtgccaagatgaaattgcacactggcaaaaggtaaagggggactgtaataccctccaagagcgactccaaaccttgcccaataggctgtcttaygagctcatggtgccaactgggcctcttgccttctataccaggaaggcttgtggataccagcaaaatcactcttctcctcggggacaactggttttgccagtgctctgcaaagcaagcagtggggttagtggagcataggaaggagtgtgtgaggaaagcactacatgactttacaaaagccaggagaaactttgaatctaaagttgcattcacagcagatctgcagggatggggtgatggggatggagatcttgttgacctaagaaaacatgttcaaaacaagtctgaattaaagagaaaaccctggattgcacataaacctgattcaaaatccaaaacctcaggttttgaaaatgatctcaagtccaaggatgcttacttacaaatgaggaactgtgggctcgactggaagaactggagagrcaagaaaacctgctgggtgaactcaaccatgatcctgggatggagttcacaaacagaggggaaggggctgggtgcagtgcctcatgcctgtaatcccaacactttgggaggccaaggcagacagatcacaacatcagaatttcgagaccagcctggccaatatggtgaaaccccgtctctactaaaaataaaaaaaattggccgggcatggtggcgggcacctgtagtcccagctactcgggaggctgaggcaggagaatcgcttgaacctgggaggtggaggttgcagtgagccgagatcacgccactgcactccagcctgggcaacagagtgagactccatttcaaaaaagaaaaaaaaatggaggggaacagggaaaaggtgggatctctgatgagactatgggcttccgtacttgggggaattttcataaggacattttaaagtcaaaactaatgcaaggtcgaaggcaaggtcaagggaatgattccaagcaccatccccactctgaacactgcaatgatggcagttcaggagatgaagatgagtcttcaccaacaatctatttttcccacaccactgaacccagaaaggtccatatagatacggaaaaaaacaggacattagttttcagtgaaaggaaagagggagctagacatgcctgggacctgaaccctggagacggtcagtttgtcctgggtcaccccgttatcagaacactggtggatatttacagaatatttgtgagccctgcaaatgaggagcatggccctcagaagtccaccatgagagcaggatgcagaaagaccctcgtatggagtggcgctggagagacgcaaaccactggccatgacgatccaggggtttcgatgaaccctggctgtgaagcagccatttgcagagagactgaaaaatcctctggagaagaaagaagaaagaggacatcctcagccagagctctcaccctcaccaggaacaggagagtcttttcctgggattgtsgtagaaaaataattcttacctccatctctgatgccacaccatgcctctgttctcaggtgtcacctaccttcccagagagaaaagatgctgtgtcagaagaagctccaaagaggatttccaaattcaaagctgccggactaaatctgagacactaggtcctgtcgtgatatgcaggtgcattcctccaggccaagggtgtttgtttagaacatgaaattcaagatgactccatagtgcctgggacaacacatcgtgggttaactcatctgtgctatgaaaagaattaaatacatttcgcacactttagtattcagaatttgttgttggttgtctttcataagattagcatcactgggcgcggtggctcatgcctgtaataccagcactttgggagcctgaggcaggtggatcacctgaggtcaggagttcaagaccaacctgggcaacatggagaaacccctctctactaaatayacaaaaagtagccgggcgtggtggcgcatgcctgtaatcccagctacttaggaggctgaggcaggagaattgcttgaatctgggaggcggaggttgtggtgagctgagatcaggccactgcactccagcctrggcaacaacaacaacaacaaaaagatcagcatcttggccagcagtggtgactcaatgcctgtaatcctagcacttggggaggccaagacaggaggattgctttagctcaggagtttgaaaccagcctgagcaacatagtgagaccgcatctctaaaaaaaaaaaaaaaaaaacaaaaaaaaacaaacaaacaaacaaaaaaaaactatttgtatttgctaatcctctctgtatcattccaagcaagcactttgaagaattttgatcatgttcatgattcttgtgttttaacccaaatgaagccccattttttaagcaatagttactttgatactcttcattcaatatgggtattttaaagaaaatcttaaagttaaaatttcaaatacatttcacaattctctttcatttacaaatatattgttgtaatttttgccacttaaaaattccaaataatcactcaaactgtggtgaactctaaaaagaaagctgtgactgggtgtggtggctcacccctgtaatcccagtactttgggatgccgaggtgggggtatcactggagcctaggagcctgacaccagcctgggcaacatagtgaaaccctgtatctacaaaaaaaatacacaaattagctgggcatggtggagcatgcctgtggtcccagctagtcaggaggctgaggtgggatggcctgagcctgggagatcatggctgcagtaagccaagatcataccactgcactctagcctgggcgacagagtaagaccctgtctcaaaaaaaaaaaaaaaaaaaaaagagagagaggctggggacagtggctcatcgtgtaatactagcactttggaggccaaggtgggcagattatctgaggtcaggagtttgagaccagccaggccaacatagtgaaatcctgtctttactaaaaatacaaaaaaattagctgggcgtggtgatgcatgcctgtagtcccagctcctcaggaggctgaggcatgagaatcacttgaaaccaggaggcrgagattgcagtgagccaagatcgtgtcactgcattccagcctgggtgacaaagcgagactcagtctcaaaaaaataaaagaagaagaaagctggaacctcagaagagagattttttaaaataattgtttacaaataagtttgtatatgtgtgtgtgtagagagagagaagaattggtgagacttggcataggatgggctgttgagtaagagagaggacccaagggtaatccaaggtccttgaatgggagctgaagtacttgtggagtcatttactaagatgggaatgtcggggagaggatagaagtagaaaggccaatagcctggcagtaggagttataaaaggagataaaaaatagagcaatgaatatttgaggaattaatagagctcttcacagccattttaagtcttttgtcatcagagatggttgttttactccgacgcttttctgaaagctctggcaaccagctacgggccaaagtgcttcatcttcaataagaagggactgtctcagggatagacaggatggcctatggcaggtattctggggtacaggcttttggtggcattgcttgaataactttgaaaccacagccctgcactgagccagatctccagaacactggttgagaaacacgtgagttcatgtaactgctgacccaaaatcaagcagaacaagaattaagtgcatggaacttaataaactggaagctgggtctcccctagaaatttggggttctagtgctgctgctcaaccatcaggggtcactggactgtttggggtgattgatccagactgctggagaaaagtcagggttttttcttttcyttttttttttttttttttggtgtttttgagacagagtcttgctctgttgcccaggctggagcacagtggcacgatctcggctcactgcagcctctgcctcctcccaggttcaagagattcttgagtctcagcctcccaagtagctgggactacaggtgtgtgccaccatgccycgccagggttgtttttttttgtttttttttttttctttttttgtatttttagtagagacggggtttctttatgttgaccaggctggtctcaaactcctgacctcaagtgatttacccacctcggcctcccaaagtgctgagattacaggcgtgagccaccgtgcccggccaacaccctcatatatattgatagagttatttggattgaggcctctaaaatcttaagtcactgattttccttaatcccctgagcctgcagaagtggactaaactcagcctattcagagctaaactcctttgtttgcagaggcctctctcactaggacaaaatatgccttcttcaccatcttgcccaatttccctcttggcctagaactagggttaagtcccagcacaacacagcaggagatgtgctcattttgagaagagagaaaaggctgggtgaggtgcctcacatctgtaaccccagcacttcaggaggctcacggggataaggaaaatcaggaggatcacttgagcctaagagtttggggcaggaagatcacttgagcctagcagtttgagaccaacctgggcaacatagcggaacattcacttctacaaaaaaaaaaaaaaaattttttttaattagccaggcttggcggctcacacatgtagtcccagctactcaggagactgagacatgaggatcacttgaccccaggaggtcaaagctgcagtgagccatgatcatgacactgcactccagtctaggggacagaaaagaccctgtctcaaaacattttttaaaaggggaagaaaagggactacacaccagaggagccrtaagacctaaccagcaggtaccagcaggagtcaagggactaggcatgggactggatcatgagggtgsgtgatagagggggaccagaacatgaagattagataagggtgagttttattgatgtgggagcattctgccatctgagcaccccacaaaatatcccattgattgactgtgttgttgacatcatgctagttgagttagtttagtaggaaatggctagcatgttggaggccttcataagaaacatgcactataaagggtaggagataatctgtatgaagattcagggaactgtcacgtgagtacagttttgagtkcctaagtggtcaaggcaggatgggtcagatcgtccaaacataatgcctggcagaactcttcaggttttgggaacagcatgttccacttctggcctatgtcgttggtctacagaaggctgccacctttgaatgcagcctggcrtagaaaagtcatctgggctgcagtgaaaacagycctgctgcttgggccataagactcggcagaatttaggggactggaggggtcggtggtaagaaaagatgccatgtggaatttgcagtgagctccagtgggagaatcacagcacaggccctccagccctgcacttagcagggctaagtgcagtctgcagtaatgaattrcatgtgttttgtaaaacaacttctgcagtgctgttggccctagcggaggaccataagatacctgttgaccacacattcacatctgcctatcacaaggtaagttgtgtcaagcccaccaagtcttaaagttggttaggcgcaacagcaatccattgttgaacagcagcatcaaggtgagtgcagccgctccctcctgtccacaggtagctgcagtctctgttcagtgccaacccctgccttgcaccaggctggactctgaggggacccctcaccctggcctttcctgcactcattggcactgagacgagagaccctggatgtagctggggcactgcttaggcctcagccagtggtgccaccctctctctgtgtcagaatcgagcaggcaaccctagtccaccctcaggacctgggcgcaggtgtgcagtgctccctctggagctgagtcagcaagaggatgcagcagtcgggggacccacccggtgagcgggcacccccagtcagcgtccaccactgtcctccatcctcatcctcgtcctcattactggaggagggagcgcatgtccaggcaggcaggacagagcaccgagccagaccaggaatcagcgggagtgaggcatctgcccacattcaccgtgtgctctgcagaaagctccctcaggcctcagtctgcacccaggctgccccgggagtgagaccccatccctgccctcctgctgccgccagagtagctgacagggtggtcccatgtggcccagtgacatgagggtcatgtggcattaccagtaacaagctggcagcaaagcaaaggggggatggagtcagctgaaacccactgggatggtgccagcgaggggccttgaaagttgaggaggtttcaggtaagcagaaaacaggggtaatggcagccaggagccgaaacatgagcaaggctgtccccaagagcaaggccaagaagagttccttctgctgggacgagggatccaggagcttgaggcattgggagcaggcagcagagggcaggtgggcacagtgggcgtgcctttacagggctcccttctcccgccaggcatgggctgcaacgagtgtacgcacccctcctgccagcactcgctgagcatgctgggcatcggccagtgcgtggaatgtgagagcggggtgctggtgctggaccccacctcgggccccaagtggaaggtggcctgcaacaagtgcaacgtggtagcgcactgcttcgagaacgcccaccgcgtgcgggtgtccgccgacacctgcagtgtctgtgaggccgccttgcttgatgtggacttcaacaaggccaagtccccactcccgggcgatgagacgcagcacatgggctgcgtcttttgtgaccccgtcttccaggagctggtggagctgaagcatgcggcctcctgccaccccatgcaccgcggtggaccagggagaaggcagggtcgagggcggggccgggccaggaggccccctgggaagcccaaccccagacggcccaaggacaagatgtcagccctggccgcctactttgtatgatgaccctgtcctccctcacccaggctgcagtgccatgcagacacctcatggcacttcaaactattaaaatgcattttatcttatccagagctggggcccctttgctggtgcagcgatgtcagagcgttaccgtgtccctgggcacctgtggggccctctctccctctccgaaacccaatacgtctcccttcagcctgcatacacgtgcccagagtgctccctgctatccctacaccctggcagtacgggcagggatgccccaaccctgaagccctggggaatagacccagtttgcactcacaccccatctcaatccgtgctgctgatggtagctgtgtgcacaagcagtggccctgatgccttaaggaaggcggccttgacagctgtggctccggcaggagaggagtctagtggagcaggtggggctgggagaccccctccccggatctggcttatgaatccccttggtcttcgctgcagccccctgctcagggccacgctcttgaccccacgcttctccgtcccctgctccctgctcccatctctgagaagccctgtacatggtgcccgtgtgcgtctggcagcttcccaggacctgctgcaattcccattctcacaacaaggccttatggtcttagaggcagctgggtgccccatggaacccattcacatgccaggtttagaaaataccctgtaggccagactgccctgtggtgccaggtgctggtggcagctgccctctgacctcagtgccttcttgtgctcccctccccagccacccgaggagagacacctgtgcgggatccactgtgtgttggaaactccctccacactccgcccgtgcctcattgagtgatgacgggagctcagcaaaacagctttccagactgttcagtgggacctttctttgaggggcaggtcaggaatgtttcggactcagacccgcccccgccccaactcagtagtagattcccaggctgcaccaggacttatatgagagctcctgtaaggaaacccagagcccaccaagcataccccacctggacccccttcctggaggccctcacaggttaacacgggggttccctggaacacagtttggagagctactcgaagctgaatgaaaatacagagacatggggaaccacatagagggtcctgggatgtgtctcagaagcacaggcttcaggaaggagggggtgctctcagagcttctgccccctcccacccactctggtcccattctggggccctagcaaggccacacctgttaggtccccagtgcggggctgtgactctgctcttccacccacagggcccagtggacctggagccttctccgcagaaggtttcaagacctccaggacccttaggttatagggctcattcaggcttggaggagcagagacggttcctaggtcttaaacccagaccacccagtccttccttactatgcttctgcactgcgctttcagccacaggcagggctaatcacaaagtgttcctttattttcctctgcagttgtcccttgtgtgtgaccctccttcaaggcccttggcttccgcagcttgattctgcactccgagtccattcaccttctcccatccaatagcatccaaccccgctgctactgctgccaacctggccttgggagcaatgaggacaaggaagggacaagaccccttttaggccagaactgccttcagatcagccacgctccatgggactgtacctctgccctggaggctggagaggtcagtggctgcagactgtctcaaggagcccctggccctgcccacctagccaggggtgcagccttgccagagaagcagagaagcgtctgtggctgggtgggtgatattgaaagattcctttcaccagggtggaagccaggatctgaggcgtgatggaatgtggacagtgaggcagtgacagcgccacaaggcaggagtcatctccaggcacgtccttggcctggagcccatagggacaagctcctggtggtgcctcactttgccatcctctctaagccgcagaccttgaatggaatcagtgctcaagagtctaattgggcccactctgaggatgcctgcgggaatatcagcttttaccgcaccacactgcactttacagtgtgggagggcctgccccacgcaccacctcacctatactgcggttctcaaacttcaccctacagccattctgttgtaggtgatctcaggggcagtttgagaaacagtggctcagggtctcacagcagccctctgagataggttggttgctattgtcccgattttttctcatcaagaaactgaggctcaggtgagctaaggaatgtgcccagggccacagtttataagaagtagcctcaagccttgctcatggttactgccctgacagggatctaggaaggagtgagcaggagaatgggatgaggcaggaccctccgccccagccctgctttctctgcccagacacctcctgccttgcagacccaaccccaccccagatggtttcctttccagtcacccagctgctagttctccaggttcctggtctcactccaggttcctcctgttagagaagcatcccagagacattcattcctggcaaggatgaatggttttccatctcccttagggtgtccagactctctgcccacaccttcataatttagttctttatttatattttcatcaaattctattttaattataccaggtatttcccccgatcactgatgaatatcttctaattataattggattcctaataaacttatttggtaaataaatctcctgtatcatgtgcacgtcttgggaaggaaattgttgcccacagaaacgtgaggaggctcagaatgtgctattagcaatgatgcagacattctgcaagtgatagttgcgtggaagggctgcagactctcaccgtagggcatacatggctgaagcgtcaccaccagtgctggctgttgtcacaaacagcaggggcctagtgggagcccaggcagcacaagcagaggggattttcccattggcctagagcacagtgtaagccatgccctgtcagcccatctgagagagatgatctgctccatcctcaaggtgaaggccagagaggaccaaataacttgagactctggaggagcctctcaacccagagaattgtctggggaccccagaggcctggtactcattttagcctgagcataatctcagaacatagttggagggctccctggattctgtagggaaaagaaggtatttttgccaccgatatgaaagccgatatgctctgagtgcaggtgagtgtttgatctgcatgaagatgctgggagtgaggacacctgggtcagcccagcctggaagagggaacctggaaatgcaaacatttacattgttggagcaggtgtcagggttaagctgttggcaagtctgagccagaggggctgacacaagctgggaactgccccaggtctctaggccttttccctacatgtgcagggagtgaggacaagcacgagaggggtccaggccatggtagacacagctccctttggtccagtgggatggattgagtttattacctgctgtaggcctcagcgaggaggagctggtcatgcaggtgtggccccagctgctatctgccccacctctccctgagcactgaataaggatcttttgctgagggtcttgtgggtaggaagggctaacaggcagtgagactctgtctgccccacrgaaggacctgggagggaaagctgctgggacagctggtaggcctgtgagcaggggctctgctaggctagagaggacccttctctgagtgcccatcacagtccaggctcactggaactagaggacacccctactgagccctccatgagagcacccagtgcagtcctcggtgaccctgacatcctcagtccatcttctgtgttctcagggggtctaagacttcctgtcatctgactggtcactgtcattcaacaaacagtaattgaaaaacctgaatggccagtgatgtgatcagctccaaagtactttatattaatatattctacatgtttatggacaacacactatcaaaccacgaaaagacatggaagaaacttaaatgcttattagtaagtaaaaggagctgacctgcaaatgacatgatacgtgattccaagtatattacagtccaaaaagggggaaataatttcaagtgtattacagtcaaacaaaggaaaaaagtagaaaagtcatcgacttccaaaggttaggggagagagagagatgaatcagtaaagccagaagatttgtagggaagggaaatacactgcatgatactgtaatggtggatatatgtcattatatatttgcgcaaacccatagccataggatgtgcatcagcgagaaaaattccttaaggaaaatactgacttgtagtgataatgacctgtcaatgtggttcatcaattacaggacatgtacatttctgatgggacccgttgataagggggaaggctggacatgtgtggagccagggaggatagggaatatctttctaccttcttctgtattttgctatgaacttaaaactgcactaaattagtggccaacaaaactgtggagaaatgctcatcatcactaatcatcaagatatgcaaatcaaaaccacaatgagacgccatgtcacaccagtcagaatggctataattagagtaaaaaaacaacagctgatggtgaggctgtagagtaaagaaaacatgtatacaccgtatttcaggcattgtggaaagcagtttgaagacttctcaaagaacttaaaacagagctaccatttgacccagcaatcccattacagggtatctatccaaagacaaatagatcattatacccaaaggccacatgcacttgtatattcaccaccacactattcacaataccaaagacatgggatcaacctaggtgcccgtcagtggtgggttggataaagaaaatatagtttatataccccatggaatactatgcatccataaaaaggaataaaataatgtcctttgaagcaacatggatgcagcagggggacataatcctaggcaactaacacagggacagaaagccaaataccacgtgttctcatttttaagtgggagataaacattgagcacgcatggcataaacatgagaacaatagacactgggcactgctaggagggggagggagaggagggaatggtgtaaaaaactacctgttgggtacaatgctcacaacccgggtgcaatacacccatgtaacaaacctgcgcgtgtacctgctatatttaaaataaaagttgaaatttaaattaaaaatatgtattaagagcaatttaaaaagataaaattgtgtacttcaacatcacacaatatacccttgtaacaaacctgcacatgtaccacctgaatttaaaataaaagttaaaattttaaaaataaaaaataaaataaacatattaatgcaaaattttaaaataaaatgttaactcattctgggaggctgaggcaggaggatcgcttgtgcccaggagttcgagaccagactgggcaatatgttgagacaaataaaatttgtttttaattagccaggcatggtgacacccacttggaatcccggctactcaaggagctgaggtgggaggatcacttgaaccaggaaatttgaggaacgaactgatttcaacaccagatttacacatttatacaccattgtcaagtgggatttatacttaaaataatggttgggttcaacattaataaaagttttggtataataccatattattacatcacaaccaaagatcatattgtatcaatagatttttaatgtgtttggcaaattttaatatctatccctaataaaaatcacgtaagaatacagaaacagataaatttgtttatgatatggtaacacacatgcgtgtgcacgtgtgcacrygcacgcgcgygcrcgcsacacacacacacacacacacacacctgtcttggtccggagtcatcatcttactgcatggaggacattttccctgagatcaaaaaaatgcaaaggtaccccttacct

SEQ ID NO: 94587 - DNA, 41796 bp, Homo sapiens
agaagggacacttctgagttcccatagcaaagtagagtggtcagaggaacctggctgggaggcttggtgggagcattcagggaaatgatccatggaaaatcttcgggagagtggtggtcatgtgggtctttttcaataagtccttccccatcttggtggtgagtggacagtcatctccaggggatccctaggaagaagcagtaggtgcacgatgcaccagcaagccccacgcaggcctcagtcaagagaggaaatgcaggaaagaggagagggagagtggaaaaagaagggagggagggagaaagccaaacatttcagtaggattagaggaaaagaatgggttgcctgctgttgccctgtagaagcaggactgtggtgggtagggatctctgggccagggccagatcaactgctttcccagatattccctgcttccaaagcatcctcctgcctcggcctgcaccacacccacttccacacacaaaggcagcatgtgccagctccccagaaacaaccgaggaagcaggtggcgcctgcacccccagaaaccactcacgccatcactacagagacactgtgcaccctgcagcattaggggtgttgcttgtactatttggcaaagtcagcttggagcacagagaaagttatctgagtaatggatacgtgtttgggtctttcagttaacccctgactcttggtcactgcaaacatgaaaccaacatgattatcaaagtagtggtggccagcccttgactgttgactgtcatacactgtgctgtgtgtttgatatacattttctgagataattatcacagatcactagaaagtaaggcccaagagagcagactttttttccgtttcattcaccatcgtatccacaatgcctggaaattagtaggtacccaaaaaatactggatgagtgtgagaataaaggaagatatgagtggacagatgttttccaacatggctattgcggcgagctctcagagatgttccttctctcatttccatctatctcatgggcctgtcttgggctcctgtggctttgtactagctggtaacatttttatctccccattctctcctcatcctccttgactttttttttaaggcaaggtctcactctgtcatccaggctggagtgcagtggtgcaatcatagctcactgtagcctcaacctcctgggaacaggccaccctctcgcttcagcctcctgagtagcatatgccaccatgcccagctaatcttttttttttttttttttttttagacagggtctcactatgttaggctggtctcaaactcctgacctcaagtgatcccctcaccttggcctctgaaagtgctgggattccaggcatgagccattatgcctggcccaatattcttgtttgtttattcttccacatgaaaggcacattcatttagtcatatcccaaaattaccactacaagaatttcttcttaaaataagaaaatattataaagaattgaaatcaacacaattcatcattccaacagtaatctgacttgccttttatgtcactgggcaaaataaaatttattatggatatcggcttcatgtttgtcactatgatatcctttgacattttaggcgaggcagggaggtagcttctcctgtgtaaagagttcacttttgccaccatttatttacgtgggttttttgctggtgttcacagaatatgctggcaccttctggttgttcttcagttgtttcttttgtgaagaaaggagtataaagatatggtgatgtctggcatggtggctcacgcctgtaatcccagcactttgggaagccaaggtgggcggatcacgaggtcaggagtttaagaccaacctggccaacatggtgaaaccccatgtctactaaaaatttaaaaaattaactgggcgtggtggcgcacacctgtagtcccagctactcaggaggctgaggtaggagaattgcttgaacccgggaggggaggttgcagtgagccgaggtcgcgccattgcattccagcctgggtgacagagcgagactccgtctcaaagaaaaaaaaaagacatgttgagttcaggtcataggacaggctgccaagagctgtttctccatgtaccctgcaaatgacttgggcttctgtgacgttttaagctccacccacttctggggacagcagagtgacagaagtccccctcccagacaggggagaaggatggcctcagcacacagccagtcaatttcctgttcttcagcgcaggtttcattgcccttttattcaaacttcaaaaagtaatcttggccaggcgcggtggctcacgcctgtaatcccagcactttgggaggccaaggcaggtggatcacaaggtcaagaaatcaagaccatcctggccaacatggtgaaacccatctctactaaaaataaaaaaatatttaaaaatttaaaaaattagctgggcttggtggtgtgtgcctgtagtcccagctactcgggaggctgaggcaggaggatcgcttgaacccagggggtggaggttgcagtgagccaagatcgtgtcactgcactccagcctggcgacagagcaagactcctctcaaaaaaaaaaaagtaatctttaaggctgtgcacggtagctcatgcccataaatcccagaactttgggcaacagagtgagaccccgtcaaaaaaaaaaaaagtggcttctggaactaggttgctctgccacttccatcattgtgtcctgctggttcttttttttttttttttttttttttgagatggagttttgcttttgttgcccaggctggaatgcaatggcatgatcttggctcactgcaacctccgcctcctgggttcaagcgattctcctgcctcagcctcccgagtagctggaactacagatgtgcgccaccatgcccacctaattttttgtagttttagtagagacggggtttctccatgttggtcaggctggtctctaactcccgacctcaggtgatccgcccgcctcagcctcccaaagtgctgggatcacaggcgtgagccaccgcgcctggcctatgtgtcctgcttctttatgtgtaaaataaggataataataatatctaattcctagtgttgtaatgaggattgtgtcagtaacagaacagtgcctagaacagagtaagtaagcactgcatgatgttaactattaatagtattatcaaaatcatggaccagcctatgccgaaccagagagaagagaggtccaggagccctcagttatcccatccaccataaccaggcacctgcccagtaagtgaggagggtaaggaagaggagaaaagtcaagaccatggtggaaacaccccagggctctgcttcctgaagtcccatggcggtgtctgggcacctgagtttctctcatggcctctgcacactccttagaggaggcctctgcaggcaagtctgctgctactctttaggggagtcagtttctccccagccatggggaaagaagaacggcccctctcgctgagtcgatcctaggccaccatctccctggtcagagtggagctggggttggggggagtcccaatagggagacacctccaagttgaagggttcctctgaatctgggtcatttgtcaacctaagggtcagtcagaaagcctgacccaaagctctggcagagggtcagctgcagggctctccgggaagaaagcacaaggcaactgcagtttctctgctctgaccaagaacacttcccgacgccctggccttcagagctgaccactcagcgcctcctgctggcccaggcctcaggtccttcctagggctccatacaatgaactctggaactggattgatggaatgagctgagggcctctgggtttctctttcagccaactggtagcacccaacagagccaatcttagccctggctggtatgtggagaacacactgcagggcggcaaggtggagacctggagggagaggaggagctcggatcagggtggtggcagggaggcagggagacttgaggggatctccgatatacagtcttcgatttaggacaatttccacctacaggatttttcaactacaaaaccagtatgcattctgcacgcttcttgactcatgatggggctacatctgggtaagcccatagtaagttgaaaataccataagtcaaaaacgtactttcgagtcacaatattttcaacttaagatgggtttatgtggatgtagttccatctgaagttgaggagcatctgtattgtaaagacagtaatggcaggatttgtgggtggtccaggatgctcccaggctctgtccctgagcaaccaggaagatggagttgccattttggagacgaagaacctaccaaggtgtgggtttggaatcaggagttctgctttgaaagtgaagtctcaccgtgactcataatttgtgacatttccaaaccttaatttgcctatagaacttttctttttccagagcctctatccagactacttattatttatcaaaataaattagataaataaataacttaattttagaattcatcttccagatatactttacacagatcattccaataaaggcaggttggggcccgggacagtggctcacccctgtaatcccagcactttgggaggccgaggcaggaggatcacttgaggccaggagtttgagaccaatctgggcaacatagtgagaccctccccctagaccccatctctaccaaaaaaaaaaaaattaattggctgggcttggtggctggcacctgtggtcccagctactggggaggctgaggtgagagcatcgcctgacgccaggagatcgaggctgcagtgagctgtgatctcgctactgcgctccagcctgggtgacagagtgaaaccctgtctttaaaaaaaaaaaaaaaaaacagcaggttgggaaaatctacaaggaacaagggcaatgtgtgtatgttatttaaaataagatcataaaacgtattttaaaccttccataatcctaatgctctaacaaataaattagttggccgagcgtgaagagtcacacctgtaatcccagcattttgggaggccgagggaggcggaccacctaaggtcaggagttcaagactagcctggttaacacggtgaaacccccgtctctactaaaaatatagaaatctttgggaggccaaggcgggcggatcacgaggtcaggagatcgagaccatcctggctaacacggtgaagccccgtctctactaaaaaaatacaaaaaattagcccgcgtggtggcaagcgcctatagtcccagctacttgggaggctgaggcgagatcatcgcttgaacccgggaggcggaggttgcagtgagccgagattgcgccactgcacttcagcctgggcaacagagtgagactccgcctcaaaaaaaaaaaaaaaaaaaatatatatatatgtatacacacacatatatatacatacacatataaattagctgggcgtggtggcgcacgcctgtaatcccagctatttaggaggctgaggcaggcgaattgcttgaacctgggaggcggaggtttcagtgagccgagatcacaccactgcactccagcctgggcgacaagagtaaaactctgtctcaaaataaataaataaataaataaataaataacttaattttagaattcatcttccaaatatattttacacagatcattcattcattccacagatttttttacagcatcgaaaagaagcctgctatacacacatcggtacatttttattattttaattattaacagcataaatgttttcatgccagttttcataatcattgtaatgataattgtcatgattgtctctccgtggcggggaagaatctgggtgcagggcttggggatccctgcggtccgcggcgtgcaagtgccactccctggggtgctcccggaatccgcgagccacggaacctaagaacgccgacccgccggagccggagggcagacgctggcacaccggacgcggggacgccagaagcggctggacccggaaataggggttgtcggtagccgccccgggaacaaggaccggagctggatccgcggtgcggctgtgggtgagcggcgggctgcgggaccctcgcccggcggctcagaaaggcgggaagcgcacgcatttttctggcttgtttcctgaacgttggccggcggaggacccgcgagctcgggagagcgcccgggccgggctctgcattcttgttgcctcttccctggcgggggtgatactctcccgcggggcttgctgtgggggttcagggaggtggagatgggcccgccatgtgcctgcagggagcaggcgctgtggttaatacttttcttcttcgaaccctcccacagctctttagggtgagatctgctgtaccagtctcacaggtagggaaactgaggctcagrgaagctgtgcagccaccggggcccagatcggtgcggtacacacccaggcagcttccactcgccgccccctaggccctggctgggttttgagggcacccaggttctctgacctgttatctgtaaatgaagtagggtacttttgtgaacaaattagctggaatccaggggcaataatttctcgcagaagtgaaaggtaagatgttcctagtcttgcctttttatcttctcaccttttgaaacaggacctgagaggccagcctaacttgggcttgatggccagccagtcctgggattcttttgccaaggtcacctgacactagtgtgacttgttctgaacctccatttactcacagttttaaaaaattacaacacctgccttatggggttgctggcgagattgaatagtgttgatagctatggtgtgcctactacaaaggaggagcttaagaaatggttgtttccctcttttcctgattctagaagcatttggtaaagttactgaggtggtaaatcctaggaattttaatgctattcagaccactgctaggcctactcccaggccacatctgcttgtttctttttttgtttgttttgttgcaggcagagtctcactctgtcacccaggctggagtgcagtggcgcgatctcagctcactgcaacctccgcccccgggttcaagtgattctcctgcctcagcctcctgagtagctgggattacaggcatgcgccaccacgcccagctaatttttgtatttttagtagagaccaggcttcaccatgttggccaggctggtcttgaactgctgacctcgggtgatccacctgcctcagcctcgcaaagtatttgctcactgtctatttaccgtgagaatgcacaaagcaaaacccgtgttctcctgctgcttacttactttctaggagctgtaagacaagagctgaataagtagatggaagctgtaccaagtgtagtgatgagtgctacaaggaagcaaagctgggctgctgttccatcagagtgctcacagaggcaggacaggatcaggcttggggcacgggttctagaacaaccaagtccagccactggagctctggtctctctgaccccacagtcccagtctaggccaataaaatggcagcacctattagcatycctgcctaggatgctggcaggactgcctggtccctggtgtgtcctcattatgtcatacataattgctgactactctgtggcatagacatgagaaaatctgaggaaacattttaggacaaaatttcctactttggaagagatgggaaactcagaccctcacagaacaatgcccctctgctgcgagttttcccttttggcctctggcttcccagggtgagagaaggggagtccctaaatctcttttaaacctcacttctgggcctctgattttggtagaatcaaaacttccccagaacggagagcagaggccagtcataatcaccttggttgttcattcattccctcagcaggcatttagtgcatgctgggtgccagaaatatggcaatgaacctgacaattgtgggagagacagactgctgacgccagatgcagtcttcaggaggggaggggcaggggtcagagcaagtagactaagggggaaaagtggcctaggccgaagcctgctggcgcacrgggaggaaaggtgggtgcgcagcagagccttgggagatgcagctggagctgtcatgggccagagagctcatctgcagacagtgtcgtcattccacaaggcctcggctctttcactgtgggatggttgtacatttaaggggaacatccacttacttattttgaggaaaaaagcaaattgtcattttatttgggacagctttctggtcaagattactgatttcactgtagtcctgtgatctcttaagtggggaacaaggttgacagcccaaggccgaccttggacctcttcccctgcacagcatgatgagcagcagaagcccctttagtgarggagttcctttggcatcctttctgaacaatgccctttacaaccctcctttatttttctggttttattgtaaagtcccttgtcttagttcttgtccctcagtcacctgtgtccaggcgctaaatgtaaaaggtgcaaaagggaatgtggtgaggaggcacccccagccctgacctccaggccctaacacccactccaggtgattgcttggactgtttgttttgcgttccatccagacatatcgcctcttcataatcaagtgcacacgtgtgcacacatatgtgtsatcacagatggcagtgctctctacacaccgttacatgcccagctttcttagcatgatttatttcagtgatctgatccacgttagtatgtaccaagcagatgctttcctttgtaatgctgccaggtgctctactgtagagaatgccatgctttttttttttttttttttttttggagatggagtctcactctgtcgcccaggctggagtgcagtggcgcaatctcggctcactgcaagctccgcttcccgggttcacaccattctcctgcctcagcctcccgagtagctgggactacaggcgcctgccaccatgcccagctaatttttagtatttttagtagagacggggtttcaccacgttagtcaggatggtcttgatctcctgacctcgtgatctgcccaccttggcctcccaaagtgctgggattacaggcgtgagccaccgcgcccggccagagaatgccatgcttttatttaaccacctccctgttgacagacaccagcttgtttctaaccttttatcatgattgataatgctgcagagaactccccagtgatgtggttcatcacaggcaccaccgtgcccagcctgaggccactccagcgctgccctgtcctacctcctggggactcagagtccacatggacagtcttgtcagggcccaccactgactcctgtgagtctccccaggtgacttcactctctacctgtctcacagcccttgccctccctgggtcagcatgccaccacccaggcccctctgtaattcctgtttgagcctcccaccctctgggagttgcttctttgactcccacttcctgctcttgtgcctcacttcctggaccccrcagagcacaccctctgtggaccctccccaaccctcacctccctcttcacccaactcagagtcaggttctgtccttgtaatctctcccctcgaaccctgacccactccctctccctcctactcacctggactctcccatctaactaaatccagtgcttcctctgctgtgggcctgcccgcagcatcaccacctgtcctccctcagtggacagccgtaccatgcctcctcctccaccaagagaagtgcagccttgtggcagctctgcatcgcctggatgctgaccggctgcctctcttgcccctcaccctcccaaggccatcactgcagcagttccttcccctccggcacgcagcttctcttttccttctygccagagcagtcccatcagcggagaacatgctggcacagccaccatcctraaacaagaggggacagtgcaccagccttctcccatctcccaggttttgttgagctcaccccatgcagctttcatctgtcactcaccacatggccccatcaggattacccagggctctgtttgccagaccctacagtcaggtctcagctgccatctcgcctggcctgtcagtgtcccccacatggtgataactrccctgaagtgctctttcctgtggctttcaggaccttacccctcctgactcaccctgctagctcctcatctcccgacccccagcctgggctccttccacattgctgccacctcctccaggccacccaggctgtccaatgggcaggtcccrtttaacacacctgaagtcccacatcagactgccagtcccttcctgtcatgcctaagccaaagccatgggttgttccttttgcttttttgtaaagatgaggtctcattgtgttaatcaggctcttctcaaactcctggcctcaagtggtcctcttgccttcgcctcccaaagcactaggattataggtgtgagcccatggcaggtgtgagcccatgcccagctctgcctcaggtcattcttgactcaccttcccctccccctcccatgtcccgccatcccaggtctgcctggattctgacttccctcgcatcctccaccactgctacccagggcccattcatcctcttctatgtggcagccagagaggtccctttaacacttgaagtcagattatcccacacctatgcaaaccctctgctgcctcccagcacccctagagcagacccacattctacacccctgctccctccctcagccccatgagcccccctgcccagccatatcctccccaaggacctcaccttccctgctccttctgcctggactcttctcccaggtgtcacccagccctgccctgtccctcccctgctcccatactacagcatgagttctgggagggcaggacctggtgttgctttgtgctgtattccctgcatcctggactaggccaagcatgcagtaggtactcaataaataactggactattaagttcattccaaggagtggaattgctgggatgtgcactcggactttgagagggatccctgaattgctgcacatagaggttgttcccatttaacttccccatgccctcatctgctgtgtgtgcaacgrctttgagtctctccctatgtgataagcacaagctcattgtagttctgagtttcttctgcgagtgttgktggacatgatgtgataccacaaaggtacttacgtggtggttttcccttttttttttttttttttttttgtttgagatggagtctcrctctgttgtacaagctggagtgcaatagcatgatctcggctcactgcaacctccacttcctgagttcragcgattctcatgcctcagcctcccaagcagctgggattataggcacccaccaccacacccagctaatttttgtatttttattagagatggggttttgccatgttggccaggctggtcttgaactcctgacctcaagtggtccacccacctcagcctcccaaagtgctgggatacaggcgtgagccactgtgcccatctaggtggtagtttttctttatgctgagattattttattttgcttttactttttttgagacagggtcttgctgtcacctaggctggagtgaagtggctgttctatccacaggtgcagtcatggcacacaacagccttgaattcctggcctcaagcaagcgatcctcttgcctcagcctcctgagtggctgacactataggcatgtgctaccacacctggcttgtgagatttattttaaaagcacatgtttttcctaatattttctggtttcattgtttctactcaaacctttgctagatctggaatcggttttagtgggatttaggaagcaggagtctaactttattttttttcacagcagatttcccagttgtctcaatacgagtcttttttttcttttttaatacggtgctatgtttataaacatcagtgctacatttataatgactgaaaaaacaaaaagggttcatgtggttttcttttacttggctagcaggtattgaatgtcatgtgtcaggcacagaaagctgttgcaaagaccaacagtgattcagacacaaagcccatcgtgtcctattttgggggtgaagtagtcgctgatgatggcatgatgtgagtgggttggaatggagacctagcccaagagctgtgggcacaggagggctgacttaccctgccagtggtgttgggagacttgagctgggcctgtgggccatccagctgcatcctccaggcctggcggagctttctctcaggcagggaagcgcaggcacagaggcttcaagtgcgtgtttgcttcgatgatgatatttgatttaatttggccagagcatgacctgcaaagcaaaaggtggagtggaataggtgggagatagatgtgacagagtcctgatgtctgcttggggctggaccgactagccagagggtctcaggcccatcatggatcagaaggacctggggggcccagcctgggcatctgcattttgtaaagtgtcctggggcgtccaagtgctttgctgagcgggaggtgctgctctcggccacgatagttcctctttccaggtgagtccacctgtaggtggaagagccagtccagagaggagggccaggcatccacctggcctgacccatcactccagatccccaggccccagcatcttcctagcatggatttaggaataaaattgacctgagatcactggggccacttcaccttcccccaaatggagccacattcccaggatcatctcagccacttcagctgacctggtagttttttcttgtttttaatctcagatgtcttcaagtttccctaattccctaatttttcttcttcttgcctcaggttggtcttgttttttctttgttaaagtgattttccttgtagtggtgtaggttctattgacagcattgctatcctgagtgtcttttcttctctttaggagtcagcattggtaatagtgctgtgctgcggaagagtggagtctaaactttttcattgccagtgccccgaamctggagtgtgaaggaccgagacaaratgaagactgtgctcatggttgctgaaaagccgtccttggcacagtcaattgccaaaatcctctctagaggtaggagagaccagccctgctttggtctgtaagcacggtcgtttatgtgttacaggacattttttcctaatgtgattccaccctggctggggtagatttggttcgggtcggcaggtggtaatgaagcatctcagtatgtcacagtggggtgcatttgcttscactcctggcaatgtgccaaagctggggttcccataaggcacaaggcacaatttacaatgaaattgaaggacagtcattatccatatgctgggcctggtgggkmtattaggtacaggtagtagaaaccagccctggaaggaaggagacgcagccaggactacaccccagtcaaggtctgatgaggctatgccccaggcattgtcacccctggatactcccactgtcctgtggacctcacgtcactccagagtagccaatggactgagctatggccacaggcactactgagacaccagggagctcgagagggaatgtctgccactcacccccaactctggccactggggtggttggtagggtgctgtttccccctatctttgaattccctccaaataggaagagttttagatgctgggtacccagaaatgacaggcacctacctggcctccccttggtccagcagttgagaggggaagagaccctcgttcagctgagaaggcatggtccgcaggggacggtgccccaaaagtggtgcccggtgcccagaagctgagaaagtacagctgagtatggtcagtggagagggtgagaattcgataattagaaggtccctggtaaccgagagtagatctggagtctgttttagtaaacratgaataacgtttcaatgaagtgaggcaaaaatggaattgaagagtgaaaacataaatacagagaaagagcccacccctgcctgctcctggctcccggcagcctggggctctgcatcgagagtgctctgtgctaggttgttggcagatgctgttttccctgagcgccgtcccacctctcagtgcccaactacccgcaccagtctgcggaatgtcgtcactcaccactctggggaaggaggactctggccctctgggaggtggcatccgggctggggtctccacagggtcttcagctcagctgaagcagccagtcactttgtgcttcctcatccccagggagcctgtcctcacacaaagggctgaacggggcctgctcagtccacgagtacactgggacctttgctggccagccagtgcgcttcaagatgacgtctgtctgtggtcacgtgatgaccctggatttcctgggtaagcccctctaccctccatcctactgaagggagttctgcatggcactggccagggtccagttgaagccaggagatgcctctaggcagggaagtttgtcccaactccatgagtcataaggccagcagatcatgaagtagcaatgagagggtccctggtgcggtgcccagaacccaggctctggaactcagccctgggtccccatcatagcggcaccccttagtcgctgcattccctgtgtgccttcctatgtagacaaagtggcagcacctatcttaggaagggcttgacctgtgcaggcatttaagagaaggctgctgctgttgccaagttgaccgtcatctgtcggtcatttggtggctgtcgttgtcattcctatrttgttactgttatcaattaccttggaagcgccrgtattagtgacctgctgggtgtaggtttggggccatgtggttggcaagagtctgatccaggcttttccccctgctctgccggctcactggctggggatgtgggcaatgacggcctctgagtttacacttctcatagtgaaatgggtctcacagcaatgccatctgcttcccaaggctaaggattcagtgtgacagtgagggcaaagcactcagcacagggcccgacacacagcaaagcctcagcccttgttcttgctgctcattgatgacagtgatgacaatgatggtgactgagttgtgtggctgagcatttggaccccaagttttatctccaactggcaggtggggagccgggatttgaatttggctctgtctgaccccattctcccaggatgcaagaaatggggcctggggaggatcgcttgagcccaggagttcaagactagtctggacaacatagtgagacccctgtctctacaaaaaaaaaaaaaacaaaattctttttaaatcagctggcatggtggtgcrcacctgtagtcttgggaggctgaggtgggaagatggactgaggctgggaggtcgagactgcagttagccgtgatcgtatcactgtacttcatcctgggtgatagagcgagacccctgtctcagaaaaaaaaagaaatggggcctaaaagaaagccagacagctgagcatgcaagaaccgggtctctgtagatgagtaggtgaatgtgctgggcatgaggctcaaaaagatggtcctttaacaggaacgactgcacacatgtgtgcccccacagagtgctgggtggaaggacaaagttccagaaactcaggttggaagtgtcaatgaaggcaccattgtggggtccagtgctcaggcaaagagacccagcccaggaatggtgctcccagccacagggaaagtcccggaagtgaggccagagtggcagccccccgagagcttgcttggctcctgtggttggccggggtgtggtgggtccgctcagcagccgagcagaaaggaggctggatgggagggggttaccaaaggcctgaacccacwtcctggctctgcctctgatcatcaggatgaccctgggcaaattgttctccaagctttcccctcctcatttgtgggatgaggccaacatcctcctggggttatgatggtctcggaggctgagctcctgtgactcaatgtcactgtgactggtttgtaggaaaatacaacaaatgggacaaagtggaccccgcagaactgttcagccaagctcccacggagaagaaagaagctaaccccaagctgaacatggtgaagttcctgcaggtgcgtggggctggcctgggcatgagcacaccggggctccccaccctccacagctgccatgtctttgcccacccttgcttgagtcctaatcccccttggacaggggggcctttgctagctttttctgtgagtgccccctgctggcccacgaggcacctgcaggcacccccaacacacaaggcagttgccattgccaaccctcagtcctggagagcaggccttctgcttttaaaatagcttgtttggtcggggggtttttctccttaattttaaaacaaatgcatacagattatggaaaattagaaagtgcagatargtagaaagacagaaaaattatgcataatcatattacccaagacgactgctgttatcmtttagggttatttcattttaacccttcttctgggcagttttggggtataagatcatgttgcatttatacttttttttttggtccaaaaaacatcaattataaactcaattcttttctgttggctgagccagcctcaacacagccagctccttacccagcccaggtaccagtcctcctaactgaggttcagggcctgggaccaagccctgtcctggatgggagcactgggggcgggtggcacagaccgggtctgcagcaggtacgtgtgaacctgtgctgtgtggcaggtggagggcagaggctgcgactayatcgtgctgtggctggactgcgacaaggagggggagaacatctgctttgaggtgagtgtgaggctcactttgttcctcacttttggcctttctgayaccagccccaaactgacaccagcagtcagtcacatcactcctggggccaaaggagggagtaaactgtaccggtttaaaaacacctctccmctccctttattctgaaactccacagatacttttaactgcataggctctattaaaggtggtcagttgttcctccgcttgctgaggcctcaacggtatgagtgaacataggaggggccaaattgtctgggtggatgcaggtttcagaatgggattgtcttggggcagcttggtgttcagcatcttgtgcccagcgtgacttctcagggaccttgggttgatgctggttgattcccgacctcagcactgagctccttttgcaggcctcgctctgctcatctcctgcctcatccaggatgcctcctgcctccagccaaccctgggagccctgcagagaagcaggtggcagctgctccctgtgcacaccccatgccccatgcttgccccggccatggtgccctcacagtggccatgactgctggtctcacttggtgcccttcagactgttgttccctatgggtcgcccccgtgctcctgtacccccagctctcacccgtggctcaagagctggtcagtgagacagagctgaggcacctggcgttgcagtacagcaccctcagcaaatgcgatcacactctgtctcttcccagataccctctcctcccctgcagggcggctcctccctgggggcctttgcatctgggaatggagaatgggggcagctcatggggctttctcccttcagaaatgaagccacttattcccagtaaggaagctgcgtggccaggctccggcggcgaccctagtcccactgcacggccttcctagtgagtctcggctccaggacccctgctgtgctttagcccgagctgcccccaccacaagctaggaccacccgtggccttcctgctcttgcccatttcctttccccttcattcttttttccttccctgtcttttcttcagcctcttaaaatttccacccacccctccaaaccctccctcctagaaggcagggaatcgtgtcacatgggatgggtttggggactaagaggtccctcatgtacttggcagtagcatttcctgatttggtggggatgaaagcagaggattagaagagagggcgggagtaagaagggagtgttcgagtatgtttctagatgggagtaaaggaagccatgtggtggggtgttgtggagtgctcagggcttctggaaaggcagggggatagaggagggtctggcaggtgcaggaaaggggatagaggagggtctggcaggggcaggagagggagccgagcacacgtgttctttcctggaaggaaccaggcttcacagtgrggtggggagctgtgrcagggatctgggaggtgggtcacagctggccactccccacccccaggttcttgatgctgttctgcccgtcatgaacaaggcccatggtggcgagaagaccgtgttccgggccaggtttagctccatcacggacacagacatctgtaatgccatggcctgcctaggcgagcctgaccacaacgaggcgctctcagtggatgctcgccaggagctggacctgcgaatcggctgtgcattcaccaggtgctggccacacccgcagagtcctgggcacaccctcactctccctcagccagagacctgcctctactggtccccctccggggcccctaggcctcctcgagccaggatgagcaacaggggatttcaccaaccctgaagaaggccaggcacagtggctaacacctgtaatccctgcactttgggagaccaggataggaggattgcttgaggttggcagtttgagaccagcctgggcagcataacaagaccccatctctacaaaaaaaaaaaaaaaaaattatttttttgagacagagtcttgttctgttgcctaggctggaatgcagtggtacaatctcagctcactgcaacctctgcctcccaggctcaagagatcctcctacctgagccttccactacaggtgctacaggtgtgcaccactatgcctggctaatttttatgcattttgtagagacagggttttactgtattgcccaggctggtctcaaactcctgagctcaagcaatctgcccaccttggcttcccaaagtgctgggattacacatgtgagccactgcgcccaggctaaacaaaaatttatttatttttttgtttgtttgttttttgagacagagtcttactctgtcatccaggctggagtgcagtggcacaatctcagctcactgcaacctctgcctcctgggttcaagtgattctcatgcctcagcctcccaactagctgggattacaggctcctgccaccactcccggctaatttttatacttttagtagagacggggtttcaccatgttggccaggctggtctcgaactcctgacctcaggtgatccgcccacctcagcttcccaaaatgctgggattacaggtatgagccactgtgcctgtccaaacattttgttttaattagctgggtgtggtggtgtgagcctgtagtcccagttacttgggaggctgaggtgggaggatcacttgagcccaggagttcaaggctgcaatgatctgtgaatccccattaatgcactcctgctgggcaatacagcaagaccctgtctctacaaaaacaaaagagacctaaagaaaattgtttatttagctgacagagatcacatatgccctgcttgataaagtgtgtttgtctgtgctctgggggtcctgaggagagtgtgcagtagatggaatagaatagaaggctccctggcctgagacagtagaaacctctgtctcctctctcactggctctgtcacccatgtacacacatgaatcctccctaaggctatgcccactctgctcccactggcttctaagtggggacaccacctgatgccacctccttcatgcaccacccctggccttgggctggactcacatgggtggccataatagtgtcttgagtgaatcagtgaccaaaatatctttccactccctccaggtttcagactaaatatttccaggggaaatacggtgatttagacagctctctcatctcctttgggccgtgtcagactccaaccctgggattctgtgtggagagacatgataaaatccagtccttcaaaccagagacctactgggtgctgcaggccaaggttccttgcctttctctattcatgctggggctttctgggtttggggcatggattctgagagtcttccatcatcatcagccggcaggccccgggctgagggcagaagtgtggacggctgtacctggaagtggtctgtggtgcctagggctgagggaccccagccttcatgggggcagtgggaagagactgggcctgtatatgctgaatctggataagtgggaatgagttcagctctggcagtgcagggtgaggtcaccccacaggaatcagtggcttcagtggtcaggtccaagcactggactgagaccattggctttcaaactttttaaaattcctagaaccctttcttcaaataaaagcctccacagaagctcactgtaagacttaatacagctaggcacagtgactgatgtctgtaatcccaacaacctgggaggctgaggcaagaggattgcttgaggccaggagtccaaggctacagtgagctacgatcgtgccactgcactccagcctagcaacacagtgagacactgtcttggagctgctgtggctgacacggggcttgggaccctggcggtggccatacctaccactggccaggcactggggataggcaggggtggtgtgagaagtaggggctcaggtgcttcttagggacacatcagcctcagctttgggccaccttcctgagactggctgcctggttttggggcaagtggtggagagggccagatgtcagcttgcgtatctgcccacctgaacaggtacagctgtgagccattacagccagggctatttggctcccagacaaggwccagcttcatctgtcctggttcttcctggcgttgggctyacctggagactttttcttgtgcgttcaccctttatcctttttcctgcaggttaacactgacaaagacagatctctccttttggactgggaccgagtaagagtgtttgaccgggagatcgcacagatgtttttaaacatgacaaagctggagaaggaagcccaggtgtgcctgctccacccacatctatcacagttgccttgggtgagggtggcccttggatgcctcccgctggaggaacagcctgtgatcctagtccacgtctttctccccctttctgaaacacagacatctttttggaaagctgaatggttactccctcatatactcctaagatatttctgcccagtgcaatagtcacagtgtactgcatgcccgctccataccaggcactgtccacacctgtgaccttgtcggaccccttccactctcccctttccacgtgacccgctaggcattacctccgtgtggcaggactccatttcacacagagattcaaactaacaactgtagagggaccttggtgcacactgatgaacttgcccaaggtcacagctagcaggggaaagtcttgagattccaattgcaatcagcttgcgtgcttttatgggattatgtttcttactcagggcttctatgaattgaaaggacatgctgcttggctgttaggaaaacggtgaggtgacctggctgcatgggttggggacacatctgtggctattgaagtaaacatgctacaggcatgacagctaccagatccgtcgagacacagcctggcctccttagccgccttctccttgtccttctctggccttccttgagtgccctgttgcccgccatgctatcgtctcaggcatctgaaacttctaaagctgctccaggctgtcagcattgatcacattcctgcagagacactgttgccacctccaggcctcacgctggggagcccagcttcacataacaactggcctctgttagcacccacatctgtctgtctggaatgcagaaggcactgccctgaccagcctacgtgggattggcaagggccagggcctggggttgagttgtttggattgtttttgccataggcaaaacaaagagttgtctcttccgacaagtgttcagcagaggtagagagtggcaggaccccaacaaagcacagctcatagatgcactccactaacctgcatggtgtttacacaaattccagaatagttaccagcacttaaaaattaygagatttcatactaaaattctgccttctagcttctcttgaaaaatcagaagaggtagcaatactagcaggtgcaggcagcagccctccccacaacaaggagtggtacttcccctgggacgggccccacttgccatccctgtagcttggctgatgctggcttctgtaggatttccatctgcagcccttctgactcctcctcaatcttccaggttttctctttccctagaaaattctccagaaaagaatattcaatcacttgaggccaggagtttgagaccagcctggacaacacagggagaccctgtctctgaaaaaaataatttaaaaagtagacgggcatggtggcacgtgcctgtaatcctagcactttgagaagctgaggcgagaggattacttgaggccaggagttcatttaagactagcctgggcaacatagcaagaccctgtctgtacaagaaattgaaaaaaaaaattggtcagacatgatggtgtgtgcctgtggtttcagctacacaggaggctgaggcaggaggatcacttgtcccaggagttcagggctacagtaagctctgatggtgccactgcactccagcctgggcgacagagcaggaccctgtctcttaaaaaaaacaaaatttggttttttgtttgtttgtttgtttgttttgagatggagtcttgctctgtcacccaggctggattacaatggcgtggtctcagctcactgcaaccttcacctcccaggttcaagcaattctgcctcagcgtcacgagtagcttggattacaggcacgttccaccatgcccagctaatgtttgtatttttagtagagacggggtttcaccatcttggtcaagctggtctcgaactcctgacctcaggtgatccacccgcctcagcctcccaaagtactgggattacaggcgtgagccaccacacccagccaaaatttttttttaaaaaagaattttcattctttttcctttcctggtcctgaataaatattcaatcaagtctttagactgttgggaagaatgaattggagaaacagggagaccagatgaatgaaaccagacccttcgtccacacatcttgattccctctatggtggtgtcttcctccttccccaaatcattgactgtcctgtcttccaggtggaggccacaagcaggaaagaaaaggccaagcagaggcccctggccctgaacactgtggagatgctgcgtgtggccagctcttctctgggtatgtagggacatttctctcaagtcaccagaaggcttcctgaggcaggttcagcctggagcagcragtgcccagggttgcaggatggtgcccaaggcttcaaggggatctgagcctcaggaggatttcacttatccttaggttgtaaaggtggtaaagttggtcaccacctgaggggacctcctgatgttagagtccctgagcagctatccctggtgaggggagaggccccagccagatgtcaccttcagggaaccagtgtgaacgtygcccctcagcctcatctcctcagtcttttctccttagtaacgaggagggggttgggctggaaagctggtggtctctggcagctgtcagcccctaggcattggtgccccccacccccgcagggaactatgggcagtgtcctctcagtggacactgagtggtggctccagcgtcctcagagggcagcaatgctgggagtggttgctagctaagcgcctgcctctgctggtcagggagtagcaggacgagcccccctgagtggccccaaagtgctgtgaggacagaaacacccaagggctcaaaatggggctgcgtgctaactctgtcgtcagccaaccccgaggtatggttatggctccatggacaatgcatggggagtggtgctctgaaggccatgtgtcatccccatggccatgagccccatgaggatgcaccgtggggtagagtgagtggcgtttcccatcaggcccatcctgggtgtaggattcagccttacgggtgcgggattcagcctcatacaagactgtgtggcataggtgcccacccggccagcagctttgcactccagctgtgcctgctcagagccaccgtcaccctccaggaggggccggccacaatgggggagcctgagtgcataggccagggcaggcagctggccatccccacgtacctggccctctgagaacctcctgtctctcgcaggcatggggccgcagcaygccatgcagacggctgagcggctctacacgcaaggctacatcagctacccacggacagagaccacccactaccctgagaactttgacctgaagggctctctgcggcagcaggccaaccacccctactgggccracacggtgagtggmgccrggccggcctcagcatgtgtgtgtgtcactgaggccttggdaccaggtctggtacgtcagccaaacccaggcaggcagccgagcccagccacagactctgctctgtcttctctccctcaggtgaagcggttgttagcagaaggtatcaaccgcccgcggaaaggccatgacgccggcgaccatccccccatcacccccatgaagtctgccacagaggccgaattaggtaccgctctcatcccatacccggtgtgcttccagggagggaagggcgagctgcgacagtgaaggttgcaggccctgttggcaatgtgggggctccttcagcctctgcctgccctggctgtggggatggggggccacctggaagatgagctccattgctatgggaccaggacaggagtgaagaggtagcagcaggtgctgttgcagggaggcaagggggcagacgccacaggggacatgaatgaaaccagggtagagagtggcrgtgtgggggagggggcagcacacctcctacctcccagctggcctaaggtggtaccagtggtccgagtgccaggagaaggcaaatgaggaagggagagcagtgcaggtagagacaggagccacctgtggacagtctgagtttgaagcaatggtgtcatgtcacgagacaatggaaagacaggccaatgcctgaagagcagtcccgccagaagcagggacaggaggttgtgcaggatggtgggagccgcagccagaaagaaaccactgaggcatggaggcttgtgttcccttcctccgcatttgcttttttttttttctttttttgagacagagtcttgttctgtcacccaggctggagtgcagtggcccgatctcggctcactgcaacctctgcctcccaggttcaagcagttcaccctgcctcagccccccgagtagctgggattacaggctcccaccaccacacccagctaatttctttgtatttttagtagagacggggtttcaccatgttggccaggctggtctcaaactcctgacctcaagtgatccatccaccttagcctcccagagtgctaggattacaggcatgagccaccacgcccggccttcctgcacattttctttcctccttccccaggatttgcagtgtgtcctgcacagcggctctgtaagcaggagcttgctgctcgagcragagtactgggggctcctcacggccagagcccccagctggctcccaactgactagccctggcctgttgcagggggtgacgcgtggcggctctatgagtacatcaccagacacttcatcgccacggtcagccatgactgcaagtacctkcagagcaccatctccttcagaattgggcccgagctcttcacctgctccgggaagaccgtcctctcaccaggtcacaccacgggcccagccttcctcctctgtgccttcatgggcagacaaacattctacatcgtgtctggggatgggaggcccagggtctgaggccccggccacccaggctggggaccctgagtggcggcgcatatctctccaggcttcacggaggtcatgccctggcagagcgtgcccctggaggagagcctgcccacttgccagcggggtgatgccttccctgtgggcgaggtgaagatgctggagaagcagacgaacccacccgactacctgacggaggccgagctcatcacgctcatggagaagcatggcatcggtgggtgcgcctgcccaggccccagagccggctccrtctccagtactcaggcttcgagtctactcacaaagctgcccygccagccctgtgtgcccagcccagcacccctccatgggctggtatctggaaactggtgacccagtgtgtggccagccaggcaggtccacagygggcatcccctcctgaggcctccattcaggacctggccttccctgtgaaggcccagatgtgccctcgtgcactgtggggtgtgcacacaccgactaacgcccacaaggctgaagattggcccagatgccaggtgactcatagaaatcatattggcagtcccctgagtccacacagccagcctgggctgtcctgaaatcaggtgacagggaaatgagatctcacaggagctgcttccctgggagagaacagaaatgcctgtcccaggcacagggctccccaaagggtgaccaggaagtttccacgcaaaaatgggcagcccagggagtttatcaaagcaaaagtgtagtcaccagtgcayactcctcacaggagtggtggcctcacaagtccccaggcctggagctgtgagatgtctcacatgttgggggccagcctcactgccggagccttctccccaggtggcactcgcgccrctgggcactgcctgttccctggggcactacccctggctgacaggctctggagacctgtgggatgtcacagccactgtgtccaggctctgctccagcagtggtcatataggtggactctcagggagtgtctcttcccaggctggggtcctggtgaccatggcgatcttggcaggagagcagagctctgggcttgctcctctcaggggtccagggcacctgccagggtcctgaaatagccctcagcccactgtggagtgtgggctctgctcccccgtgtcctctgccctctcgcattgatgggacactggctcctggcagccctatgctagccagtgagccagacccaatcaccaatacaagtttgtgacagtgaagagggctctggtgttaccttctgaacaggagagtggtcagggtggccctgtgactgagcccccaggagtgtgtcaaaagggcctgaccagagccgccacagaggagcccacaccacgcgtcatggcgcccggcagactcggggtggtagtggcacacgccacccacagcctgccacaccgggtgcagagctggcctcgtgccaagagccatgggccctcggcaggctccttagcccccagaggccagtttcttcccatgtgagattctctccgagctactttgggaaggtgtgtgtcacctgtccatgctggtgagcatgcagggagccccagcctcctttctgcccctctgactggcacccgccatagtcaaaacgcctcagcctccgctgcgcccctctgccaggaaacttcctctgggtgggagagtggaatcctggggactgggagcctcccctggggatcgtgacrggccttgcagagagggaggaggtgggagacaggaagtggacagaattgtccaggtttaggggagggcagctctgcagtgagcttgtaagcacctccgtgttctggtggagtggggctctggctccgggagcaggtgggtgccacaggacccaggcaggagaagccatagaagtcacattttccaggcgcagaataagcactgtgaccttggagagttccttaacctccgagcctgttgtctctgccataaagcaggagtaggcgccctgtacagggagggctgcccttgtgttctcaaggcagaacatgaaatgcatgcagttggtgcccagcacagtgcagggggagctcagggcacagccctccctcctgtgaccgggagcagtgagagggcctgagcaccaggggccccgtgacaggtgatacagcacatggttcagtggggcatgtccaaggcaggccaggaaccctggggccttgtacattgcaggcacggatgccagcatccctgtgcatatcaacaacatctgccagcgcaactatgtcacggtggagagcgggcgccggctcaagcccaccaacctcggcatcgtcctggtgcacggctactataagattggtgagttcctcagtcctgcccccagggcccaccgaggctccctggcttctccctggatgttggctctgctgcccgctccagacaggcccctgccctacagtgatcccccagccccacacacactccctcaacacccgctgaaggggtgctgccccaggacccccaggacctgcccagagcaggagctcagtgtgtttgaaggctgaacagatgtgtgagggaaccaaaargggaggcgaagttgcctcagccctgttccctggaggttccccaggggccaaggggagagggaggagcacaaaactggcccaagggcggcctggagctcatgtgtgatgtggttctagccacaggacatccctggccactctgcctgacatttccaggtgggaaatcaggaaaggtctggggtcataagagccagcctggtaccatctgaggctgtggactggtgggtagggcagaggccaggaggacgggccagagcgggaggggtgaacagggcagtatccctgcctgggaaggggtggcatggccctgggtgcgagtgctcagggcaatatctgccccctgcccacttgcagatgcagagctggtgctccccaccatccgcagtgcagtggagaagcagctgaacctgatcgcccagggcaaggccgactaccgccaggtcctgggccacaccctggacgtgttcaagaggaagttccactactttgtcgactccattgctggtagagtctgcctctggcctgcccctcaccagaggggtgtctctctgtcagcaaggccagtacctggggacccaggtccccacgtgggaccagctyccagatctgggcttcaggcctccgtaggccaggkcagtgacacctcctggctgggttgaaagagcaggtgcattaacaccacacatggccaggaacacgtgcctctgacgcacagggctgctgccctgccgtgctgccaggacagtagaaaccaccgcctatagggaccctttcacactcagacccttgaccaygtgttgcggagccttttgctggggactgggagggagatgactcctgcactctgcttgcccgcaggcatggatgagttgatggaggtgtctttctcgcccctggcggccacaggcaagcccctctcacgctgtgggaagtgccaccgcttcatgaagtacatccaggtaggtgcagggaacactagctcaggcaagctgcctcacccctgtaggcctcagctttatcgttgatcagcaggaatcatgttctttgtcctggttgtcacaaaagaatgatggaacataaagaggccttgccaaaaaatacccagtgtccccacgtcccctagaatacacagccattaggccacgcaaacacacatggtgcatttttccctaacaccatgccacttgccatcatgggcattaatgtacacacagagattttagaactgccttttctgcacgcgtggagcaagagccagagactcatgctccttgcctggcagtgtgtcacaggttctgcatgacagattacatactttgtattatgagaggagtrggggtgggtgccaagtcggtggccccagtgaccctcacgccacctgcctggcattgccgcaggccaagccaagccgcctgcactgctcccactgcgatgagacctacacgctcccccagaacggcaccatcaagctctacaaggagctccgctgccctctggatgacttcgagctggtcctgtggtcatcaggctctcggggcaagagctacccgctgtgcccctactgctacaaccacccacccttccgagacatgaagaaaggtgagtgcagccactccctcctgtccacaggtagctgcagtctcttttcagtgccaacccctgccttgcaccasgctggactctgaggggacccctcaccctggcctttcctgcactcattggcactgagacgagagaccctggatgtagctggggcactgcttaggcctcagccagtggtgccaccctctctctstgtcagaatcgagcaggcaaccctagtccaccctcaggacctgggcacaggtgtgcagtgctccctctggagctgagtgagcaagaggatgcagcagtcgggggacccacccggtgagcgggcacccccagtcagcgtccaccaccgtcctccatcctcatcctcrtcctcattactggaggagggagcgcatgtccaggcaggcaggacagagcaccgagccagaccaggaatcagcgggagtgaggcatctgcccacattcaccgtgtgctctgcagaaagctccctcaggcctcagtctgcacccaggctgccccgggagtgagaccccatccctgccctcctgctgccgccagagtagctgacagggtggtcccatgtggcccagtgacatgagggtcatgtggcattaccagtaacaagctggcagcaaagcaaaggggggatggagtcagctgaaacccactgggatggtgccagcgaggggccttgaaagttgaggaggtttcaggtaagcagaaaacaggggtaatggcagccaggagccgaaacatgagcaaggctgtccccaagagcaaggccaagaagagttccttctgctgggacgagggatccaggagcttgaggcattgggagcaggcagcagagggcaggtgggcacagtgggcgtgcctttacagggctcccttctcccgccaggcatgggctgcaacgagtgtacgcacccctcctgccagcactcgctgagcatgctgggcatcggccagtgcgtggaatgtgagagcggggtgctggtgctggaccccacctcgggccccaagtggaaggtggcctgcaacaagtgcaacgtggtagcgcactgcttcgagaacgcccaccgcgtgcgggtgtccgccgacacctgcagtgtctgtgaggccgccttgcttgatgtggacttcaacaaggccaagtccccactcccgggcgatgagacgcagcacatgggctgcgtcttttgtgaccccgtcttccaggagctggtggagctgaagcatgcggcctcctgccaccccatgcaccgcggtggaccagggagaaggcagggtcgagggcggggccgggccaggaggccccctgggaagcccaaccccagacggcccaaggacaagatgtcagccctggccgcctactttgtatgatgaccctgtcctccctcacccaggctgcagtgccatgcagacacctcatggcacttcaaactattaaaatgcattttatcttatccagagctggggcccctttgctggtgcagcgatgtcagagcgttaccgtgtccctgggcacctgtggggccctctctccctctccgaaacccaatacgtctcccttcagcctgcatacacgtgcccagagtgctccctgctatccctacaccctggcagtacgggcagggatgccccaaccctgaagccctggggaatagacccagtttgcactcacaccccatctcaatccgtgctgctgatggtagctgtgtgcacaagcagtggccctgatgccttaaggaaggcggccttgacagctgtggctccggcaggagaggagtctagtggagcaggtggggctgggagaccccctccccggatctggcttatgaatccccttggtcttcgctgcagccccctgctcagggccacgctcttgaccccacgcttctccgtcccctgctccctgctcccatctctgagaagccctgtacatggtgcccgtgtgcgtctggcagcttcccaggacctgctgcaattcccattctcacaacaaggccttatggtcttagaggcagctgggtgccccatggaacccattcacatgccaggtttagaaaataccctgtaggccagactgccctgtggtgccaggtgctggtggcagctgccctctgacctcagtgccttcttgtgctcccctccccagccacccgaggagagacacctgtgcgggatccactgtgtgttggaaactccctccacactccgcccgtgcctcattgagtgatgacgggagctcagcaaaacagctttccagactgttcagtgggacctttctttgaggggcaggtcaggaatgtttcggactcagacccgcccccgccccaactcagtagtagattcccaggctgcaccaggacttatatgagagctcctgtaaggaaacccagagcccaccaagcataccccacctggacccccttcctggaggccctcacaggttaacacgggggttccctggaacacagtttggagagctactcgaagctgaatgaaaatacagagacatggggaaccacatagagggtcctgggatgtgtctcagaagcacaggcttcaggaaggagggggtgctctcagagcttctgccccctcccacccactctggtcccattctggggccctagcaaggccacacctgttaggtccccagtgcggggctgtgactctgctcttccacccacagggcccagtggacctggagccttctccgcagaaggtttcaagacctccaggacccttaggttatagggctcattcaggcttggaggagcagagacggttcctaggtcttaaacccagaccacccagtccttccttactatgcttctgcactgcgctttcagccacaggcagggctaatcacaaagtgttcctttattttcctctgcagttgtcccttgtgtgtgaccctccttcaaggcccttggcttccgcagcttgattctgcactccgagtccattcaccttctcccatccaatagcatccaaccccgctgctactgctgccaacctggccttgggagcaatgaggacaaggaagggacaagaccccttttaggccagaactgccttcagatcagccacgctccatgggactgtacctctgccctggaggctggagaggtcagtggctgcagactgtctcaaggagcccctggccctgcccacctagccaggggtgcagccttgccagagaagcagagaagcgtctgtggctgggtgggtgatattgaaagattcctttcaccagggtggaagccaggatctgaggcgtgatggaatgtggacagtgaggcagtgacagcgccacaaggcaggagtcatctccaggcacgtccttggcctggagcccatagggacaagctcctggtggtgcctcactttgccatcctctctaagccgcagaccttgaatggaatcagtgctcaagagtctaattgggcccactctgaggatgcctgcgggaatatcagcttttaccgcaccacactgcactttacagtgtgggagggcctgccccacgcaccacctcacctgtactgcggttctcaaacttcaccctacagccattctgttgtaggtgatctcaggggcagtttgagaaacagtggctcagggtctcacagcagccctctgagataggttggttgctattgtcccgattttttctcatcaagaaactgaggctcaggtgagctaaggaatgtgcccagggccactgtttataagaagtagcctcaagccttgctcatggttactgccctgacagggatctaggaaagagtgagcaggagaatgggatgaggcaggaccctccgccccagccctgctttctctgcccagacacctcctgccttgcagacccaaccccaccccagatggtttcctttccagtcacccagctgctagttctccaggttcctggtctcactccaggttcctcctgttagagaagcatcccagagacattcattcctggcaaggacacaggcctgcggacctgaaggtcaggtgggcagagccacataagatctggtgccccatcctccatttaaaaaattatactttccaacggcattggtataaaggtgaatatattaatatcatatattaaaacattttctttgacataaaggtttctttcttctgcctttaaaataaaatattttggccaggtgtaatggttcacacctataatcccagcacttgggaaggctgaggcaggaggatcacttgagcccaagaattcaagaccagcctgggcaacatagagaccctgtctctacaaattttttttaatcagctgggcgtggtggtgcttgcctgtgttcccagacactaggaaggctgaggcaggaggggagggtcacttgagcccaggagtttgaggctgcagtgagctgtgatcatgccactgcactccagtgtgggcaccagagaaggagcttgtctctaaaaagagagaaaaagaatattttcaagagcctctgtgttggcagaaaaatggcccttcagagatgttcatgtcctatacctgtgcctgtgttagattacatggcagacccggcatagtggctcacgcctgtactgtaatcccagcactttgggaggccgaggcaggcagatcatttgaggtcaggagtttgagaccagcctgaccaacatggtgaaaccccatctctactaaaaatacaaaaaaaattagccgggcatggtggtgcgtgcctgcagtcccagctactcgggaggctgaggcaggaaaatcgcttgaaccagggaggcagaggttgcagtgagtcgaggtcatgccactgcagtacagcctgggtgacagggtgagactccgtgtcaaaaawaaataataataataataaggggcaaaggggaattaaggttgctaatcaactgatttagagagatgatgctggactatctgggtgggcccaatggcatcaggagggtctttagaagtagcagaaggaagcagaggagggaaccagaggtggcagtgtgagaaaggctcaactggccattgctggcttcgaggctgtaggaaggggccacgagccaaggtatgcagggagcccttaggagctggaaaaggcaggggaacagtttctcccctagaatcctcagaaaggaacgcattctggcgatccctggatcttcgcccactgaggctaagtggacttctgacctccagaacggaaagataacaaaagcctcaacgtttgtggaaacaaacaactcataatgagcctgggactgtgcctccttcccggacggatgagcctgcctgggcagtctgggtttgcatccctgctctgtcacttascagctattgacggcagaagttgcttaatttctgggcgctgtgacctagggattgctttccccatccagccgcccacccaaagctgcagaagagaagcaagaggctggtgactggggcggctccggagcccaggtggagccgcagttcgcctaccactaaagggccgcagtcaccgtccacgtagccgccagggggcagcagaggtccggccccgccagcctggaggcccgactgcgcctgcgcggcgcccgcggcgcccgcggcggccagggacgggaagtgggcggggccggccggcagcagcttgcgggacacggagccgcgaggagacagctgaggcccgcggagaccaggggtgaggaggccgggggggacgggattagagggctgacggggctgggacgagggtcaggcgagcgcccaaggcgcacaggggtgaaatgggaccgaggaaccggaggggtggaatcagagggctggggaggcaaggaggccgagacgaggctcacatgggtgcaccgaaagggtgcgggggtgcagtgcggggggccgaggagcaagaggggccgctgcggacatgaggaacccgaggctgggagttggggggctggggagccaagggggcagaactggggggcaggcgggggtgtggccgagccgagggcctggtagggaccgagggctatgaggcagaatcgggtgctgagggggacgcgccccattttccgagatttggcctctccccaccccccaggagcctctgggccggcacgttgccccatatccccccagtccctgcaccttcaggggcccagtctgcctgatggcccccggctccgcggcctcccaagcgtccgtgaagcgagcgtcagctgcacaagtgctcgggctgcagctgcttcagccacaggtctgtgagccagagcctcaggcgcggaggccgggcacattgccgctgggttcggtcaggcaagcccctgaacctgtctgtacaacaggaagaactggctccggctgcagggatttcggcacagcgcttgacacacagtgaggcccactgcatggtggcgggctccttcgaagccttccaccctgcgggacagagtcacacatgtcgtggtggcattccccgggacaagttctctgggcccagctgagctctcaccacgggggatagaaagtggggccggccagcactctgaggccatctccagtctcttctgttgtcaaatttcgctcttttcctcctgcacgcgaggtggaaataccaaaggcattgggcatccagagaccttgattgagttcgctttgccctttcacctgtgtgagaccttaaatgggtgcttgccctcctataacctatttcttcatctgcagtgtagcctgacagtatgtacttctcagcgtagttgtgagaggtaaacaaaacgaatgcatttctgaaagccatgaacctctacacaagttcatttgtggaattcctttaagataccccctgaaggccgggcgcggtggctcatacctgtaatcccagcactttgggaggccgaggcaggcatatcacctgaggtcaagagttccagaccagcatggcaaaatcccatctctactaaaaatacaaaaattagccgcgcgtggtggcaggtgcctgtaatcctagctactcaggaggctgaggcaggagaattgcttgaacctgggaggcgaaggttgcagtgagctgagatcccaccattgcactccagcctgggcaacaagagcgaaactccctctcaaaaaaaaaaaaaaaaaaaaaaaggataccacctgacctgaagccaaccgagtcttttaagacctggcgctgctgcccactgcacccttcagagtggtgtagcttcctcagcccacgccacccgccagtcactcttccctctgccatcacacttaccacctgctgtacacaaagggccatcgtgggctccctgactacagggagcttacagtctatcaagaaagtcaggcctgtagaaagaaatggtcattgcacagcaatgtgactatgcttaatgccatggaactgtacgcttagaaatggttaaaaggatacatagtgtgtatattttacaacaataaaaaaaatttatatatgtagaaaaaaaatctaggatttacatctaactattattagtattagtagttatgaataaagaaataagaatctcttttggtagaaaaaggttggccaggcgtggtgtctcatacctgtaatcacagcactttgggaggctgaggcgggcagatcacctgaggtcaggagttcgagaccagcctggccaacatggtgaaaccccatctctactaaaaatacaaaaaaattagccaggcgtggttgtgggtgcctgtaatcccagctactagggaggcttaggcaggagaatcacttgaacctgagaggcggaggttgccgtgagccaagattgcgccactgcactccggcctgggtgacagagcaagactctgtctcaaaaaaaacaaaaacaaaaaaaaacagttaacatgaatgatgcttttgttacactatagtggtgcagttcccttttctaaggattgctgggtttttttcattaccttggttctgcagttaagcaagactcaacaagtattttttctatgtcccctaaaaaactgcagttgttaaaccctgcattcgttaagcttaggagtcaaaactaatgcactagaggaaaataaatattttaaattaaaaaaaaaaaaactttttacaagtcagatgtgagcaaaagtgccatagagacatgaaagagagcatgctggatccaaagatggggagatttcagcaaagcctcaaaggatctgagagatctcgggaggcaaaatggaaggagggcaccacaaaacaaggaggggaggggctgccctagggtggggggtacacagaaatggaaggaggagccatgagagagccaaagcccagagctggtggccaatgagggacaggtcagggatagaaggagtcagaatgacttcccaggtgtcatcacagttaaggcccaggttccccagcatgaaccccaccctgggactttgggcaagttccttagctcttctgctacagcctgccctgtgaagtggggataaccacaagaggttgttgggaggctaaaagccatcccaggaagagtgctcagagcaggggcggatggcagctggcagcaccgtcagccacacccctgcagctgccccccgatgagtttgctttgccatttctcacctatgtgggaccttaaataggttctaggagggtgagcacccatttggtgtgcagtggggccctgatccaggaggaaccagctgccagtcgcatttggtcagactggtccaggcaggcggtgctgggatgcaggagtccaatgtccctcccatgcccaccccgggctcttggtgatttgcacaggctcatgcacacgtccctcttattcggagtttttcactggtgtgccctgctcaggaaagcccagcaccaggctccgctgcctctggtgctctcccagctctccctactccctgcggcttgccgctggcctccatgccattcctgatgctgtctcttccagttgatccctcaaagaaccacagcactgtcccctgcccctccaggcactcccagggctgcctctggtttcccttggtgaggaatttctccttcctgccgggtgtgccatggtgtacgtcagattcaggagcttattgggaaaaggaaggaaatgattcctgtccctttcgacatctgggctccagggagagaaagctgtgtcctggtttctctcctcaccccttgccttaggttggtgatgcagaaacaagggtgcttggtccccagcaagtaagatggccctgggcaccctgcctttgtaacaagagcaggcagttggcacaggccctgagagtaagccagcctgtcccctctacagatgcagacagagcttcacacacacacatcatcacaccccccagaccttacttagtacacatggcacagacaccattgaggcatgtgcagatagtgggcacaaggcacagagagagcaggcaggtggccacagtgaatcagggtctgtagtgcagacaggaggagccaccctccctgagggaacaggccgattgtggggaggggctcacggcacaggaaagagtaccccaaggtcaggaggcaagaaggaggcacctgcatcccaaaaggtccagcagacgtcaccagcaaatggggtggaagtgaagggtcttgaattctgcccttgacagtggggctttacactgtgggcaggggtttctccaggggggccctctgtgtgctctagcggggagcatgctgtcctctcacttggatcctaatcataaattcacatgagcacattttgtggtgagacagtagagcctccagatcacttggaattgcaagggagtgggaggaggccccaggcactggcagttgctgggggcagctctgcatcgttcacattctcccagaagctccaggggccagggcagtcccaggcagaagaggggcccttggccgcttgcactgcttgagggcagccaagcttgctgggaaattcacgccatcttcgaatgccttacagctctgctggggcatggctggcaggacgtgccgcctcctcattgacctactagggctcccagcctctgctcatttctccagctcacagtcttccctttgtcgtttgaatgtcagtgtccctcctgctctcaaagtgatttttccttttttgctttatgttctttttttttcttttttggtagagatggggggtggggggggggtggcgatctcactgcccaggctggtcttgaactcctggcctcaagcactcctcctgcctcaccctccccaagcgctgagatatagacctgagccacagcgccttgccagttgttttatgttctttatccttttacctgcttgccttctgtaacctgggttgcattaaatttactcctacttgtgagtaaatgtgaaccatagcaataaatttagtctatccccagaaccttcagtagcaagcacccctattcctacgttatttgtatgtgtccactttaaataaattacctttcaattctgcctctaaaagaagagaagggttttgtgttttgttaatttaccacccttcaccccttgcattccaaatccctcactgatcagacatttaacttggtgctgggacctttccctctgcccaccccattctcttttgtgttttttatctttaggcttccagaaggcttgttccaagttagcaattcctgataaggacagccctcttgtgggctgtgagctccctgcatctcttacttcccactctcttcatcctgcacctcaggcccctgccacagccgcccttttagcaaagtttgtaggcagagtctgtggctattctaagactgatgattctagaagattctccttgccttcttcgttcagttttcagaacctggaagtcctcatgaaggtgatgggctgtgaaactgttccccaaattctccaccctagaactcggggtgttcctcagagtctcatgtccgtttgtcaccataaaagaatgcagtttttctccctggcttagtaactgtgtaggatttcttttttatttttttctggatccaatctcatccactactgcgtaggactcgctgaataaagtttcccagcctgagtgttagacaaagcccaaggtggagtccccgctgtggggagggtttggaggggtcaggcacccgagaggaagggggcaggagagagaagggtccatgctgagtgggtgctggcagggaggcccaggtgtggggcctggaggtgaatccccggggcgacgcaaagaacatggaagggggggcgctggagagctgtttgggtataggcaaggcaggcaggctggggaggcgactatggagattcggagttaggagagaagaggagccagagccaccctgggaggaggctgtgaggcaccatgtgcctctttccagtgagagagaagccggtgagggagtgaaggcacaggctttgcgatccctctttggc

SEQ ID NO: 94588 - DNA, 155793 bp, Homo sapiens
  misc_feature (1)...(155793): n = A,T,C or G
ttgtttgccacttttataattatgcatcatttttacaaaacagtaaagctatttttaaaaagctacacccagggagatagtcacacagagagagggcgtgtaaataaggcaccattctattggaggagcaactcagaaagctgcatgataactcagacctaggtgcaaccctcatctggcagtgcccctgtccctgcctgggcgatacatcacagagaccacctctgacagcggagctcagtcagaagcaatgctcactcatctcaggccttcacatgctcagaagccatcgagggacaggtaaagagagtgagaggtgagaaacgggcctttattacccagtgacagatgagtgagggctgtaaaatcggcaggagcaaaagggagggcgggcctgcttctgtggctaatgaataagatgaacaacactgaggattaaaaaccacaatgcccacccctacctcatctcctctatccgcccctcgccactgcaaacagctcaattccccaagctgaatacactctgctccagcctcctctttgggaatcaatgatgctcaactgcatctgaaaaaacaaccacgctagaaaaaacatttacaggccatgctagtcctggtgaccccaaactaactccaaaaacctttgctttttaatattcttaacagagatcccacactgtttactggagattacaaaatatttattaaaattaaattgctatgtacttccaatattccttcaagtcctttggttagctttcttttagaccacatatctgctatgtcttcctgaaaagggaatttaatctcttaccctttttggaagcaattcctcttgggccaaaaatccccgcttgtgaacactggggtcgtagtcaccatactggaaagaagaaagggagagcaggcgattgagattctaaagataactgccatttctgaacagagctggaccaatctcattccctcccagctccagggagcaattcaattccgatgacaagtcaagatttcaaccttgctagtttgttatccttgaatgaaaatacaaagctgattatatctatgaactgagttgcataatcctgtaagagatggatgggtgatgtgctaacaagaatgtgacacttgtatggaaatgtgggcatgttttctaaccctcaaagaaagcagtcacttccaaaacagtagcttttgaattaaaacaccaaatcacaactgtgaaagttgtgattarcaacatatgataagagtcttacctataaattcttataagtgactggtaattggagcccattactagggggatccaggaataatgcaggcagtagttttaatacctttcacccaagtttctgaaaaatactttggaaaaatctgatgtcaacactgccattcctattgtacagacaaagaagtgagtaaaaggttaattgatcttcctaaagctacagagaagtcactaatgcggttggaaataggccctgcattttaatttatccctccggggacaatgacttggaaatttattctctgattaaaaaaaaaaactcctttcctagaaaactcaagtctgataaggaaataatcaaaagttaaagaatgtttaaaaagaaactaactgaaacatacagtagaatataaaatcaaagcctatctcttatcaatcagcgtacagtggctcttcattttaccaaaaacaacaaagctcagtacttcagtataatctataaacatttattcttttagccaccaacagtgaaaaaacaaaggtcaggcacaaggctgctgtttctatataccaccaaatctcattatttcgttatgttctctcattctcaaagagcctcaagttaagacttctggtgtgttctccaaatgaagcggcctaaaactacagacacaggagtgaaagaagatattcatcattaactttaaatcatgcctcattcccatatcaccttaactgtaaaagccccatgaattcatatttcttttgaatctcataattatctttcaaatagcagaattgtattgcattgttttttttgaatcttaagagaattaatttgtcaatttttttttttttttttttgagacagagtctcgctctgtcacccaggctggagtgcaatggcgtgatctcagctcaccgcaacctccacctcccaggttcaagcaattctcctgcctcagtatcctgagcaactgggattacaggtgcacgccaccaccccgggctaatttctgtatttttagtagagacagggtttcaccatgttggccaggctggtctcggacttctgatgttgtgatctgcccgcctcagcctcccaaagtgctgagattacaggcgtcagccaccgcgcctggcctaatttgtcaaatttaaacattttaaacatgccacagtttttgtaacacagtttaggcatttcttcatttaaaaaaatagggtgggcaccatggctcatgcctgtaatcctaggactttgggaggccaaaatgggagggtcacttgagcccacgggttaaggctacagtgagctgtgattgtgccactacactccagcctgagtgacagtggaagaccctgtctataaaaataaaaaataacttagaaattataaatgaaaggccttggtatctctctatttctgggaggctcagagatgtgatgcagtaagtcgtaactgtactaagctttaacagtactccctgcaaggcagctgtagagtgagggtaggagcctggctctggaggcaggctgcctaaggttttatcctacatctttcacatagtagctatgtggccttggaaatttttgtgtctcagctttctcatctgtaaaacaggaataataatagtatttatcttgcaggactcttacagggatttaattaaataagaccagcaaagtttttaaaactatgcttggctgggcgtggtggctcacrcctgtaatcccagcacttttgggaggcctaggcgggcagatcacctgaagttgagagtttgagagcagcctgaccaaatggagaaacccgtctctactaaaaatacaaaatcagccaggcgtggtggtacatgcctgtaatcccagctattcgggaggctgaggcaggagaatcgcttgaacccgggaggcggaggttgcagtgagccaagatcatgccattgcactacagcctgggcaacaagagcaaaactccatctcaaaaaataacaaaataaaataaaataaataaaactatgcttgacacataaacctgatgtccaaaagatctcaggtctctccaaatctgtctttcatttgtcaaatgagagcactggccttagaggatcttgaagggaagtgggggggtgctgaagtaccccttctgaggccttgagtaaggcatcctctctctaagcctcaacttcctcatctgtagagtgagggtcataatagcatctgccttataggggatgatgaggatgaagtaaaacaatacaggtaagcatttcgcacagcacatggcttatggtgaaagtcaggtattattattattgccatcctctgcattacttatgacaacattgatcattgtttgcctcctggatttttgaaagggtaggatgctaaaagaaagccctgttagttgcatttgcaaatctctcaacagtgctgaccaagctctaatgcaaaagcaagcagatatgcaaagttaaagctgtaaattcaggttccaaaggcatgcaagattaacaacccccattattataccaagttctcagctagtccactgatcaaatrcatcacatttgagcaatgcagaggtggcaaagaccctgctgaaagaacttctccactggactaactctgcttccaacattaaagccaccttgatgtatgtgtctgctcttaaatgtctctttaaacaacaagggaagaaaaaaatcctgaagttgtggtagctggtgaatacaaaagaaagtcataccactccagggatggagatggctgctcctcatcgttttatgtaacagatgcattctgataatgtaaccagggtgaatttactgggaagctaaggaagcttggatttcaggtctctgcaccttcatatgcctgtacctaatttggtactcttgcattaaagacaatcccctaaattattaaaattcagacccagaaaacctggacctactcgtgacataaactaattgaatttaaattcaaggagtttaccatttaaaagacttgtggagccaatacttaggttaaacggaggctctatctggatatgaaataatttcctgtctataactatgagaaatgagataaaatgctctgagtaggatttcacaaaaacataaaggttagattactacatatatagaaaaaagacagaccccctccctactatacccacacaccagtcaataaattcttaaacctataaatgaaaatccataaaaataccagaacaaaacataacagagtatggatataataatggttggtaaacgcattctaaaagtcactcaaaacatacaaagaaaaagattgaccagtcctatacgtaaaatagacaaaaggttgataactcataatacatggagcatctacaaatcaatcggaaaaagatgaacaggttgggtgcagtggctcatgcctgtaatcccagcactttgagaggccgaggcggatggatcacctgaggtcaggagttccagaccagtctggccaacatggtgaaacctcatctgtactaaaaatacaaaaattagcttggcatggtggcgcatgcctatagtcccggctcctctggaggctgaggcggatggatcacttgaacctgggaaaggaagaaaggaagaaagaaaagaaaaagaaacagaaggggaggggaggggagcaaaggggagagaagggaagggaagggagaaagaaaagaaaaaggaaagaaaaggaaggggagggaggaaggagagagagagagaaagaaagagaaagagaaagaaagaaaaagaaagaaacaaacaaacaatacagtagtaggcaagtcataaacggttgattcacagaacaaagaaatacaaatggacagtaagtttatgaaaagacgttcagtcccaatagcaatcaaggaaatgcaaattttaaaaaatctttttctatcaattagcaaaaattttaaagactgatagtatctactgttcgcaagaatgtggaaaaacaggtattctcacacactgttattgaaagttaaattatgacatcagttttggagggtgatttggctatatctatttaaattttttattgagataaaatttatatacataaaatttacattaagtgtacaattcagtgttttttagtatattcagaatcttgtgcaaccatcaccactatctaattccagaacatttccatcaccccaaaaagaagtcctgtacccactagccatcacttctaatttcatttttaatctttgtaagttatatttatttttaatttttaatgtttgtgggtacatagtaggtatatatatatttgtgtggtacctgagatgttttgatacggtgtgcaatgtgaaataatcacatcatggagaatggggtgtccatcccctcaagcatttatcctttgttttacaaacaatccaattatgttcttgtagttatttttaagtgtataattattattgactatagtcaccctgttgtgctatcaaatagtaggtcttactcattttttcttttttttttttgtaccagtggctccttttttatttttattttatttttcagacagagtctcactctgtcaccccaggctagagtgcaggggtgcaatctcagctcactgcaacctctgcctcctgggttcaagtgattctcgtgcctcagcctcctgagtagctgggattacaggcatatgccaccacagctggcttttatatattttttgtcttttgttttgttttgttttgttttgtttttgcctttttctggagaaaggggtctcgctatattgcccaggcaggtctcgaactcctgggctcaagctatcctcccacctcttgcctccctgagagttgggattacaggcgtgagccaccgcacccggccaagtagagacagggttttgccatgtggccaagctggtctcaagctcctggcctccagtgatccacccacttcagcctcccaaagtgttgggattacaggtgtgagccaccgtgcctggccagtatcagtcactcctaatttcctccttctccctttccctggcaaccactaaatctactttctgtctctatggatttgcctgttctggacatttcatctacaggtaagtggaagcataaaatatgtggccttttgtgtctggcttttttttttgcttcacattacttacattttaaatgttcttattctttaacccagttataccatgtcttgatatctattatagagagatattatccatatatgcccaaagatgcatattcaaggatgtccattgcatctgtttcaccaatagaaaaacaacagaaagaaaaacaaacctaaatatctaccaataaagatatatttaaataatccagtccctcctttctatgaaacatagttcggcagttaaatgaaaatgagctggggtcaggtgcagtgattcatgcctgtaatccctgcactttgggaggctgaggcgggtatagagtttgtgccctggagtttgggacctgcctgggcaacaaggggaaaccctgtctctacaaaaaacacaaaaattagcagggcatacgctgaggctgaggtgggaggatcccttgagcctgggaggcagaagttgtagtgggtggagatygtgccacctgggtgacagagagagactgctgtctcaaaaagaaaaagaaaatgaagtgggtctatctgttgtgacagttttaagtgaaaaggatgtgtgtgcagagattcctctggagtagccacctggaacagccagcggtgtgtctcctcacttccacccgtcccttccacacttggtgctctacagaggttatgccaatttcacaatccctttggcaggtaaatgagcaccaacaatgcagttacccaatctagtaatccctgccaatcttatgggtttgaaatgttgccttattgttgttttttctttttcttgattacctgtgagatgaaacatctttttgtatttatgaccattcttgttttctcttctataaagtgcatgtttcatgccctgtttatagcatttgtctttttatcaacttaagattttttttayattggggttcacctcttctgtcaattctatgcaattcttcttctagacacctaccttttttaatttttttactttayttatttatttatttatttatttattwtgagatggagtctcactctgtcgtccaggctggagtgcagtggtgtgatcttggctctctgcaacttctgcctcccggattcaagcgattcttctgcctcagtctcccaagtagctgggactacaggcgcccaccactgcacccagctattttttgtatgtatgtatttatttatttattttcgtaggcacctaccttaaggggaaaaagcatttgcacatgtacataaggaatcacataaaaggatcttcatttgagcactgtttagataataaggaaaaagtggaaacaaactacctctccctcagaagaggaacagataaataaactaggtttatttatcagtggttaccatattaaatcaattaaaatcagtgagctacatctatacacacaacatggatacatctcaaagtagatgctgagtgggaagaaaaataccattctgtaaaaggatatgaaaaaaagggatatgcagagtatagcaccatctaatcaacyttttatctcctggatatttttaaatcagtcagcccccatccaaccaaccacctgaartgtgaacctaatattctctcaccagggcaactatcacagccttctaataggtctccctgtttccaaagttgtctcactccaatctgtccatcacacagccactacaggctctatctaaaatataaacccttcactgcatcgcctacaggataaagttaagaccttttaagatctgattttttgcatacctctccagcctcaactcttgccactctctacctacactttacacactcaattttctaactcaattgtactttggcactctgtccctgatttgcattaaagagtactaagaaactaagcttcycttcccacaattcttttctctcttctgatcactaggagtctgcacacagcaacatgagattcataaattatatgccattctctcccaaagtcattttcaataagaacacatttccaacaccaaatggtcaatatacaatccaacaggtgacttaaacattgcaagatggtttagtgtgtcatgtgactgcaccaaaaaaaccctgactacatttttttttttttttttgagatggagtctcactttgtcacccaggctggagtgcaatggctcaatctcagctcactgtaacctccacctcccaggttcaagcaatcctcctgtctcagcctcccaagtagctgggactacaccaccacgcctggctaatttttgtatttttagtagagattaggtttcaccacattggtcaggctggtctagaactcctgacctcaggtgatccatcctccttggcctcccaaagtgctaggattacaggtgtgagccactgtgcccagtccctgcctacacttttgattcaagtataactcatatatggttcttgttaactgaaccatgtgattagtattgtatttatactttgagggtaattgtttctttatgctttggaattaactgtgtctatatcattccaacagctgaaatactgtaatgaatacatttgtgcataattacattccatgtgttaatgagctcaattcgctttcccttccacacttctaaagttcctttctgtttcagaaaggttgtggaagaaaacaagctgaatataatggaaggaaccagtatgacttactgaagaacttagacaaatgtgatcatataaatgaaactagcctttagtgaaaggcagtggttgctacccaaagacctccctcaagctagacagtgacaggcaagtgcaatgtgctaacttaggcagcctggacactagggttcccatcccagctccactcattctatttggcctgaaatcctctccatcgagaagtgggctaaaaatttcataaaaataggcttaacataaaagtattgtgagtttgcacaagtcacaaatccctttctgagccttaaattcctcatctgcaaaacaggcataatactctcaagccttggcttctggaaagactacactgagtgtcgcacaaaatattcatttgtattgctttggtaaaactagaaaacactatgggcatgtaagatcttattaatattataatcagatatcctttaactattaaccagcagtcctagaaactggaagtatgtcatagtaagccttagtttcccaaatgaagactttaagccatagattacctttatttgtaagatccttaaaatttacaccagaaaaaatagctagaacatcctcctccatgtgagccacatatgtcgtctgtgaatcactttcatctccaaattagtacgatccaaattagcagggctttcctacagtgaaacctgtttaagcaaacatctgctggttcactgaaaagtaatttttttctacaggtggcctttgaatttgtggcccaaaaatccatggaaagaaaatgtagcctttgagatggaagcccttcaaagagaggtggtgtccttgagaggctgggtctgctctcgctggggagaaagcgtgcgaaaaggaactcaactccaggccaggaagtgctcggatttaatcaaagtgccaatgactgcttcatcactgtcggggtgatactgattgaaaggacacatttttcctcttactaatattcttgatcaaagcataaaakgaagcatatgttttagttgaatgagggcccattttctgttttctcaattactaatttttcaggaaagtagaatattggaggcacaaaatgcaatctcaaagccatgaattctacccttctgctcttagctttgcccaagattgtctgaatgatcttgggcaaatcactgagggcagatacttgctttagtgcctgcaactatgagatggtcaacaactctcatgctctctccccaccctgggcctgatgaatactcagcaaatattacatgagccatcaaatgattaaattgactttggtgcttctattggtctgactagcatgtatagccttttttccccacaaatgacagttacttcctggctttgatctgaaattgcattaatctaccccaaaaagtgagttaagagtattttattattttttctaaccttaagggaaatggcttcatgaacacctttaattaaaaagaaaaataagtgaaaagattatgttttaaaatcacacaagtgccctctccctctccctctccccatggtctccctctccccatggtctccctctccctctctttccacggtctccctctcatgccgagcyraagctggactatactgctgccatctcggctcactgcaacctccctgcctgattctcctgcctcagcctgccgagtgcctgcaattgcaggcgcgcgccaccacgcctgacgggttttcgtatttttttggtggagacggggtttcgctgtgttggccgggccggtctccagctcctaaccgcgagtgatccgccagcctcggcctcccgaggtgccgggattgcagacggagtctcgttcactcagtgctcaatggtgcccaggctggagtgcagtggcgtgatctcggctcgctacaacctccacctcccagccgcctgccttggcctcccaaagtgccgagattgcagcctctgcccggccgccaccccgtctgggaagtgaggagcgtctctgcctggccgcccatcgtctgggatgtgaggagcccctctgcctggctgcccagtctggaaagtgaggagcgtctctgcccagccgccatcccatctgggaagtgaggagcgcctcttcccggccgccatcacatctaggaagtgaggagcgtctctgcccggccgcccatcgtctgggatgtggggagcgcctctgccccgccgccccgtctgggatgtgaggagcgcctctgcccsgccgccaccccgtctgggaggtgaggagcatctctgcccggccgccccgtctgagaagtgaggagaccctctgcctggcaaccgccccgtctgtgaagtgaggagctcctccgccyggcagccgccccgtatgagaagtgaggagcccctccgcccggcagccaccccgtctgggaagtgaggagcgtctccgcccggcagccaccccgtccgggagggaggtgggggggtcagccccccggccaggccagccgccccgtccgggagggaggtgggggggtcagccccccgccaggccagccgccccgtccgggagggaggttggggggtcagccccccgcccggccagccgccccatccgggaggtgaggggcgcctctgcccggccgcccctactgggaagtaaggagcccctctgcccggccaccaccccgtctgggaggtgtgcccaacagctcattgagaacgggccaggatgacaatggcggctttgtggaatagaaaggggggaaaggtggggaaaagattgagaaatcggatggttgccgtgtctgtgtagaaagaagtagacacgggagacttttcattttgttctgtactaagaaaaattcttctgccttgggatcctgttgatctgtgaccttacccccaaccctgtgctctctgaaacatgtgctatgtccactcagggttaaatggattaagggcggtgcaagatgtgctttgttaaacagatgcttgaaggcagcatgctcattaagagtcatcaccactccctaatctcaagtacccagggacacaaacgctgcggaagtccgcagggtcctctgcctaggaaaaccagagacctttgttcacttgtttatctgctgaccttccctccactattgtcctatgaccctgccaaagccccctctgtgagaaacacccaagaatgatcaataaaaaaaaaaaaaaaaatcacacaagtaagaccaggcatggtgactcagacctgtaatcccagcactttgggaggccaaggtggaaggatcacttgagctcaggagttcaagaccagcctggacaacatagtgagaccccatctctataaaaatacaaataaaacataaataaaataaaatcacacaagtaatcaaggagccccaattctggggacaacatcttgtgctctggtgaaaggcagggatcaggggaaccaagagaaggtgatatatgactgaagtgaaaaatctgagggacatgaaactccgtggctaaccctctcatcggtcttgtaaaaaaaaaaaaaaggtctatagtgatttaacggaagtgaacgattttcagctaaccagacagctcaagtgggcttggtgggccacagcacctgcagtgcttagccacatgaacagctagcatgtcaatcaggggcagatgaagcagggcattctctgaaggtgtagtgtagtgtccacacacaaggcagcttgtttgcaaatgagtttggagtgaggacctgggcctttctgacctaaaggccatgtttggctaaaattggagaccataaattcatttttcctggctaatagaaaggttgtaccacatggttgagtttatggtttaaaaaaaaaaaagaaaaaaggtttttccagtaaatgtcataaaccacatgtacataatgagattacacaggaaattcatctttctgaatgaattcacttagaatgaattctaattcattagaacgatacttataatttctgcacaccacacacacacatacacacacacacacatacacacacaagattatacaaacactggaacagtgacagtggttcttcaagtccacaagtcccataacatctcactttctggggcaagtctctctgaagtacagaaaacccaaagaaagagaagataggagtgatcccatgacccaaattaacgcccaggaaaaatacatttttcttctttgagcctaccttggcctggacggcgtaagaagccaggagcacagaagcctcaggagggcagtagatcttttcatctaaaatctgcttctttacctgaaaggagcaacaagggagacatgatactctgtgagkggaagtgaggtgtgtaggctgatcacaacagatggcctcacggcgttctaatgagggctgccagagcagcctgttaataattttctgacaaagggtacaattttttttttactgatgcagacaggtggagagttcagtcacagaagttactggtatgacggctatgcataaaaaccccttatctcttctcttcatgatcaatgctgaagagtaaaaacggtctctgtagttacaacagaggctgtgtgacasagcgctatgaactcaagaagtgtcaagagcagctctggggatgactacagcctcagcccctttgaatatgcatggccccagaggaaatggatctacttttaagtattaacacaagacaaaagtcaccaaggccactgagttatgattgcagaaaaaaccatcactctcaacgtgctgctctaagggaaaaggaagcaataaaatttgatcgattcaacttttaagtacacgtgaggtccaggaaatataattcttaagccataatgttgaattaacatatttcattgcacttaattttcttagaatggtgcaacttgggatgttccagacacagaagcaagacaactgcatgacgtggcagggggacactgaaataaacacagcaggaaagccagctctcctctcacagatgtcaacagtcaccggattcataaaagcagtaaattttgccttgctcagtcataaaaatgccttaacatttcagtatggggaaaatcaagtcagtcacacaagagacaggcagtgcttccaagtacttacaagaaagccatttctataacattaggacattctgggacctaggasattgttaggtgtttacgttcaaacacaaaaattcttcttaggttttaaaagtgattttacattcttagagagaaaatgaaacctgagatgtttctcaagcagtgcaactttctaatcccttggtttcatttccaaagagaggggggaaaaagcaacgctatagaaaaactgcaagaacatcccttttcttttgagaaggagtttcrctctggttgcccaggctggagtgcaatggcgcaatctcggctcactgcaacctccacctcccgggttcaagtgattcccctgcctcagtctcccaagtagctgggattacaggcatgtgccaccatgcccggctaattttgtatttttagtagggacggggtttctccatgttggtcagggtggtctcaaactcctgacctcaggtgatccacccgcctcggcctcccaaattgctgggattacaggcatgagccaccacgcccagcctaagagtgtccctttgatctgcaaacatcagaaataaatttgtcacctcttttgcgcgtgcacacacacacacacacacacgccccccagaccttttttaaaaagaatttagggggttttattatatttaacttaatatttgctgaccacaatatactgaggctgaaattaattacaggagggctatgtgacagactacccaactatctctgggaaatcatgtaattaatgcccctactgccatcttttacattactgaaacctttgagcacacaaatagccccagtgccaatcactgcaactggccatgaaactggggagccactctgacctgcagtaagaacataagtgaaactgataaggttttcatcctcagaccagttcccctccctgtgcctctggatggtcaacctgtaattgtgaatttcttaatttcttcaattcggtgggacaattacttatggaatgcctactgtgtacttaatgaggcttgcctttaaggggcttacaatctaatgaggaattaaggaagaaataggacaattagagacacagcatagcatgaagcaygatgtctgaagtaccacatatgggggacaaaccaagtgtcactagagctctgaagtcctctttttttttttttttttttttttttaagacagagtctcactctgtcacccaggctagagtgaagtgactcaattttggctcactgcaacctccgcctcctgggttcaagtgattctcctgcctcagcctcctgagtagctgggattacaggcatgcatcaccatgcctggctaatttttgtatttttagtagacatggagtttcaccatgttggtcaggctggtcttgaactcctgacctcgtgatctgcccgcctcagcctcccaaagtgctgggattacaggggtgagccaacccgcccggctgaagtccttttttttttttttttttttttttttgagacggaacctcactctgttgcccaagctggagtgcagtggcgcgatcttggctcactgcaacctccatcttccaggttcaagtgattctcctgcctcagcctcccgagtagctgggactacaggcacctgccaccacacccggctaatttttgtatatttagtagagacggggtttcaccatgttagccagatggtctcgatctcctgaccttgtgatctgcccgcctcggcctcctaaagtgctgggattacaggcctgagccaccatgcccggccagtcctctcttaatgagagcagattttaaacttttggaagaactactgctttataagactctctctttagccttcctttgaaactattgagtacttttaagttagctagaagaaaataggacccattttcaaggaggttttaagttaggtagctacttgtatccattcttcaccatcacaccttcacaatttcatctgacaccaattttcatcactcaagtatagttctgttctgaagccttttttccattacagaaccaaaggggctgaccttccagaggtagaatatttttgcaatacaaaggtgtttgtggtcaactctgaggccaactctgcaaccactcctgggcaagttctctcagaactggggggtagccttgactgatgtacctgtaagaagaataaatgttgtgtgatctcctgaaccagctcctctycagcattctcaggataaaattwggccaagaagtgaaaggtgactggttcttcctttgaaacatcatgatccagtacctgcagaattgcagagcaaaagacaaacacactatattggcacttcctcctgtgctaycctcaaagaagcctttgcaaggcgtgmattaaatttttttcccactaaatttatcacatttcctgaaagttgtgattttacagtttgaagtattcacaaagtcacctatagcaagaggtaatattcacttcctatggtgtttctgaaacaaattaatcaatagccccaagaagtgagcagagctaggattaaggcataaatgttctcagggccacagaatagttaaaaactagaaatgtatcactcagcagtcttggacactgtcctttatggtaggtggaaggttttttaattatctgaagtagtggaatcttcctttatttcttttttcttggtgcctactgccaatatttaggtccgtgatagaatacggcttagagcgctgggcgtggtggctcacacctataatcccagcacgctgggaggccacagcgggtggatcacctgaggtcaggagttcaagaccagcctggccaacatggtgaaaccccatctctactaaaaatacaaaaaattagccaggtgtggtggtggacacctgtaattccagctactcgggaggctgaggcaggagaatctcttgaacccaggaggtagaggttgcagtgagccgagactgcgtcattgtactgcagcctgggcaacaagagcaaaactctgtcttaaaaaaaaaaaaaaaaaatacagcttagagatgatgaactagatcattatgaagtcatctaaacattaactgagcaacagaataaaatgtgtccatcatggcaaccctttgtttcaaggaacctccagagatgccccacaaaatacttgaagcacagtctgtaaaccactgcctttaaatcttctaacaattccattcacccctgtaaagcttgaaccatctgctctccagagtgaatttcaagacataaacacgccatgtgacaggctacaaggctccattaacatgtgtcatgatgtatttcccttgagcagcaagttccacggctcctgatgcccccagtctaatatccatttggcctacactcagctatcattaaaattcactttgctaagaatcatgaaaaacatacaaaaagttttgctgtctttgacacataactctccatgctcctgcccaaattctagatggcaatgccaaggagattcaaaatctggtctacgacaccctcactgacagtggcccccagtggcacttagatgctcatgatcattgggaattaccattgaacttacaaccagcagggattcccatgtgattatttagattactgtgtacatatgtgaacacaattcgaacacttaagctttgagtcaaactggtaaaaaaaaaaaaaataggaagctttcattatttattatgctcaggtaggcaactggagggggcatcatttggggtaagaattagacattgacttactttgaagttcaggtgtcttttaggagttactgacaaaagcatatggtcctgctccccgcctgcctttcatggctaggtaggcaggtcagtaagcaagtgtatccttgtgtgaacatatgaacccatgcagagggcagttcctttaggcaatattcatttccaagccacattaaaattgccaggagcccagctttcttggccatgtgtcagaagccccagagaatcctgaggacaaaatggacattctttcaccctggggaccaggcactctctattccttagatcatattaatgattacttcatgtcagactatggtgttcctcaaaaagactttaaaaaattccctaaagaacacaagccccaatactctctaaaagacacaaattggttatttttaagtatatgaagataacagtaatttttattcatgaagtttttattcataaactgaaaggcataaagccagaagcaatcaggctggtaacaatgggtaaagaagccagggccagcagcagtctaatcctggtaacttctgcttgcccaggagagcctgtgaggagwaggaaactggtagcatctctacgtcctgctttctgcatgacttaattcaggaatgtgcccccttctctactatacagctacagcgccccagtgatgagctaggcgcctgctcagggaaaaactggaaagctcacgtcagccccaccagtttcatcgagttctagcccaaccttcttgtccaytttgagycaggccactgtgtccttgattgtgtactgcagtccaragaacyaggtttctcrgagccccagagtccggcacaccaaatcaaagaggtccttccctttccacttcatctgcaataacaaaccaatggggaaggacactgtgagcaaaaatcattaataaaaccttttctctgcactctccactctcaggttccaaaacgtggggatgacactaagacagctgatgaggactgaattcctaaataattttaaagcttcctttacaaacccatgagtgggaaaataccaattagagcttaatggcttaatcactgcaaagcatacacaatacatcccttggacagttccttacggattttaacakctccaaagctgctaatttaggaaagctggtaaataagcatcctcatttaggagagtctagcctcttaagttaactcggggagatggctagcttctagggacattcattcccttgaaattttgttgttgattttttttttaaatcattactttgcyctttgataaaaggctagtattcctttaaataagactggttttactacaagtttttttttaatataaagaaatcataatcaaagtcataaatcayggagaaaaagaaccatgagagaccagacagtccaatcacaggtctgtcctgtcaaggatgcctaactgaggccaaaggggaagctactcacccagtcacccagagcaaattcaaactcctggtatctaaacccaggtgacgaatagatatcaatatactgtagtgtgtttatcctatagcctcactttcaaaagaacctgaagcaatggcaatctcttttctcagctattccatctgctatgtggaaaagcaagttcaatgtcttaagggaagagaatggctggcaacttagtaaatgttgccacctagtggctttcaagttaaaccaccaggatgttcccatacaaccccttagttgctgcttgccccctccttgccccaaccacccctaaatatcagatggacattcaaatacaaactcgagtgcattaggatcatatgagatgcatcatagaaatggtggtcatgaaagagtaatctttcgacagacatgggaaaaatgagaccactcaattgcagaagcatccgtcccttcctgccctcattagaaatctccactcaaagtcttggcacactgaagatgtatataatgaaaaggaatgaaaaaaattcttaggcagccgggcgtggtggttcacacctgtaatcccagcactttgggaggctgaggcaggcgaatcatgaggtcaggagatcgagaccatcctggccaacatggtgaaaccctgtctctagtaaaatactaaaaaattagccaggtgtggtagcgcatgcctgtagtcccagctactcgggaggctgaggcaggggaatcactcgaaaccgggaggcggaggttgcagtgagccgagatcatgccactgcactccagcctggcgacaaagcaagactccatctcaaacaaacaaacaaaaaatcttagggtttagagacttgctataaaaccaagaagggaaaaataagttagacctctgatacctgattggtttttgctaaaacctgattctacaggggagttttcaagtaggcttttcatttttaacacatatgaatgaacagtgggttctctacaaggtactcaacaggaaagcccatcccttctctgtgtttgcagtcaaagtcaagcaaagcagcaacctagatggaagaatatcaggaccacagcagacaagtagctgagatgcatactggcttttatcttttagcagggccgtttctcctatctgtccttcaacttctgccctgtctcctctctgactatagtggggccactggaacactataaagattgaggtctttagggattattttgagaagaataaaagaaaatgatgagttttatttttaacagatgatctccttcctcgtttttaaggctgagtaatgggcacatccatttcccagtctgacaataggacaaaaagctttttaattcaccaaaagttttaattcctacaggcagacttcactgaagaaatgttattttggaaaactagaagtttcaggatgctgattatcctcttgtctctattttaaggcagctctagtatataaattataaatgactaccttgctacaagataatgtaacattaaagaacaggcattaacttggaaaaggtaaacacccaagggttgagaagatcaaggtaacgattcccaatctgccataactcatggtcatggctgggctgggctttggcaagaaggggctgtctgtaagtggggtgtgcagtgcagagaaacaaaagctgccaagggaatgatgagtgaatttcctgacatgggagtttaaattctccagcataaaattgtattaatgcagttttcctgtattcccttctactttgtttttaaaatgcaaaactgtctttgttgaatgcaaaaagacaatgtatttgtccccttggcacttgcaatacagtgagaagtgcatcaactctgacaccaattcagaatgccctacttagatttttaactttgacacaaaggatcgtagactgtcaagagttggaaatgagcatgagtaattacctaatgtagactcataccctttttgtgcaaataaggaaactgagtcacaggattctttgccagctgccaaagcatacactggcctttttcacggtgatctaacataggcaaaccgcagaccctagagtgcctcttttcctgttctgtggggtccctttgttcttgctgtccagcactccccagacaccttttccagtaagtaaccagtgtttgaaacaaaatccattctcagaagagtcagatattgctcgtttacagctcaatgtgaattaagcctctgttacctcccacttattctttcaacaaggattatagagcacaccctacatgccaaccaatgttagacactgatgctacaaaatggtggaagcagtgttctgcaggagaaacaggcaagacctaggtcagagaaggctttaaagagcaagtgagagttagatgcaggagagaaggaaataagtctttttttaaaagtcatgctttctacaggaaactgcaagtcatcttgtaaagcttaaacagacaggaggtggcatggcgggaatggggctccatttgggaccaggtggctcaacttcagccaaaagctgcaaagtctttgaagacccttgagcagacgagtcataggctccaatctgcaatctggatgggctctgacaacagggtggagtatgagttgaacaaaagaagccctggatcaagaaggccagaaagtaggccaacccctgacataaggaaggcagtagaagggagagaaggcagcctgagaaacggaaaagaggcagagtcacagaacaggtgcctgaacaggaccagaggagacagaattaagagggacacctgtgtgtctggcttgagtaccaggtggttccactaaaggagagatggaatcaaggagaagcagcaaatctggcagggatagaccagcaattaagttttagacaagatgagtgaaggtgcctgaggaaaccaagtaaagacgttcaaacatatttgatttaaagccctaattccacttataaaataaaattttgtctttaagcaattaagaagtctttctgtttggttaaatctaacctcaacatgttgctacctacatcaggttccactttccaacaagcccttccccaaatgcatgaggtttgctcagtcttcctaatttgggtttctacttctttaaaaacaagcgccattggtcacagttgctctgggtggttctcaggacaccctgggaaaagaggtcttggggtgtggacgggacttccaggtgtcagccaacttgccagaatatgaccaagctcatcttcagtgtcatcactcatccactataccatgctgatgctgtgaagtgactcactgtcctctgaacatctcccgagactgtaggtgcctcagcacaagggcagtattagtcctctttctgctccccacagtgcccaggcaagtgtgtacatacaagacatggcaaacaatggctgtccacaggacggactgtggacggacttgactacttcaaaaacccaaaactcaaagacttaaagccagttaactcccgctcacccacctcttccacaaatagttagtgaacacacacattgtgtccaagcaccgcccaaggtgcaggggacaaatggggaaaaagaaacaagtctctacactcagaggactaggatatgaactagctgggaaaagataatcacctccttcatcgcacacataaaaaccccaggagtgggctttcagcactataacacttgtgagtgccacaacaggacacccagcggctgtgggaacctcctatcctgggcaggtagggaaatgacatctaaactggctcatggtagaaaagaggaaccaagtgaagactgggcttggggaaagaggagcaagcaggtaagtatgttccaggcagagggaatagcatatgcacaagtctagaggcaaaaaagaggtcagtcgtccttacaggaaatgggagtaggatagttcagtctggctggaggataatgctatgtttccaaaaggaccgaaactaccatctaaaatcaagaacaaaaaaaacaaaataaaaataaatacataaaatcaattctttgtcaactaactctacctatctcatctgaaccaaaaaacacagaaagttatctggtgaccattttctccattctcccaagtagggaacacactaataccattctagaaacaagagagaagttaaattgttacctaagatggatgcctcaggacatgagggcttaatctttccaggaactagtctaaaaggaatatagataagtgatggttgtctccattggtatgaatctctgcactgtcactgtgtgaccttgggcaagtgactgaacttccttgtgctttgcaaaggggataataaacagaactcgtcttagcagattgatctaaggattaagtgcattgattcatttaaaaaccctaagagagtgcttggcccatagcaaataaatactcagtaaggggtagttattgttaattgtaactctgccacctctccttagattctcaagtggcactgtttaaagcctcccagccctgcttcacaccaaggatgatggatgacagatcacaaagggcaccatcaattctcactgagctaaccatactatcagtcatttgacaaacctttattgagcatccactacgtcctggtcattgtgctcaaaacaggagaaaaatgatgaattgaggacaagacactgtccctgttcatgtctgacagggaagacaggtaaatggatcacaaaaatgcaacctggtaagtgctaacagaacagggtacagtggcaacacaactcgggcctgggtctccgggagtaaggtctttcctgaggagagatgctgtttgagctgtatcttgaaagccaggggggtagttgagctgtggtgaaggggctgacaatagggaggtcacgccagcctgagggaacagcaggtctgccacttgggtccaagctgttgcaaagtgaaggaatgttctttgcacttttctagtatctgacaaacagcataattatcctatctgcagtactgaatgttcaatgcagtactgaatatgcagcttcagcccagtgcgtgtgacaattctgactctccacgctgattaggaactgggttgttcagtcactgattcgaagcaatgatgcatcctgcaacaatacctgtggggctccaagaacctaggactagtgggatgagtctcatgtttattttctggttaaaaaatgttctttttggataactgatggcacgtaacgctttcaggccctgcactcgtgccacttgagggcctttttgttagggtttatcatttttcctcaacaggttgccaaaagaacagctcctggttctgattaaatgctcatttaaccccatcgctttccacgcagccaaagtgttcaaactgctctggatccaccacggttccctgcctcatctcagcctagtgacgaagagggaggctaagaggcagatgctcattttgcagaaggaaagagagaggtggagggcgtgagaaaggtgacttgcgggaagaagaaagagagaaaggagcacaaatgtggactccaatgcctggaagctcccttccacagacctcctcctcaaggtgcccttcaggcatagagactaataggaggagtctggaagtcggatgcttctcgcctttgtggctgtgctcacccattactttaacaggctgcagtgctatttcatagatatatacttgtgcctatatcatggatagatgtgtatgaactttataaacaggactaagtgctatcagcttgctattttttttgtaggagctggatttatgagctttacccagagtgaagggcttgtaatttatcaacctagaatgttttaagtaaatagcactaagcacttatgttccacagcaggaacgtagctggaatgcagtacttttctgttataggaagcaaccagcaccaataacctgcaggactgattgagttctattaaccagggaagcattaggaataacatctactgaacagccatcttgcaactggccaggttgagactcaaccttaaaactgctatttgttttttgctttgacagctgcatttctcccactgttttctttgggacatacagtcatcagcaatcaaatcctagtacctgctgatacaacagtgcggggtgagtaagaaaccagacccatgacaggaaaaggccacagtttgaaaaggacaactttcttgaagaaagtgaactgaatttggctactatatatgaaatgcctaggtattagaacctatggagaaatgttggctttaaagagaatactaaaatgtggaaaaagctaagagagaagcaatattccctttcataggggtctggtgggctaaattatcagccacacgaagaatgccgtttcaacggctgtctcctctgcagaaaatgaaagagaatcgacaaactcagcattcacttatcagtttcttctaattagctcacaagctgccctagcatttgccataaaaattgtcaaaaggttagctcccatacagatagagcaacaaaaggaacggcaccaccccaggctcaggacatgtgccacgtgtctgccgttatttcagaaatggaaaacaaaggatgatgtgatctcccctctcaatgtttatctataactgacttctgcagccatagctggcctaagagaacaggtttataggagacttgagaatttaagatgctaatataccagatccaaacctaacctgaatacaacttttgtctgttttgaaaaatagaggccaaatacctcaatttacaagaaaaacacaatggaaagttataaaagtaattttactgtacagtaagtgaataataaattccattaaaatctattttgattaagcgaagaagataaaaaagtgcagtaatatatgtctgacactgataatctcaattcagggtatggtatcaccacacaacaaaagctgttcttgtgtctcatgattaaaccgcaaaaccatcatgccgtttcctttcaaaattaaaggatacaccacacctcagccattattctcaacatgaggggaaaagagatccaccaaatagaaatagatcacaggacaacacctgtgaaaagtgtgggaaaaaaaatagatcacagcaaaaagaggggagtggggagagagagagacttttttcctctgctgtaccaatcctgaaccccacatccttcatttaaatctgggcaagatctcacaaacttggaggccaggcgcagtggctcatgcctgtaactccagcactttgggaggccgagacaggtggatcacctgaggtcaggagttcgagaccagcctggccaacatggtgaaaccccgtctctactaaaaatacaaaaactagttgggcgtggtggcgcatacctgtagtcccagctacttgggaagctgaggcaggagaatcgcttgaacttgggaggcagaggttgcagtaaaccaagatcacgccactgcactccagctagggtgacaragcaagactatctcaaaaaaaaaaaaaaaaaaaaaagatgtcacaaacttgaaagctcctctttgcaaaaaatcccaactgtaatctcttgccctgtcagtttctgccataatcaactacagcaagtaattttcttctcccagttctccaatcatctctgttattatgccaaatctatttaattactgccttcaactcttcaccaatttcttcctccctccttcaaccaattaccctaccttattacaacccagcctatgtcctcccatgtcagcaaacttatgtgcttccatttatttgtaactagacctttctaagatctatccctttgtctccctgctgtccatgtcccccaatgccacatacatgaatcagtatgggctttacacrtattgaaaaatgaggtacttgtctttccccaagttttctgtctttcctccagttctgcagatcacaaactccttgaargcaarggtgtacacacacacacacacacacacacacacacacacacacacacacagattaagtctcccagaaccctggcaagtgctgcataatctgtggatactccataaatgcttgatgcttgtggttggttgacgatgttgatgataatcatgataactagatgaggcttctgagcagaacagtcttccaattaatgattgcaatgaagcaagaatttatgamactcgttattaaaaatgtaattgcataattaggccttaaggtatatattttacccctttggtgaaacatactgatttcctctctctaaaaataccttggcaaggaaatctaaatctcaaacaaccaaagaagaaaattttccacagaacaaaggagactagtaagaaacaaatcacagcaccttgggaagccacaaaatggagcttttaaactctggtaagtctttcaaaaccaaatgaattacagttttttaggggaaaaaaaggccttatgcttgcagtttctggcatctttcccgctgaagtgcagagcagttatgggagcgggaggaacccagcagggaggtctgtatcctagattctctgcctcaaccacacacaagtctatgacttgggtgtgccatgcagctcaaccgggcctcagtttcttcatttgtaaatctcttatgagccatgcaatcaccatattttactatgctgtaaacaaagaagattcacttcaaagttgactgacagatgacaaagcaaaaagaaacaatacaaccatcatgctatgaaagcaatacagtccccacaaaagcaaacacgacaatatctttggaatttagctcacaacatgagagcaatcatagctcatatagtcaaacagctataaaacacccaaacccgctgtgctgggtaagtcacttaacctctttgggtctcggcttccataatcatcaagtggtcttcaggattaacaccactctctgagtctatgagcttgacatgactttgtataaaccatgtagcatttttcattgctacgataattttcttttgatcctttaacatctcattctgtatcttaaaatcattttcagggatgtaaatgacttcacctttagtttatgtgtggtttcacattcttttccctcattcagggtctgctattacgttccttactcctaataatcatgagttgactgtataatgatgaactctctgatgtagtaaaattgggaatgataatgctgctgaaaaayagaagttcttatcacctagcatgttattgatattcagtgattggcaatgattacaaatgtgtgatatactgagaataattttgcagagcactacaaataggaaacaatagtaaattcagcacaaataaggcacaaggttaaatttcaaatgcctaaacatcaagtacaactagcagattacgaaacacaacccctgactaagtatcaaccaactggttactcctgccctggacaatgtaaaaattgtggttagtatgtaacaatgcattccttcaaaaaagctccagcacaacagagctagagcatgatccattcatgtgaactagcttctattgaacccagatgtttgcctggaaagaaattttgaatattctctgtttctagcttgaccttttgattaagtctcatggtcatcaatgataataaaactgactttaataacattagaaggtacaggcatgagtggataggactggtaaaaatatctgcagatggggctgggcgtggtggctcgcacatgtaatcccagcactttgggagaccgaagcgggtggatcacgagatcaagagatcgagaccatcctggccaacatggtgaaaccctgtctctactaaaaatacaaaaattagctgggcgtggtagcaagcacctgtagtcccagctactcrggaggctgaggcaagagaatcgcttgaacccaggaggcagagattgccatgagctgagatggcgccactgtactccagcctggtgacagagttagactccatctcaaaaaaaaaaaaaaaaaaagtctgcagatggatgagaactaccgtgggctgaagactaacatatttatgagactgatttaatctcaaaatcaatatgattaagcaagtagggagatgcactgttggtgaatttaaaaccacagatcagtcgagatacatttagtaattactttgggcttcagttttaagttttatctgaatgtcaaactatcaaaactattgaaacaagaagactaaaacaggcaaggtggagggaaaagctataagcaacataactcactaagagaaagtttatatgaagttttcaaagctcrgtccaaatttggcaaagaagcaaaaaagagaacagtggcaaaagagttggaagagaaaaggctgtctttaaaaatgatgcagtctggcaccacctagtggtgccacacagattcctgcactaggacaagcaccttgtgtcaacatgagtgactaaagattccattaaaaatttttccctgaagtcagcactactttggtaataaattttgacacgctaaaaatgtcctaaacatgtggatttagaatctaaattagacaaagcacagacaggaggacagaacacatcatcctgtaacaagaattgagaagcctcgtcaccagctggctagaaagattagcagctctgagaaaactcaattctgggtttttaaaacctcaaacgctttagtttatgaaattaaaaataaacaagcagcaaaaatgttcttggacaggaatgcaaaactagcatgaataactggagaagtcatcaaaaacaaagaaaaaagaaaaatttcaatatgacacactagggacaaaagaatgcagaataattaactatggcagaaatccgaaaagaatcctgctatcaccgtggacatcaagctaaatagagattgtattacttagcatgttacaaaaaagaagatctggccgggtgcaatggctcgtgcctgtaatcccaacactttgggaggccgaggagcgtggatcacgaggtcaagagatcgagaccatcctggccaacatggtgaaaccccgtctctcctaaaaatacaaaaattagtggcgcacgcctgtagtcccagcttctcggaaggctgagaaaggagaatcgcttaaacctgggaggcagaggcggaggttgcagtgagccgagatctcaccactgcactccagcctggcaatagagcaagaaaagagaaagaaagaaaaagaaagaaagaaagaaagaaagagagagagagagagagaraaagaagagagagacagaaagaggagagaaagagaaagaaagaaagaaagaaagaaagaaagaaagaaagaaagaaagaaagaaagaaagaaagaaagaggacccttcaacaagaacatggcataaggtgagtccattttatttggactaattatagtttagagggtctacaattacaaaggcatggacaatctgaataaggttcaaagaaaatgaaggcaatgattaaaggagaaaattcacagtgcttctggcatgagacacttcctgttcccacactcccagcccatgacaacatagataggtaacatttatcaaatgctcactacgggtcaggccctgaaccaagtgcctgtaaaggtccacctcattcatgtctcaaaacaaccctggccaggcacgttggctcacacctgtaatcctagcacttagggaggtcaaggcaggagaatcacttgaggttaggagttccaggccagcctagccaacatggcaaaaccccatctctactaaaaatacaaaaattagctaggcgtggtggtgcactcctataatcccagctactcaggaggctgaggcacgagaatcgcttgaacccgggaggcaaaggttgcagtgagccgagatcgtgccactgcactccagcctgggcaacagagggagattccgtctaaaaacaaacaaacaaaacaaaaaaaaccctataaaaaagatactattattctcattttatagatgcagcaactgaggtttaaagagttaagttcaaggtcacttgggaagcaggtagcagaggcagggcttttcccaggccaatttaccccttccatcagggctgtagctcttattctttaagcaatattcttcctgtcctctagcagacttcctcatgcctatacactcaagtcttgagatgacttcctaccaaagcaggaaatatgaaagggagaggagcacagtgagactcttctgcccagatcacctaaaataagacgctaaagctgagggcctttgaatgtgagttcttcccctcatctttcagaagaactgaggcctgggggaaataagtgatgcgcccaaggtcacacggtggagctctgcctagaagcctggtgttcagacatcggtttagggatcttgatgattttacacaagtaaaacratgcaggaaccagacaagagaaagtgcactgacttcctgagctcaactctggccagcttgatccaacttcccttctgcctgactgacttcggagactgaggactggctttggacctgagaatctcctgaatcttgagcctagcaggtcttctgctcattcttggtcacagaacaccctaatctctagattcactagatgcttacatctgcctagttttgtcccaacccccagcaagtcccactgctgttcaggtttcaatgtgataccttgcccaaagcgtttgccttctaattgtttcctacttccaacctctctctccctaccccaaaccccaaacgttccaaatcattttgcatgccaaccactttaaatcacacttctagtaaaaacttcaaagctcttcatcgcatctgatgaatacaagcctctttaacctgggcttcatgagcctccaatatctagcttgaagctaccaattcacacacatctctagctgggcatgttggctcatgcctgtaatcccagcactttgagaggctgaggcggaaggatcgcttgagcccagaagttccagaccagcctaggcaacatagcgggatcccatttcttcaaaaaaattagccaggtattggtggcatgtgcctgtagtcccagctacttgggaggcttaggcaggagaatcacttgagcccagcaggtcaagtctgtagtgagctgtgatagcaccactgcactccagtctgagtgagaccccatctcgaaaaaaaaaaaaaaaaaaaaaaggccgggcacggtggttcacgcctgtaatcccagcactttgggaggccgaggcaggctgatcacaaggtcaggagatcgagaccgtcctggccaacatggtgaaacttcgtctctactaaaaatacaaaaattagccatgtgtggtggtgcacacccataatcccagctactcaggaggctgaggcaagagaattgcttgaacccgggaggtggaggttgcagtgagcagagatcacgccactgcactccagcctgggcgacagagcgagtctctgtctcaaaaaaaaaaaaaaaaaaaaaaaaaaatacagggtcttccaaaactgaactgtcagtgagagggaagcggattgtaaaagtcaaagaaacaatgtcgtctgaacagttaactaacttttcaaaatccatacatgaaagagtctcagaataaagatgttaccaattgctatctaggtgggcataccaaatattataagacaccaggctgaatacaggcaggagcattctgactatgttaaatatgcaactagacaatgcttaactgttataacataagcctcattttaagccaaaggtaaggaattctcattatatcatgagcaagtgaaaatgattcacttacagaaaatgtccacttgattcaaaatgacaaactagacactgaggtaatgtagcacggatcgttagtcatgtcattcatccggcaaaaatgtaagccactggcaagtttacaaaatgcttytgagatagtatcatacaccaaatgcaataaaataatgccataggcaaatagttgttaagttgaggaagtccttcaaatgatctcttctttccactttctttttcctgtttaccaaatacctaagttctctccaggtttctaactttttctctcctacttctcttttacgcttcctatttgggtagcatagggtagtggaaagagggctggcctgaaagacagatgacctggcttcaaatctcagtcccatcacttagaagctatgtggtgactttggacacaaagaagaggaaacccttgagcagagcctagaaggagaatgagttcagttctgccaagcaacaaatgagaatggcattccaggcaaagagaacagcctatgcaaagatgtggcagtgtgaaggagggaccaggataataggctcagagcaagagggtgcgtgaggaagtggaggagaggctgagaaagggagcaagctaacgacaggcactgaacttatttcctttttatttttttaatttattttatttatttattttttgagacaaggtctcactctgtcacccaggctggagtgcagtggtgcaatcaggaagcttatggcaacctcgacctcccaggctcatgtgatcctcccacctcagcctcccgagatgctaggaccacaggtgcacaccaccacaaccggctaatttttgtattttttgtagagatagggtttcgccatgttgcccaggctgttatttctttaggtaacaaccattatatatagcacttatcttgtgttaggtactattctacgtactttaccagtaattactcaaatttaattcttgtaacactatgcaggaagaattaattacattcaccattttacagttagggaacagaggcatgtgagggggttaaggagctttaaggttgcaaagctggttagaggcagagccaggaatcaaactctgaagtctatgcttgtaatctctaggctatgctgcctcagcggccccaacaaggaaactgaagcttgagttaagatttgctcaacttacatgtcagcctcaatgtgaggttcaaataagcaactgcaggctttactggtcgatattaagttaaagggtgtgcccatctattctccctattctctcactacctacctgtccctgtcctattctgcctctttcagaatagatagtggctgsactaagcctttaagcatgctatgtatcctgtctgagcctctgtttccccacttaaagatgaagtcagttacagaacctaggtccaaagtagtccttgatcactgctaggaggtgttccctgcctggtcaacgtgggcacccagtaaatcagagctgcgtgtggtggttcacacctataatcctagcactttgggaggctgaggcaggaggatcccttgagcacaggagtttgagaccagcctgagcaaccaacgtagggagacccccatctctatttttttttttggagtcggagtctctccctgtcatccaggctggagtgcagtggctcaatctcaggcaacctccacctcaggcaattatcctgcctcagcctcccaagtagctggaattacaggcacatgccattgcccccggctaatttttctatttttagtagagacgagtttttcccatgttggccaggctggtcttgaactcctgacctcagggatccacctgcctcagcctcccaaagtgctgggattacaggaatgagccaccatgcccggccaaccctgtctctattatttaaaaaacaaataaataaaagagacagagtctcactctgtcacccaggcttcatgcagtggtacgaacatagctcactgcagcctcgaactcctgggctcaagtgatcctcttgtctcagcctaccaagtagttaggactacaggtgcgcacaaccacgcctaattattgtcttttttttgagacagagtctcgctcttgtcgcccaggctggagtgcagtgacgcgatctcagctcactgcaaccctcacctcccaggttcaagcaattctcctgcctcaacctccggagtagctgggactacaggcgcccactaccacgcctggctaatttttgtgttttcagtagagacaggatttcaccatgtgcccaaactggtctcgaactcctggcctcaagtgatctggccaccccggcctcccactgggattacaggtgtcagccactgtgcctagcctattttataatatctcttgaatgaataaatgagtccctgttatatcaaatgaggtagtgtgcatttaaagcatttagcatggtacctagcacaaagtaactgctagtccctagccctttgtcccacacaaaggcagaatggggtccagtggagggcagcactagccagcatctgtttcttcgcaccccttcatcagcacgcacgcactcatcactcacccctgcctgtcctagacctgagtagtggcacccatgccatccataggcactacttaaaacccatgggagaggtcrggcacggtggctcatgcctgtaatcccagcactttgggaggccgagccaggcagatcatgaggtcaggagttcaagaccagcctgaccaacatggtaagaccccatctctactaaaaatacaaaaattagcctggcatgatggcaggcacctgtaattccagctactcaggaggttgaggcaggagaattgcttgaacccaggagacagaggttgaagtgagctgagatcacgccactgcactccagcctgggcaacagagcgagactccatctcaaaacaaacaaacaaacaaacaaacaaaaaaaacccatgggagagcacagcggtaaaaaggtagataacaggccaggcgtagtggctcrtgcctgtaatcccagcactttgggaggccaaggcaggtggatcacctgaggtcaggagttcgagaccagcatgaccaacatggagaaaccctgtctttactaaaaatctaaaaattagcagggcgtgttggcacatgcctgtattcccagctattcgggaggctgaggctggagaatcacttgaacccaggaggcagaggttttggtgagctgagatcatgcactccagtctgggcaacaagagtgaaactccatctcaaaaaaaaaaaggtagataacagtcttacttctgaaacaggaatagaagtttcttgttgcactaatatagagtatagaactattaccctgtacaactacactgccctccagagtttacatccttgaaggggatggtttgcctggtcctagggagcctaggatttaagattttactgaaaatgccagaattgttctatctgtcttcccctttagaaagttccttctgttatggacaacttacgtccacttgtatgctggaatgatctgcaatgttggtatttaatacaatcataatctcacttaggtatgtgaaaacatttagaatgccaaacaacaggagaaggaggctttgttttcaatataagatagtattaggatctcttacaacttcctatttggcttttcttactgatagattgaattattagagtaaaattccagcctagataagaaataacatagccgtttagcctccyggcaaattacactcagcacccactttctcaaaatgacaaacaacaaatctttcaagtggaaaaatcttccaaagcatccagccaattgagcaatgcagcaagtagtgcaggagatttttccccctatctctgcagtaaaaagaaaaaaagtctgaacttattagcataaggtaacatgactcatatgttaaatgccaccggttctgaaattgagtccttcttgaaaagccacctacatttgacctcaataaagtcaagaattctacaagtactctctctctccttttttttcaaaatgcatctgccatctccttgcatcagcaccttgctcattaatggacaacataaaaagcaggcaggagaataaaactaatcacttacctgagccctatcatcataaatcaaactatgattactttcaacagaatatgtgaacatggtttacaaacaggtttttccactggaaatctgaggttcagtgaggtgtaatggcttgataaatcacaacagggcagtgcccatggtaaccagagcctcctactttaggccaattatagtccctcctatatcttcctttctgccagggactatgcattccatgaatccttataagaactctgcagggtcagcattattagtctcattttaccaatgagaaaataaggtccagagagctatgtaacttgtccaaagtagaagtattttagctagaattcaagcccaggtctgtcttctttcaaagccgatgcactttctactactgctctgctaytcaaagtgtggtccttgggccggtggcacaggtatcatcacctgagagtttgttattaatacaaaattctcacttccatcccagaactactgaatcagaacctacatttttccaagattccccaggtcatttatgtaaaattaaagtttggcaagctttgcactataccatcctgcctctctgaatgtcactactattatccttttctatagatcagtggttctcaatgtggtcatggaggttgggtagggagaaagaggagattggagggtgtcctccstaccccagggacacttgacaatgtctgaagacatttttggttgtcacaacaactgggatggggtgggggaatgctactggcatctagtaggtagaggccagagatcctgctaaacatcctagaacatacaagacagctccccacaacaaagaatcatccagccaaaatgtcaatagtgccagggttgaaaaaccttgctctagctgataatactgtccaacatctttgggtctggaatctacttaatgaagaaaaaagagcttttcctggcaaaattgcggctgaaaaatgtcatacaaaatccctttcctggatggacacagtggttcacacctgtaatcccagcactttgggagaccaaggagggcggatcacctgaagtcaggagttcaagatcagcctggccaacatggtgaaagcccatctctactaaaaatacaaaaattagccgggcatggtggcacatgcctgtaatcccagctacttgggaggctgaggcagaagaatcgcttgagcctgggtgacagaggttgcagtgagctgagatcacaccattgctttccaacctgggcgacagagcgagactccgtctcaaaaaaaaaaacccccaaaaaactaaaatccctttccttataggctagtctctcttaccctctcacaacatctaacatctatcaaatagtaacttagatcagagatcagcaaactatggcccacaggacaaatccaacccaccacctatttttgtgtggcctgagaactaagaatgatttttactttttttttttttttttcttgagacggagtttcactcttgttgcccaggctggagtgcaacggcgtgatctcagctcaccacaacctccgccttccaggttcaagtgattctcctgcctcagcctcccgagtagctgggattacaggcgtgtgccatcacgcccagctaatttttctattttcagtagaggcagggttttacatattggccaggctggtatgaaactcctgacctcgtcatccgtccacctcggcctcccgaagtgctgggattacatgcgtgagccacagtgcccagcatgttacattttttaatgtttattttcttgtgaaaattatgtgaaattcaaatttctgtgtccataaagttttcttggaacacagtcatgcccattgtttacattttgcctaaggttttttttaaacatcttgatatataattcatataccctaaaattcacccatttaaagtgtataattcagtagtttttagtacattcagtgtgtacaaccatcaccagtcagttttagagtattttcatcacttcataaataaaaccttgtatatttcagctatcacaccctctaccccacccatttttcccagccctgaacaaccactgatctactttgtctctgtagatatgcctatcctagatttgcatatgaatggaatcatatgtgttcttttgcggctggtttctttcacatagcatagtgttttcaaggtccatccatgttgaagcacgtgctggtacttcattctattttattgccaagtaattccatagtaaggatagaccacattttgtttatccattcatcagctgatgtatatttgaactgtttctaccttctggctattatgaataatactactataaacattcacatataagtttttctcgtaaagctatgttttcatttctcttgagaagacatctgtaagttgaattgtggggttatatggtaactctgtgtttaactgtttgaggaactgccaccatgtttttctttttatcttttttgagactgggtctcactctgtcgcccagcctggagtatagcaccacaatcacagctaactgcaacctcaaaattctgggctcaaggaatcctaccaccttggcctctcaagtagctgtgactacagaggaacgctaccacacccagctaattgtcttcctttttttgagacagggtctcgctttgattaccaggctggaggtgcagtggtgcagtcatgcctcactatagcctctcccaggctcaagtgatcctcccacctcaacctcccaagtaactaagactacaggtgcaagccaccacgcctggctaatttttaaattttttgtagagaaaaggtctcactctgttgcccaggctggtctcaaaattctggcttcaagtgatcctcccaccttggtctcccaaagtgcaggaattacatgtatgacccaccatgcctggctaactagtttgcttttcaaactggctgcaccattttacggtcttaccagcagtgtaaaagggttcacatttctccacatttgttttttgtttttgtttttgttttttccagacagagtcttgctttgttgcccaggttggagtgcagtagcacaatctgagctcactgcaacctccacctcccgagttcaagtgattctcatgtctcagcctccagagtaratggcactacaagagcatgccaccacggctggctaatttttgtatttttagtagagatggggttttgctatgttggccaaggtagtcttgaactcctgtcctcaagcagtccacctgcctcagcctcccaaagtgctaggattacaggcatgagccaccacacccagcctaatttctgtatttttaatatagacagggtttcaccatgttggccagactggtctcaaactcctggcctcaagtgatccatccacctcaacatcctaaagtgctcagattactggggtgagccacctcaactggccctttgatccattttaagcttttttttgggtgggggatggagactcaccctgtcacccaggctagagtgcaatggcgtgatctcagctcacccctgggttcaagcgattctcctgcctcagcctcccaagtagctgtgattacaggtgcccgccaccatgcccagctaatttttttttttttttttagatggagtctccctctgtcgcccaggccggagtgcagtagtgcgatctcggcttactgcaagctccacctcctggattcacgccattctcctgcctcagcctcctaagtagctgggactacaggcgcccgccaccacgcccagctaattttgtttttgtatttttagtacagacagggtttcaccatgttagccaggatggtcttgatctcctgacctcgtgagccacccacctcggcctcccgaagtgctgggattacaggtgttgagccaccgcacccggcctactttttgtatttttagtagagatggggtttcaccatgttggccagcctcgtcttgaactcctgacctcatgatccacctgccttggcctcccaaagtgctgggattacaggtgtgagccaccgtgcccagccatgagttaatttttgtatgtagtgtgaggtaagggtttaatttcttcttttttttgcatgtggctatccagttgtctcagctccatttgttgaaaggactattccggccgggtgcggtggctcacacctgtaatcccagcactttgggaggctgaggcaggtggatcacgaggtcaggagttcgagactagcctggccaacatagtggaaccctatctctactaaaaatacaaaaattagccgggcgttgtgacaggcgcctgtagtccaggtactcaggaggctgaggcaggaaaatcacttgaacccaggaggcggaggttgcagtgagccaagattgcaccactgcactccagcctagatgacagagcgagactccatctcaaaaaaaaaaagaaaaaagaaaagaaaggactattccttctcacagtctgtggcatgtagcaagaaaagacaagacaagacagttctcccccactgaatggtctttgcacccttgtcaagaatcaggtgaccatgaactctcaactctattccactgggtttatttctggactctcaattctatgccactgatctacacatttatccttataccagtaccacactgtctttttatttttatttttttgaaatggaatctcgctctgtcccccaggctggagtgcaatagcacgatctcgactcactgcaacctccacctcctgggttcaagggattcttgtgcctcagccctcccaagcagcttggactacaagtgtgcacccccacgcccggttaatttttgtatttttggtagagacaagatttcgccatgttgcccaggctggtctcgaactcctgtcctcaagtgatctgcctgccttggcctcccaaagtgttgggattataggcataagccacggtgcctggtgacgttgtcttgattagttgttttatagtatgtcttgaaatcacaaagcgtgagtctttctgctttgttctttttcaagatttagctattgtgggtcccttgcgattccataggaatttatgaattgacttgtcaatttcttttttttttttgagatggagtttcgctcttgttgcccaagctggagtgcagtggcgcgtgatctcagctcaccgcaagctccgcctcccaggttcaagcgattccctgcctcagcctcccgagtacctgggattacaggtatgtgccaccacacccggctaattttgtagttttagtagagacagggtttctccatgttggccaggctggtcttgaactcctgacctcaggtgatccgcctgcctcggcctcccaaagtgctgggattacaggcatgagccactacgcctggagacttgtcaatttctacaatgaaataaactgggattctgacagggattatgtcraacgtgtagatcaatttccaaaatactgccaatttgacaacgttatgtcttatgatccatgaacaagagctattttctatttatttatttatttatatcttctttcttttaaaaatgttttacaggccaggcacggtggctcacacctgtaatcccagcactttgaggggccaacatgggaggttgcttgaggtcaggttcaagaccagcctgggtaacacagggagactctgtctctacaagaaattaaaaaacaaacaaacaaamaaaaaaagctagggatgatcgygcatgcctgtggtctgagctgcttgggaggctgatataggaggatcacttaagcctggaaggtctaggctgcactgagatatgattgcaccactgcacttgttctcacttcagtgcaagtccgagaaaaaaaaaaatcaattaattaaatattttaaaaggccaggctgggcgcactagctcacgcctgtaatcccaggactttcagaggctgaggcgggtggatcacctgaggtcaggagttcgagaccagcctggccaacatggtgaaaccccctctatactaaaaatacaaaaattagccaggcatggtggtgcacacctgtagctccagctactccggaggctgaggcaggagaatcgctttaacctgggaggcagaggttgcagtgagccgagatcgcgccaccgcattccagcctggacgacagagtgagactccgtttcaaaaaaaattaatttaaaaaacaaaaccaaaaatgttttacagcttttagagtataagttttatactttcttttactaaactgtcagaggatggaaaaaaagatacctcttttgttataagtatttttattttttaggttattgtaaatggaattttcttaatttccttttcagattgttcattccaagtggatacatttacaactragttttgtgtaatgatcttgtatcctataaccttactaaactaataatttattagttccaatactttggtagtggattcctcagggtctatatgcaagatcatgtcatctgcagagatgatcttacttgttcccttccaacatagatgtattttattgcattttcttgcctaattgccctggctagaacctccagtacaatgctgaatagcagtagtgaaagtagacttatctctctttttcctaatcttaaggataagcatacagtctttcactattttgtttgtttgtttgtttgttttgagctctgtcgcccagcctattgtgtgcagtagtgctatctcagctcactgcaacctctgcctcccaggttcaagcaatcctcccacctcagcctcccaagtagctacaattataggtatgcaccaccacacctggctaatttttttttgtatttgtagtagagacagggtttcaccatgttggccaggctgttcttgaactcctgacctcaagtgatccctccaaccttggcctcctaaagtgttaggattacaggcgtgagccactgtgcctggcctcagtctcactattatgaagttagctgtgggtttttcataactgctgtgtatcaggttgaggaactgctcttctcttcttagtttatttagtgtttttatcatgaaaaacatgctgaattttgtcaaatgctttttctgtgtctactgagatgacaaggtgatttttgttttttattctattgatataatgcattacattatttacactaattcatttttggatgttaaaccaaccttgcactcctggaataaatcctgcttgtttatggtatataattatttttatatgttactggattcagtttgctagtatttttgttgaggatttttgcttccacatttgtaagatatatttgtctatggttttcttttcttgtaatgtcttttcctggtttttggcaacagggtaataccagtctcataaaattcgtttgtaagtattttctcctctttttcatttttgaagactttgtgaagaacygtattaatttttcttgaaatgtttgatagaattcagtggtgaagttatcaggacctctagtaggtacaggcctgggctttgctttgcttttctttcttctttttttttttttttgagatggagtctcactttgtcacccaggctggagtgcagtggcgcaatctcagctcactgcaacctccaacttcccgggttcaagcgattctcctgcctcagcctctcgagtagctgggactacaggcgcactccaccatgctcggctaatttttgtatttttagtagagatggggtttcaccatattagacaggctggtcttgaactcctgacctcgtgatctgcccaccttggcttcccaaagtgctgggattacaggcatgagccactgcacccagcctcttttcttttttttaagagacagggtctcactctgtcaccctggctgaagcactgtggcacaatcatagctcactgcctcctcaacctcctgggatcaagtgatcctcacaccttaacctcctgagtagctgggactccaggctcacaccaccacgcctagctgagtttagatatagtatgtatattttagagttggggtctctctatgttgcccaggttggtctcaagctcctggcctcaaaggatcctcctgccttgacctcccaaagtgctgagattacaggcaacagccactgtgcccaggtctctctctctctctctctctctcyaattatttatttattttttaagggtatactatcctacccaaacttatatttttaaattccattagactcatattaccaagcatataaacaaatcacacataacacgaaatagaaaaaaacattaagacttcctttgcttttggaaaacaactgagaaacaacaaaattcttttcagaaatacagaaaaaaattgtttttatagtgtagctaatatgccctccttagacattaagacacttttctgtttgtacccttaatgcagccatatttttactctttataaaaatcaaggctctcaataaaaacagtatctcactcactaatcattaaattgcatcactgaaaatgtagttatacacaccaatttctaacttcttagaatactctgcacaatcaattataatcactgaaacgaataactgctcaaaaacgcagaatggcttcaactacactatgatttggtagtcaatattcctgttttccagtaaaaaggagatttcataaacaaacattgggctccttaaggtttcatcaatcaagagaatctttctgagcagcttctgagcaaatgtttcttaacaggctgatcacagatctagggtcttcactcctcaccatagcactgccagacacaatcatgttagcttcgcctctgcacacctatggacagtgtcaggatctattccaccagcgacctctatagccaaagatgggaactggatcctcaaccagtgaacctttaacatcatatcttccatgaatttatgccctccaaaccctggttccactgtcataaccaaggtcatacctagttgattagcccatggtgccaaatactgaactgaggttcctggttttatggcaaggccaaccttcatcccattctcctgaatgtctttaatcaaagcccctgggttctcagtttcctcgagatgaaagatgtactgattggctcctcttatagccattggctttacccactgttctggcttggacaccatcacatgcatgttcayccattacattccggtggagataatcgaccccagagtctagcatccagaggcactgggcccctaaattggccaggtarcattgaggatggacaggccaatcttgcagcccgatgccatactactggttcccaagggcaagttaccccacgagtcccctcaattactaatttaatatctttacttgttataggtctattcagatagtgtctcttcttgggtcaattttggtggtttatatctttctaggagtttgtccattttattgaagttatctaattacttggcattcaactgccattttacttttttttgtatgtgtttcacatcttttttttttttttcagggcagggatggagtctcgctctgtcacccaggttggagggcagtggcacgatctctgctcactacaacctccgcctcccgggttcaagcaattctcccgcctcaacctcccaagtagctggggttacaggcacccgccatcatgcccaactaaatttttgtatttttgtagagatggggtttcaccatgttggccaggctggtcttgaactcctgacctcaggtgatccacccacctcagcctcccagagtactcccaaagccactgtgcggtggctgaggcaggagaatcgcttgaaccagggaggcagaggttgcagtgagccgagattgccccactgcactccagcctaggcaacagagcgagactctgtctcaaaaagaaaaaaaaaattaacgaattctttcttcacccagttcaaatctgttattgagtcctgagtccctctagttaatttttaaatttgttattgtactttttttttttttttttttttttttgagacagagtcttgctctgttgcccaggctggtgtgcagtggctcgatcttggctcactgcaacctccgcctcccaggttcaaggaattctcctgcctcagcctcccgcgtagctgggactacaggtgccggccaccacgcctggctaatttttgtatttttagcagagacggggttttaccatgttggtcaggctggtctcgaactcccgacctcaggtgatccgcccgcctcagcctcccaaagtgctgggattacaggtgtgagccaccgcgcccagctgttattgtactttcaactccagaattttcatttgattctttttttataatttctatatctttatggatattctttaattgatgcaacagtgtcataccatcctttacttctttgtcatcatattttcctttagtattgtgaatatatatagtactgtgaatatatatataggccagtttgaagcctttttcattaatttggccccttgtctcacaggcagttgctgctgccagcttttttccagtgtatgtgtcatattttcctgtttctttgtacgtctcacaatttcttgttggaaactggacattttagataatatactgtagcaactctggggattggtaccccctctccagggccaattgttatttatttgtttagcgactggctggattatttgagtgaaatccatttcccctgaaaagtgttaaggcctatgatattgctcttcagggaggtgcagctttgggtatgctcacagtcaccctgggatgacagtggttttggtagggttctcttctattctctccttgaccacacccagctatgaagctccactaattgtggcatattgttctattattttcaacaacacactgaggcataacttgctcttactctacaaactgatrcaatcaaattgtggctgtttggaggaaagcatttttttccacctctgccacataccttacttttcaaattgttttttattgattcataatagttgtacacatgttgggggtacctgtagtatttcgatacattaatatacaatgtataatgatacaaccaggacaggagggacatccaccacctcagaggtctgtggtcaatgttttgttttgtgacaggacagagcttcactgtcacccaggctggagtgcagtggcgtgatcttggctcactgcaacttccacctcccagttcacgtgattttcctgcttcagcctcccaagtagctgggattacaagtgtatgcccccatgcccagctaatttttgtatttttagtagagatggggttcaccatattggtcaagctggtctcaaactcccgacctcagatgatctgcctgcctcagcctcccaaagtgctgggattacaggcgtgagccaccatgctgcggtcaatgtttgatccttcttctgatcctagaatggcttcttccagctgtcttattccccaattctttccagcaaaccaggaggcctacagtctaggctgcatctccattaaatccgcagatctcccagttgcctcttaccaaaaccttcacatctccagattgcccttaggcatgaatttctccacactgtgttgcaaatgaagtcactgccattggaaagagattaggagctatctgttttagggcctgcttctctcctgaggcaaaatcccggagccaaggctctggagctgtggggaaggaccctggaaagmttctctctgagaaataccctcactctaggaactgagcacttggtggaaggaggcaggggaccgcaataacctgaggctcagcctgcaagaactgggggatgagcaattggggcaccagtaatttcagtatgtcatgtccaaggtacagtcctgttccacaagtagggactaggtggaagaagggagctccaacttttcgcagggcacagtggctcacgcctataatcccaacactttgggaggccgaggcaggtggatcacctgaggtagggagttcaagaccagcctgaccaacatggagaaaccctgyctctactaaaaatacaaaattagccagacatggtggcgcaagcctgcaatccmagctacttgggaggctgatgtgggagaatcgcttgaacccgggaagcagaggctgcggtgaggcgagatcacaccattgcactccagtttgagcaacaagagcaaaactccgtctcaaaagaaaaaaaaagagagctccaactttcaattgcactcacacaggttttaacctcagcaacaagtagctctaggtaggatgagaaatgctgatgtcctgcttttcctgggaagaaagcatttgattgggagctgggggagcagtgcccggtattacagtttgcaatagtctggagtagaagctccacctcactaagctaggagtgagtaaggagggaatgatcttggttcaaataccataccctctcatctttcttaccgaatttgtagattttcttgaataggtgttttttcatttgttgtttgccctcaggaccattgccggagggtttaaatagttgattttaaaaaaagaatttttgggccaggcgtggtggctgcatctgtaatcccatcactttgggaggccaaggcgagtggattgcttgagctcaggagttcaagatcagcctgggcaacatggcaaaaccctgtctttacaaaaattagctaggtgaggctgggcggggtggctcacatctgtaatcgcaccactttcccaccactttgggaggcccaggtcggctggtcacgaggtcaggagttcgagatcagcctgcccaatatggtgaaaccctgtctctactaaaaatagaaaaattagccagacgaggtggcgcacgcctgtaatcccagctacctggaaggctgaagcaggagaatcacttgaacctggaagtggaggtggcagtgagacaagatcgcgccattgcactctagcccggtgcactctgggtgacagagcgagactccgtctcaaaaaaaaaaaaaaaaaaaaaattagccaggtgtggtggcacacgcctgtggtcccagctactcgagaggctgaggcaggaggactgattgagccagggaggttggtcagggttgcagtaagccatgatcacactactgcatgccagcctcggtgacagagtgagattctgtctcaaaacgaaacaaaacaaaaaagaattttcaccagttttacagaggaatgggttccttaagctgtcatgctggaagctgatcttatctaaggctgcttttgtgttacaatggtagagttgaagagttgaataactccaacagagattctctagtctacaaagttgaaaatatttactatgtggtcctgtacagaaaaagcatgccaacccttgcttactgctgccaatgctgctggtccacaaaccacacttttagcagcaagaacttaaattacttgagaagcagtactgtacgggctgtgagcttggttcaaaaccccaccttgccatttactagataaatgggtttgttctgaggattaaatgtgcaaatgtctagcactttgaaaatactgaacaattgatagctgttatcatcatgttggaaactatgtggaaagtaagtatgagatgttatatcgttcttcaaagggttttttttcccagaatatgcaagctttagaaaagggaaacaagtattggctttccaataaacaagacgcaacttctaatacctgggtacataacaatattacctaatgaaagaataaactttcaagcttttaagcgtaagcctaacttaagcctgacactgaaatcctgaattttctatcacaggagcatccagcttcttccaataacaatgaatgaaaataaccttcaggaaatgccaaaacccaaaagtcctatgaaaaaaagcagcaatcatctttaacatgaggttttgggcctagttggcccttccggttctgcccgtctctagctacacccataagatgatataaagagaacctctcgagcttccacctcgactgtcaccgcagcagtcggggctgccggccggttacctcgcaattgaactccatctcggcgtccatggtgacgatcctcacggtgaacgtcttgggttrcttcctcttgagagagctgaagctcatgcgggaagcgatggccccggccatggcgcggggctcaggcccgggaccctcgcgccccacggsctgcactctgagccctttagcccccctggagttgctgcacaggcctcagggccaccatggtggscggctgsccggcccgggaacggtctgggctgcgcgggtccccagcggccagcatgggccgcgaggaccctgcctgagcggaaaggggagttgggggacggkccctgacggctgcagggagggcacaggagccgggaccttcggtgcaggcgcgacccggcactccgggattcgggccggagatgccggggacgcctcgggacgggacccctagacggcagcggcccagactccgcgcgcctctcagcggccgactagggtcacggggccgcgctgcatcgggcgcgtacgcgcgcgcgtggctgtcaccgtcctcactccgcgcgcccgcgggaagcgcaccctccccacagcccggggcctgctcccggccccgccctcaggtcgcccagaccactacgcgcagcgcaaccgaaccggaggctgacgcatagatgctgcgattggctgggaaggccaaggtaggcaggactttcccgctccgtcccgcctcctttggggtgactccaccaatggaaagtttcactctaactgcaaaaaaagcaggcctaggctcggcgttgagtggctacagtggcagtcactctgaatgcttttgtgcctactctaacaagactggttgaggcggcggacctctgctgaccttaccsgggaaaccacttagaggctggatccggggcgaggggaattgggtccttcgttggcccagggagggactcttcggttcaagtaggctccgagtgtggcgccccaggggactgcgtttcggacacacggcgaatattcttctttggcagttaatcacatataccgacccctatgaaactttaaagacacttgtggaggcctgttaggtttgctggcactttcccgccagatccctctgcttccctttagaattattattattattgttattattattattattaattattattattattgggacggagtttcgctcttgttgcccaggctggagtgcagtggcgcgatctcggctcactgcaacctccgcctcccgggttcaagcgattttccggcgtcagcctcccgagtagctgggattacaggtatgcgtcaccacgcccggctaattttgtatttttattagagacggggtttctccatgttcgtcaggctggtctcgaacctcaggtgatccgcccgcctcggcctcccgaagtgctaggattacaggcgtgagccaccacgccccgcctagaattattattggttatacctacctcgtgaggttgttgaatttcagcgcactgaatacatataaggctttagagctgagcctggcatcctatgaaattgctgaatttgggttgaaaatgaaagcattctttattttatactctatgatgcccatttttgaaccgtattcatgtattatttatttagtgtcatcaagggttctaacgggtgtaggggggataattacacctttctgtacttagataataaattctattttaaaatagctcttagtagtcaaatagggacaatttactgtgttttttcgtttgttttttgttttgagacagagtttcgctcttgttgcccaggctggagtacaatggggcggtctcggctctctgcaacctccgcctcccgggttcaagcaattctcctgcctcagcctccccagtagttgggattacaggcacccgccaccacgcccggctaatttttgtatttttagtagggacggggtttcaccatgttagccaggctggtctcaaacttctgacctcaggtgatctgcccaccttggcctcccaaagtgctgggattacaggcgtgagccaccgcgcccggtgtactgagttttaacaacaataatcaccccataaatgttagctaacattagcatcacccccccaactccacaggtgaagatactgagagatatgatagagccactcgctgactataatgcagatagtgaaaggcaaagctaggactcaaacccaggtctgtcccacccagagcctgctggttagcactgtgctgccctgcttccaaattctccctactacagcctcaggaaatgtgaattacagttccggagtactcagcagacattgttgctgtaacggtatattaatggaataaatctagttcttctgcacggacccctgctgtgcctggtagcaccggccaggcctcaggaatgatttgctgccacacccagtgaggctgctgtggggactttatgtcctgccttctgctagcaaattctccccaccaaaactgattgctcagggcagtatgggcttggcatgggagtgtcttcattatcrttgcttcatttcttccccgcaggtgggagaaccgggctgggttttctgggctccccacagggacaacaaatggctgctgataaaaatacgtgacaccgggccgggcccagtggctcacgcctgtaatcccagcactttgggaggcaggcagatcacaaggtcaggagatcgagaccatcctggctaacacggtgaaaccctgtctctactaaaaatacaaaaaattagccgggcgtggtggcgggcgcctgtagtcccagctactcgggaggcggaggcaggagaatgacgtgaacccgggaggcggagcttgcagtgagccgagatggcgccactgcactccagcctgggcgagagtgcgagactccgtctcaaaaaaaaaggaaaaagaaaatgcgtgacactgggaacccagtgaggagtagcaaaaggaggtggatcagctagcagggactaaaaagcgacactgatgattggtaatagctcatttttatgaaaagacttgccaggtgctaggcactgggctaattggccccaaatgccaaatttaatgttcctgggargacatccagctggacatatgggtttgaatcccagaagggaggtcagggccaggaataaaaatcgatgtgatagaatmttwtgctggtattaaaagtgccattcacaggytggacacagtggcttacacctgtaatcacagcactttggaagaccaaggttggaggatcacatgaggccaggagttcgagaccatcctgggcagcatagtaagaccccatctctacaaaaaaaagtaaaaatttagccagtgtgtgccaggtgtggtggctcacacctgtaatcccagcactttgggaggcggaggcaggtggatcacttgagatcaggagttcaaggctagcctggccaacatggtgaaaccccgtctctacaaaaatacaaaaaaaattagccgggcgtggtggcgcacgcctgtaatcccagctactccagaggctgagagaggaaaatcgcttgaacccaggaggcagaggttgcagtgagctgagaccatgccattgcactccagcctaggtgacagaacaagacttcatctcaaaaaaaaagaaaaaaaaattagcctgtgtggtggagtgtgcctgcagtctcagctactcagtggggctgaggcgggatggtcacaccagaccaggagttggagtccacatgagccatgatggtgttattgcataccagcctgggtgacagagtgagacccccagctccccaaaaaatgccattcataaagaataaatacgggccgggcgcggtggctcacgcctgtaatcccagcactttgggaggcagaggcgggcggatcatgaggtcaggagatcgagaccatcctggctaacacagtgaaaccccgcctctactaaaaatacaaaaaattagccgggcgtggtggcgggcgcctgtagtcccagctactcgggaggctgaggcaggagaatggcgtgaacccgggaggtggagcttgcagtgagccgagatcgcgccactgcactccagcctgggcaacagagcgagactccgtctcaaaaaaaaaaaawaaaaaaaagaataaatacggccaggcacagtggctcacacttctaatcccagcaatttgggaggccgaggtgggtggatcacctgaggtcaggagttcaagaccagcctggacaacatggtgaaactcccgtctctactaaaaatacaaaaacttagcctggcttggtgctgggtgcctgtaatcccagctagtcgggaggctgaggcaggagaatctcttaaacccaggaagcagaggttgcagtgagccgagatcgcrtcattgcactctagcctgggcaacaagagtgaaaatccatctcaaaacaaaaaataataataaataaataaacacagatgataattatatgcaccagataagggtctgagggggaattcagatagagcttattatgatctggcacacagaccccagttaataaatatctgttgaatgaatgagtgacggtcataaagaaatacttacggtgtcaactatggtctggacaatattagtagctaccatattttaaatgcttaccatatacagcactctgcaaagtgctttgcatgctttgtttatcttgatcttcttttttttttttttgacatggagtcttgcactgtagcccaagctatggtgcagtggcacgatctcggctcactgcaacctctgcctctggggcccaagcaattctcctgcctcagcctccagagtaggtgggactacaggtgcgccaccacgcccagataattttttgtattttagtagagacggggtttcaccatgttgcccaggctggtctggaactcctgacctcaggtgatccacccgcctcagcttcccaaagtgctgggattacagacatgagccaccgcgcccagactattttgacctttttcaaaaccacatttggtaggtgtaatatcctcagtttatatctgaggaaactgaataaggctgaaaagaggtaatttacccacagccatgattggtagagctgcaatttgcatctaggagtggtttcatccatatctctcctgatttacactttgctcttccagatcagtgtttctcagatagtggtccctgccctacaggggacatttggcaatgtctggagacttttttggttgtcacaactgggggatgttcctggcctctaagggtaaaagccaatgatggcgttcaacattccacaatgcgcaggacaactccccacaataaagaattatccaggtcaaagtgtcaatagtgccaagataaagaaactgtgctctagagcagagatttttgtttgtttctgagacaaggtctcgctctgtcgcccaggctgcagtgcagtggcaagatcatggctcagcctagaccttcactggatcaagtgatccctccgcctcagcctcccgcgtagctgggactgagaggtgaggtcatgctggcagccctcgcagccytcgctcgctctcggtgcctcctcggccttggcacccactctggccgcgcttgaggagcccttcagcccgccgctgcactgtgggagyccctttctgggctggccacggccggaaccggctccctcagcttgcggggaggtgtagaggsagaggcacgggcargaactggggctgcgcgcggcgcttgcgggccagcgcgaattgcgggtgggcgtgggctcagcgggccccgcacttagagcggccggcccgccggcaagccccgggcagtgaggggcttagcacctgggccascagctgctgtgctcgatttctcgccggtcttagctgccyctccgcggagaagggcttgggacctgcagcccgccatgcctgaacctctctgccaccgccgtgggctcctgcgcagccggagcctccccgacgagcgccgctccctgctccagggcgcccagtcccatcgaccgtccgacggctgaggagtgcaggcgcatggcgggggactggcaggcagccccatctgcggccacggtgcagaatccactgggtgaagccagctgggctcctgagtctggtggggacttggagaacctttatgtctagccaagggattgtaaatacaccaatcagcactctgtatctagctcaaggtttgtaagcacaccaatcagcactctgtgtccagctcagggtttgtgaatgcaccactccatactctgttatctagctagtctggtggggacttggagaatctttatgtctagctaaggggaatgcacaaatcggcactctgtatctagctcaaggtttgtaaatgcaccaatcatccctctatgtctagctcagggtttgtaaatacaccaatagacactctgtatctagctaatctagtggggaggtggagaactttcgtgtctagctcagggattgtaaacgcaccaatcagcaccctgtcaaaatggaccaatcagctctctgtaaaacagaccaatcggctgtctgtaaaatggaccaatcagcaggatgtgggtggggccagataagaaaataaaagcaggctgccggtgctagcagtgataacctgtgcagcttgtttcatatattgtgggagytttgtttgtttgctccttgtttgggtccacagtgcttttatgagctgtaatattacctgcaaaggtctgcagcttaagtcctgaagccagcgagactacgaacccaccgggagaaaggaacaactccagaagcgccgccttaagagctgtaasagtcactgcggaagtgtggagtttcacttctgagccggtgaccatgaacccaccagaaggaagaaacgcggaacacatcagaacattagaaggaacaaactttggacacgtcgcctttaagaactgtgacactcaacatgagggtcctcggcttcattcttgaagtcagtgagactgagaacccaccaatcccggacacaggactacaggcatgcaccgtcacgcaacgttaattttttttttttggtagagacagttttgtgatgttgcccaggctggtctccggggttcaagccatttttctgtctcagcctcccaaagtgstggaattacagatgcgagccactgtgcttggcctgtatgttactttaagccactaaatgtatagcaatttattgcacagcaatagaaagcagccagaaagaaaaacattttttggtaaagaaatgggaactcactctcacccaagctggagtgctgctgtgacacgatcatagctaattgtggctctgagttyctagggtcaagagatccttgcacctcagcctcccaattagcgggggctaaaggcaccaccatgccatgctaatttttaaaaaattttttgtagagacaaggatcttgctatgttgcccaggctggtctcaaactcctggcctcaagcgatcctcccagcttggcattcgaaagtgctggggttacaggtatgagtcacccagctcacctcgcccgaccaagaaaaacaactgttggggctgagcgcagtggytcactcctgtaatcccagtattttgagaggcggaggcgggtggatcaccagatcgggagtttgagagcagcctgaccaacatggtgagaacctgtgtcttaaaaaaatacaaaagttagctgagcgcagtggtgcgtgcttatagtcccagctactggggtggctgaggcaggagaatcgcttgaacccaggaagcagaagttgcagtgagctgagatcgcgccactgcaccccagcctggatgacagagcgagattccgtctcaaaaaaaaaaaaaaaatttaactcgcataatccactgacccactgctatcgcatactacttattgttttatgatttgttwattttattttttttgagacggagtctyagctgggctggagtgcagtggcgcaatcttggctcactgcaacctcctcctcctgggttcaagcagttctctgcctcagyctcccgagtagctgagattataggtgcccgccaccacgcccggctaatttttgtgttttagtagagacggggtttcaccatcttggcctggttggtcttgaactcaggaccttgtgattcacccacctyggcctcccaaagtgctgggattacaggcgtgagccaccacgcctggccatttgttaatttttcattcattaatatcctcacccgtcactaaatattttataatataattttctaagaaatgtacaggactttatgtatggatgtaaattttaagtttttttctcttacacacattgtaactcaagtaatcaagtttccttcctgctggtaagaagctcagagccaaattgtatgtctgcctctggcaattgtacttgaccttgccttatttttggctttattttattcttgctgctcttgcttactttacagtgaatttttccctacccacttactatttaattgttgcactagctgtatttctttttacacagttatagatctcttatttaaggttttgttattgtttattcttcttgggacaagaccttacataacaaatttgttttttgagatggagtcttggtctgtcacccaggctggagtgcagtggcgcgatctcggctcactgcaacctccgcctcccaggttcaagcaattctgtctcagcctccagagtagctgggattacaggtgcctgccaccacgcatggctaatttttgtatttttagtagagacaggatttcaccatgttgaccaggctagtctcgaactcctgacctcaagtgatccgcctgcttcggcctcccaaagtgctgggattacaggcgtgagctaccgcgccccaccaacaaagtattttttaatgtgtataatttataagctttttattttgacctaatattggacttaaaacctgcaaaaatagtagagtttctctatatccttcacttagcatcctctaatgttaacattttagttaatcgtaatacaatgatcaaaatcaagaaattaacattgaggcctggtgcctggctcatgcctgtaactcttaacactttgggaggtcaaggtgggtggattgcctgaactcaggagttgatgaagagcctggccaatgtgacaaaacctcatctctactaaaaatataaattagctgggcatggcggtgcatggatgtagtctcagctactcactgccagctccacctccctggattcaaggattcttgtgcctcagccctcccttgtagctgggactacaggcgtgtgccaccacacccagctaatttttgtattttcagtagagaagggttttgccatgttgctcaatgtggtcttgaactcctgggctcaattaatccacctgcctcggcctcccaaagtgttgggattacaggcatgagtcaccgtgtccggccagccttgacactttttaaagagtatgtatgggctgggcgcagtggctcatgcctgtaatcccagcactctggggggctgaggcaggtggatcacctgaggtcaggagtttgacaccagcctggccaatgtggtgaaaccctgtctgtactgacaatacaaaaaattagctgggtgtggtggtggacgcctgtaattccagctactcgggacgctgaggcaggagaatctcttgaacccaggaggaggaggttgcagtgagtcaacatcgtgcaactgcactccaacctgggtgacagagcgaaattccatctcaaaaaaaaaaaaaaaagtatcgatagaatatatttctcaaaggtctgtctcgttggtttgtcttacatttgcttagaattggactgatgttctagatgcatttttgtaagctgcaccagctgagatagcaataagcaaactaagaggttcttgcctatcttgcagtctgaggctcagtgaggtaacccgactcattaaacatcacctgacccagatgaccttgcatggtcagaggctcagccaaggcaccacactggggtactgaagctgaatgaaagcaggctgcaggtaataactcctatctggacctagaacacttttggaaataagtagtactcctcgtgtcctctgttctcttcaggccagattgcagagatttgaatttctctaggatgtcagttgatggtggaggcagacaggcctgaggtagaatttctatttctctgtgaccttgggcaatttaacttctctgagtttcagttacccygtttgtaaaaatggtaatactgtaataataaatgctatgacaagtttaaaacccctcgtaaaccataattaatatttatcggccgggcgcggtggctcatgcctgtaatcccagcattttgggagactggggtggatcacctcaggtcgggagttcaagaccagcctgaccaacatggagaaaccccgtctctattaaaaacacaaaattagccgggcgtggtggcatgtgcctgtaatcccagctactagggaggctgaggcaggaaaatctcttgaacctgggagtcagaggttgcagtgagccgagatcacaccattgcactccagcctgggcaacgagygaaactccgtctaaaaaaaaaaaaaaaaaaattatcaagcacctcctatgtccaaggtgctgtgttacctcaaaaagattttttaccatttcctggccttcgttccatcatcacttaaaaaggagagaataagaaatgggggcaaggcacagtggctcccctgtaatcccagcactttgggaggccaaggagggaggattacttgagcccagcagtttgagacgagcctgggcaatatggcaaaaccccgtctctactaaaaatataaaaaattaggccagacgcagtggcacacacctgtaatcccagcactttgggaggctgagccaggtggattacctgaggtcaggagttcaagaccagcctgaccaacatggtgaaaccccgtctttactaaatacaaaaaaattagccaggtgtggtggctcatgcctgtaatctgagctacttgggagrttgaatcacttgtacctgggaggctgaggttgcagtgagctgaggttgcgctattgcactccagcctgggcaataagagcaaaactccatctcaacaacaacaacagccgggcgcggtggctcacgcctgtaatcccagcactttgggaggcccaggcgggtggatcacgaggtcaggagatcaagaccatcctggctaacacagtgaaaccccgtctctactaaaaatacaaaaaattagccgggcgaggtggcagacgcctgtagtcccagctactcgggaggctgaggcaggagaatggcgtaaaccccggggggcagagcctgcagtgagccgagatcgcgccactgcactccagcctgggcgacagagcgagactctggcacaaaaacaacaacaacaacaacaacaaaattagctggacatggtggtgcgagcctgcagtcccagctactctgaaggctgacatgggaggatcgcttgagcccaagaagtccaggctgcagtgagctgagattgcaccactacacttcagcctgggcaatgggagtgagatcttgtctcgaaaaaaaataataattattttatttttttgagatggagtctcattttgtcacccaggctggagtgcagtggcatgatctcggcttgctgcaacctctgcctcctggtttgaagtgattctcctgcctcagcctcccaagtagctgggactacaagcgtgcaccaccacgccyrgctaattttgtatttttagtagacacyggatttcaccrtgttggccaggatggtctcaaactcctgacctcaagtgatctgcctgcctccacctcccaaagtgctgggattacaggcatgagctaccctgcccacccaaaagaaataaaaataattttaaaaaagaaatggaggccaggcatggtggcacatgcctgtaatcccagctacttaggaggctgaggcaggggaatcgtttgaacccacgaggcagaggttgcagtgagccgagaccgcgccatcgcactccagcctgggcaacagagtgagactccatctcaaaaaaaaaaaaaaaaaaaaagaaatggaatttcaaatagtaaatccatcctaaaagcacaaatttattgaattgttactgaatgctctttttttttttttcttgagacggagtttcgctcttgttgctcaggctgaagtgcagtggcacgatctcaggtcactgcaacccgccttctgggttcaagcgattctcctgcctcagcctcccaagtagctgggattacaggcatgcaccaccatgcctggctaattttgtatttttagtagagacggggtttttccacgttggtcaggctggtctcgaactcccagcctcaggtgatccttctgccttggcctcccaaagtgctgggattataggcatgagccaccacgcccggcaatttttgcatttttgtagagataagagttttgccatgttgcccaggctggtcttgaactcttgggttcaaatgatctgcccacctcggcctcctacagagctaagattacaggtgtgagccattgcacccagtctaaatgtcccctgttcacaaggacattagtcatactggattagggctcaccctaatgacctaattttaattttattacttctttcaagaccctatttccaaataaggtcacattccgaggtactaggggttaggacttcaacatctctttttgaggaaacacaattcaacccatagctccctgcttgcaggagtggactcaagtggccatatttatgctggggaggaccaggaatgtcatatttatttgkttgtttgttttttgagacagagtctagctctgtcacccaggctggagtgcagtggcaccatctcggctcgctgcaacctccacctcccaggttcaagtgctgcttctgcctcagcctcccaagtagctgggattacaggcatgggccaccaagtctgggtaatatttgtatttttagtagagaccgggtttcaccacgttgtccaggctggtctcaaactcctaacctcaggtgatccacccacctcagcctcccaaagtgttgggatcataggcgtgagccaccactcctggccagcctccctcatttaaatgtcatattttacaagaaggatgccatgctgtaaacttaacatgattcaaaactttgtgttccaagaatacgagtaggagatgaaatgcactcacataactcataaatctgcacaaccatctgaccacatttttgcttttgatsctgctttgtatctttgcagcattatctgtacctgcgggcagtctcctaaattaacagcaccacctgtcatggaggtggtttggtcttcttcatggtgtctcatcatgtccaatatccactccaaaggtgttgatttgaggacatgcttttcagcactagcccctctccttcaggaatgcttgaatgatgttgttgtatcctttttcttatttgtttgtttttgttttttctgagatagagtcttgctctgtcacccaggctggagtgcagtggcacaatctcagctcattgcaacctccatctcctggattcaagcaattctcctgcctcagcctcctgagtagctaggattacaggcatgtgccaccacacccagctaatttttgtatttttagtagagaccaggtttcaccatgttggccaggctggtctcgaactcctgaccttgtgatccgcctctcttggcctcccaaagtgctgggattacaggcatgagccaccgcgcccagtcttgttatagccttttaaagtggtttataataacagtgtctggccaaataatagcacaaaaaaacaattgctagtgtcccaagcacgtcaacaaccgtgtgatttgctcagtaatgacaggatgtgggcatttgcttccttgctaaagtggcgccaccttgtggcaatagcataaacacagtttataatccactccaccagctttgaaattgttctatacttaacaggttaattttttcccctagcatttgtattatttataatctatacgcggagtggaactttttgttctttttttttttttttttttgagacggagtctcgctctgtcgcccaggccagactgcggactgcagtggcgcaatctcggctcactgcaagctccgcttcccgggttcacgccattctcctgcctcagcctcccgagtagctgggactacaggcgcccgccaccgcgcccggctaattttttgtatttttagtcgagatggggtttcactttgttagccaggatggtctcgatctcctgacctcatgatccacccgcctcggcctcccaaagtgctgggattacaggcgtgagccaccgcgcccggcctttgttcattttttttttgagtcagagtctcgctctgttgcccaggctggagtacagtggcatgatctcggctcactgcaacctctgcctccatctcggctcactgcaacctctgcctcctgggttcaagcgattctcctgcctcagcctcctgagtagctgggattacgggcgcacaccaccacacctggctaatttttgtatttttagtagagatggagtttcaccatgttagtcaggctggtcttgaactgctgacctcaagtgatccacctgccttagcctcccaaagtgctgggattacaggcgtgagccacctcgcctggcctgttaatgtttttatgtggcactctgtcaaaggcacatgattcatatctgtatatgatgcatagtccagaaaggctgggacttagctctgtggctcttgccccaggtgagacataaaagctttcttgtccctttccctcctgtttggggtcccataagaactgaagggtacagttctcagacagcagttgggtctgagcataaaagcccattaataaggagcaggtgacactgccacagctgggtaatttgtctctttgctcgtctgcagcccatttggtgatgatctatttgtcygagggaatggatgatggcaggtttgtcaatattttacacttatgaacctgcctgttcttctctgcctggctctgcccaactgtctttgtccctggctcctctcatttcgttttgcagattggataacggacttcggcaaagagttatgaaggtggattccatgagggcagctttgggaagggaagagggcaggagaggaggggtcggctctctgcagggagaggaggggtgggtgggagacatgttcaggagaaaaagatgtcacagacatagtggtgggcagaaaggaacttcagagagagagagatcctaggacagaggacagtggggactctggggaggccttgtagaagacagcttgaagaactgagtccaaccctaataattaagttgggcctagtacaaaagctaattgtgctagccagcctccaggatgtcccacgtgactctcgcatgttgatatttacacctattggttagacatgcagccctgctcacgtattgatatttatattctgagcatggatggcgcatgcctgcagtcctagtgactcaggaggctgagtcagggggactgcttgagcccaggagttggagacttcagtgagctatgattgtgccactgcactccagcctgggcaacagaacaagaccctgactcctgcagaggagggctccatgtccaaccaatgggatgtacaaaaacgacagtgtgacttccaaggtcagatcacaaaagtccttgaaggtttcaccttactggatcacttgctctgggggaagccagccgccatgtggtgaagacactcaagcagccctctggagaagcccatgtagcaaggaactgaggtctcctgccaactaccagcgctaacttgccaggcatgtgaatgactcaccgtggaaggggattctccagccttggtcaagtcttcagatgactactaacccaagccaatatcttgattacagccttgtgagacccccagagaaggaaccgccccagctaaccacccactccagaattcctgaccctcaggaactgtgtgagatcataaatgctgattgtttcaagctgctaagatttggggtaatttattccatagtaattggaaattgtctaaatctctatttgtggaatttttctttttttcttttttttttttttaaagacaagatctccctctgttgcccaggctggagtggcatggcatgatcatggctcactgaagccttgacttcttgggcttaggcaatactctggcctcagcctcccgagtagctgggactacaggcacacaccaccagctaatattttaaaattatttttatagagatggggtcttcctawgttacccaggctggtcttaaactctggcctcaagtgatcctcctgcctcagcttcccaaagtgctgggattataggtgtgagctactgtgctcagccacatttttactggtggaattttttttttttttttttktttggagacagggtctgactctgtcacccaggctggagtgcagtgatatgatattggcttactgcaacctccgcctcctggattcaagccatcctcccacctcagcctcctgaattgctgggactacaggtgtgcaccaccacacccagttaatgtttgcattttttgtagagatggggttttgtcatgttgcccaggttggtctcgaactcctgagctcaaagctatctgcccacctcggcctcccaaagtgggattacaggcatgagctatcccacccggcctattgatggaattttatcctaactggtttgctgaccagaatacagcaactggtttgctacacagaatgaatggtctgtgggtaaggacagttcacatcaggtgcccagttaaccagcattgtatgtcactgagtgccacaaagagagcccagttccaccctcactctttttttttctttttcttttttttttttttttgagatggagttttgctcttgttgcccaggccggagtgcaatagcgcactctgggctcaccacaacctccgcctcccaggttcaagcgattctcctgcctcagcttctcgagtagctgggattacaggcacgtgccaccatgcccagctaattttgtagttttagtagagacrgggtttctccacattggtcaggctagtctcgaactcctgacctcaggtgatctgcccaccttggcctcccaaagtgctggaattacaggcgtgagccaccgtgcccggcataccccttttcttttagagtgaacgtcttgttctgttgttcaggctggagtgcagtggcatgaccatagctcactgcagcctccaactcctgggctcaagcagtgctcccacctcagcctcctgaatagctgggactacaggcacacattaccatacccagttcatttttaaaaatttttagtagagacaagggtctcactatgttgcccaggttggtcttgaaatcctggcctcaagtaatcctcctgcctgggcctcccagtgtgctgcgattacatgtgtgagccactgagcttggaccccatccctgctctctttcttcctttccttttccttttcctttcctttctgtctttctttcttttgtttttttgttttgttttgtttttttgacacggagtcttgctgtgttgcccaggctggagtgtagtggcatgatcttggctcattgcaacctccacctcctaggttcaactgattatcctgcctcagcctcccgagtagctgggaccacaggcacctgccaccacacccggctaatttttgtatttttggtagagatgaggtttcaccacattggccaggctggccttgaactcctgacctcaggtgatccacccacctcggcctcccaaagtgctgggattacaggcgtgagctacctcgcccagaccccagctccctttcaaggagggtaaatagggccaggcacggtggctcacgcctgtaatcccagcactttgggaggccaaggcgggcggatcacgaggtcaggagatcgagaccatcctggctaacacagtgaaaccccgtctctactaaaaatacaaaaaaaaattagctgggcgtggtggtgggcacctgtagtcccagctagacgggaggctgaggtaggagaatggcctgaacctgggaggcagagcttgcagtgagccgagattgcgccactacactccagcctgggcaacagagcgagactccatctcaaaaaaaaaaaaaaaaaaaaaaaaaaggagggtaaatagatttagttaagcaaggaaaagattctgggatggagtgggtatatctcctggggagagaactagggccgtaattggggtgaccaaaggttctggcttgtccaggactgaggggttttctgggatggaggactttcagtgctaaaactgagaaagtccaggataaactgggatatgtggttgccctagctgaggtgggagtaggggccttgaggttgcccttctagtcagcggccacactgtggttcatgtgggttggggagggatgcccatatcccatctctcccaggcaggggtggaagcatgctcccagcaccaccttttttcaccctcctgccctatttggctggacagagatggaaaacccttcttagaaatgctaagacccacaggaggaggctgcaggtcagtcctcyctcattctcctcacctgggaggcagtgtgaggcagccaggaatgccaaggctttggtgagagcctctcaccctaaaccascaaggccggctcctccctgtccttgggtccagcttgctgtggcctgactgccaaatgccctctaccacatagccaacgtgctgctactcggcctctgttgacacaattcratgacatgccaccaaggcagcccattccattgttagaaaattattccagccaggtgcggtggctcacacttgtaattccagcactttgggaggctgaggtgggtggatcatttgaggtcaggagttcaagaccggcctggccaatgtggtgaaatcccatctctactaaaaatacaaaaattagctggatgtggtaatgcaagcctgtaatcccagctatgcgggaggctaaagcaggataatcgcttgagcctaggaggtggaggttgcagtgagctgagatcacgccattgcactccagcctgggcgacagagtgagaccctgtctcaaaaaaaaaaaaaaaaaaaagagaaacaaaattattcctgtactgaatgagaggctgccatcacataatctccacccattcattatattcaactgtgctttcttcctggaagagccctcaacacacacccctcatttttttttttttttttttttttttgagacagagtattgctgtcacccaggctggagtgcagtggcacaatctccactcactgcaacctctgcctcctgggatcaagccattctcatacttcagcctccagagtagctgggaccacaggtgtggctaccatgactggctaactttttgtatttttaatagagatcgggttttgccatgttggccagactggtctcaaactcttggccttaattgatccacctgcctcggcctcccaaagtgctgggattacaggcgtgagccaccgcgcctggcctctggcagccccttcacatactgagtacacattgcttcctctgagtttccgctggtccttccctctctcctggcagactcctactcatcctttgaagctcaggtccaaagtcaggttggcggaggtggtcacttccaccactccacagtcagtctgccacgctgggttcctaaggaaagagctgctcccaccacatgacaccatttgctgtgcttccatcaacccacctgggtttttcctgagtggctttgactggggactctgctaagatcatactgactttgatttttttttttttttcgagatggaatctcyatcacccaggctggagtgcagtggcgcgatcttggctcactgcaacctctgcctcctgggtttaagccatgttcctgactcagtctccggagtagctggggttacaggtgtgcgtcaccatgccatgcctggctaatttttgtatttttattttttattttatttatttgtttgttttgttgagacggagtttcgctcttgtttcccaggctggagtgcaatggcgcgatcttggctcactaaaayctctgcctcctgggttcaagtgattctcctgcctcagcctcctgagtagctgggattgcaggcacatgccaccacatccggctaatttttatatttttagtagagatggggtttcatcatattgatcaggctggtctcgaacccctgacctcaggtgattcccctgccttggcctcccaaactgctgggattacaggcatgagccactgcgcccggcctaatttttgtatttttagtagagatggggtttcaccatgttggccaggctggtctcgaactcctgacctcaggtgatccacccaccttggcttcccaaagtgctggatttactggcatgagccaccgcacccagcctgatttatttatttaattaaaaaatcataactcactacagcctggacctcctacctcaagtgattttcctgcctcagcctcctgagtagctgggactacaggtgtgtgctaccatgctcagctaattttttgaattttcatagatcctcctgccttggcctcccaaagtgctgggattacaggcatgagccaccacacgtggtcctaatcttaaaattattattatttttttatagagactgggtcttgctctgttgcccaggctggagcgcagtggtgcaatcatggcctggcctccactccccccatgccaagcataacaggaggcaaccactagtcagtgggtggacattcttttggggagctgtccctgcccctttggaagtggataaagcccctgccccctgtggggtctgcaggctctccacccctgccaatgtctgtgatctgggggattgtgggctgagaagggattagtttagagggcgggcaaaagagctgggcagggcagaaagaggccccaggattttcaggcagagaagtcaaagggggatgaaaaggggaaaggagatggtggagataaagtgtctgcagctgacagccttgcccctgtcttcacttgtaaggaagtttgtttctttgatggtgataaacctggcatgtgaatgcctttccccagagaatgcaccacagaggagcacgtaacgttgtatacaatttcagggggcttactgatgcaacccctttgcagaaattttaacagtgagaaaattatgacagtgaaagtgatctgacctaaccgactccattttgcttctaacccccaaactgtccatattcattcctgggcataggccaaacttacagtctttttgtttgttttttgagacggagtttcgctcttgttgcccaggctggagtgcagtggcgcgatctcggctcactgcaacctctgcctccagggttcaagagattctcctgcctcagcctcccgagtaactgggattacaggtgcccgccaccatgcctggctaatttttttgtatttttagtagagacggggtttcaccctgttggccaggctggtcttgaactcttgacctaaacttctgatccacctttgcctcccaaaatgctgggattacaggcatgagccaccatgcccggcagcaaatttatagttcaactttgaaacaaagataacagccctctcccaaaataaacccctttcttgcctggggaccagactgcttttgtaagactaacaaattagccacgagattagaaattacggtttaggagtcatgcaggtagtggccacagattctaaacctccccagttgctcctagggataacatcactactgtaaaacctaagattggtgctcaagatatttttccgatcctgcactcaatggatccgcwggcgatacacagattaagaaaccggatcatccggttttgtggcccccacccagagatccactcagcacaagaggacggcttccactccctatgattgcatctccgacctgaccaatcagcactctccactctctggcccctacccaccaaattatccttaataaaacccagtctccgaattttcagggagactgatttgagtaataataaaactccggtctcccattcagccggctctgcatgaattaaactcttattgcaattcctctgtcttgataaatccgctgtctgggaaacgggcaaaatgaacccatggggtggttacactgaccctctgctgcacatcccggacagccttgttaagaacccttggtaggctgggcatggtggctcacgcctgtaatcccagcactttgggagcackaggcaggcagatcacgaggtcagragatcgagaccatcctggctaacacggtgaaaccccgtttctactaaaaatacaaaaaattagctgggcgtggtggcagacgcctgtagttccagctactcgggaggctgaggcaggagaatggcgtgaacccaggaggcggagcttgcagtgggccgagatcgcgccactgcgctccagcctgggcgacagagcgagactccgtctcaaaaaaaaaaaaaaaaaaaaaaagaanccttggtattattgttccacgctcccattttaccgaggtggatcctgaggcccagagtgggcaaagggcttgccaaggtcgcagagcgcgcagaggattagaaccctgacttcygtccagcacctgcggagttggagacgcccacaggaaacgcccacctgaccgggtgagtgagggggcgggcgagccggaggggtggagtttattcgcgccccgcctccgccaccagggcttgggggcggggccttcctgcaacctttgcggctccaacatggctccgcggctgtgcagcatctctgtgacggcgcggcggctgctggggggcccggggcctcgcgctggggacgttgcgtctgcagctgcggcgcggtgagagcccggccaggcagggatagacgcgcgcggggtggggtgcaggcgcgggggccagggactgggtcgtgggggaggggctgagactcctcgcttggaatctgggggttagaggcggggcaggatcaaggcctagggaggggtctgggcaaagaatgggggaggtgagaaagggatgggtagggtctttgtcctggttgggaccgggctgtgatggggacctgatgaaagatggtgagaagggcaggtactgggccctggagagtgggagagggcagaagacaggaggagtggcccattcccaggcgtagcttgtgatttaacacccactgggggcttctggtagtcagctcctccgtcgggaagttctgtgggaaagagatgatggcaggggagcagtgggggatccccaggggccatggctgcacagaccctttgttcctccacctcgaactgtacaggtggggaaacggacctgagagggaatgggagttgtccaaggtcaccctccctgctgtgccgtggcagcaccaggtctgggacccaggcctgccaatgcgccatgcactttgcacccaactggtggcctcctgggagtgggagtctggctgggccatgtgctctcagcctgggcttttgtttgggccctgctctgggctgagctagggcttggcctccctgactggccctgggcagcccctcactccttggtccccacagccctgtacttcccccatctctgcatatatgaccctgcacagttatgacttggtgcttgtctgtctctctcactagaccatgatctcatttttctctgtttccccagcctcccaccctcagagggctcaggactgtgtatggtcaaggaatatttaccaaagaagtgaggccacctgttccccctcccccaacctgtgaaaaggaagcaaccatccctcctgccctgcagcccaggaatgaagctgcaaagttctgatagtgcctgccatgagatgttacagcacagagcagtggggcttttggacagctgggaaagaggagtggcataagcgccccacctagactgcccaataattagggataaagctgacaccgtgggaaaagcctagagtttgcctggcactaacagatctaactcagactttgtaggtggggtgacctcaggactctttaagcctcgggttcctcatctgtaaaatgggagtaatcaggatgtatctcatagggttgttgaggattaaagatgctgtggttggtcgggtatggtggctcatgcctgtaatcccagcactttgggaggccgaggcaggcagatcacttgaggtcagcagttcaagaccagcttggcaacacggcgagatcctgtctctataaaaagtacaaaaatggccgggcgcggtggctcacgcctgtaatcccagcactttgggaggccgaggcggtggatcacgaggtcaggagatcgagaccatcctggctaacacggtgaaaccccatctctactaaaaatacaaaaaattagccgggcgcggtggcaggcgcctgtagtcccagctactcaggaggctgaggcaggagaatggcgtgaacccaggaggcggagcttgcagtgagccgagatcctgccactgcactccagcctgggcgacaagagtgagactctgtctcaaaaaaaaaaaaaaaaaaaaaaagtacaaaaatttcaccatgttggtgaaaacgtgtctctactaaaaatacaattagctgggtgtgatggctcacccctgtaatcccagctactaggaagctgaggcaggagaatcaattgaacccgggagacagaggttgcagtgagccgagatcacgctactgcactccaacctgggtgacagagcgagactccgtctacaaaaaaaaaagattccgtggttgtgaagtgtctagcacttgacgaacatgcagtaagtgttgctccttaacccctagcctatgtttcaagcaatttctgcatgtgacccacataatgttgaggctcaaagggctctgggaagatcatcttttatgagccctttgttttccagataaaaatatcaagattggggaagggayagaatggattggtggtaaaaccatttgtgtggcaaacacccagaggcygtaaaaggagcatgggtctcagagtcagcctgctgcccctcactcagtgaccctggatgagttgctgaacctccgtcagcctcagtttccttttctgtaaagtggggatgttggtgttttcggcaggattgctatgaagccacttgaattaatgtttatcaagtccctcaaggactgtcttgcagttacttataccttaattccacattggatacctgagaacactctgtcctgctgcccctcaggctgccccatatctctccagagtcactagtagggccagcagcagcccttctggcctgtgaggtttgggggcaatgaggctgctggggtggggatggagtgtgggctttgaaatcagatggacctgggccaggcaccattgctcacgcctgtaatcccaacacttcggtaggccaaggtgggaggattgcttgaacccaggagtttgagaccagcctgggcaacatggcgagatcctgtctctataaaaaatacaaaaatttggccaggcacagtgggtcatgcctgtaatcccagcactttaggaggctgaggcgggtggatcacctgaggccaggagttcaagaccagcttggccaacatggtgaaaccccatctctactaaaaacacaaaaattagccaggccaggcctggtgactcccacctgtaatcctagcactttgggaggcccaggcaggcggatcatgaggtcaggtattcaagaccagcctggccaacatggtgaaaccccgtctttattaaaaatacaaaaattagctgggcatggtgtgtgcgcctgtaatcccagctactctggaggctgaggcaggagaatcgcttaaaccagggaggtggaggttgcagtgagctgagatcgcaccagtgcactccagcctgggtgatagagcaagactctgtctcaaaaaaaaaaaaaaaaaaaaattaggcatggtggtgtgttcctgtattcccagctattctggaggctgaggcaggagaatcgcttgaactggggagcyggaggttgcagtgagccaagatcgcgccactgcactccagcctgggcaacagagggagactccgtatcaaaaaaacaaaacaaaacaaaacaaaacaaaaaaacatgccgggtgcgttggctcacacctgtaatcccagcactttgggaggccgaggcgggcagatcacctgargtcaggagttcgacctggccaacgtggtgaaaccctgtctctactaaaaatacaaaaattagttgggcrtggtggcagatgcctgtaatcccagctacttgggagactgagacaggagaatcacttgaacccrgggggcggaggttgcagtgagctgagatcgtaccattgcactccagcctggggaacaagagcgagacttcgtctcaagaaaaaaaaaaaaaattagccaggcatggtgacacatgtctatagtcccaactactccggaggctgaggcaggagaatcccttgaacctgggaggtggaagttgcagtgagccgagatcgtgccattgcactccagcctgggcaacagagtaagactccatctcaaacaacaacaaaaattagccaracgtggtggtgctcacctgtggtctcagctacttgggaggctgaagtgggaggatcatttgagtctgggagatagaggatgcagtgagccatgattgtgtcactgcactccagcctgggtgacagagtgagaccctgtctcgaaaaaagaaaaaaaaaatagaagaaaaaagaaagatgaagctgagctaggatcaaaacctggatttgtccagagcttgtgctcataagcactagttctgctgttggtgttaaggatggaaaggacccctgatccctgagtgaagtcactctgggtcaaggtctacctttttttttttttttgagacggagtctcattctgtcagccaggctggagtgcastggcgcgatttcggctcactgcaacctctgccctctgagttcaagcgattctcctgcctcagcctcccaagtagctgggattacaggcgcctgccaccgcacccagctaattttttgtatttttagtacagacggggtttcaccatcttggccaggctggtcttgaactcctgaccttgtgatccacccgcctcggcttcccaaagtgctgggattacaggcgtgagccaccacgcccagcctaaggtctaccatttcttttgtttcatacttttcagctttcatcattttcatgcaagaatgtcttagctcctctttcattcatttctcaaacttggactgcattctcaccatgtgcccagcactgctccaagcataggggatacagcagggatacaacagaacagacaaggattctgccccgctagggctgcctccagtttagagactgacaataaacaaagcacataataagccaaaaagtatagtgtttttttttgtttttaatttttagtagagatgaggtcttgctatgtttcccaggctggtctcaaactcctgggttyggccgggcatggtggatcatgcctgtaatcccatcactttgggaggccaagtcaggcagatcacttgaggtcaggagttcgagaccagcctgaccaacatggtgaaaccccgtctctactaaaacatacaaaaattagccgggtgtggtagcacgcacctgtagtcccagctactcrggaggctgaggcaagagaatcgcttgaacccaggaggtggaggttgcagtgasctgagattacgccactgcactccagcctgggcaacagagtgaaactccatctcaaaaaaatacaaaaaaaaaaaaaggccaagtgtggtagctcatgtctgtaatcccagcactttgggaggctgaggcaggaggatcacctgaggtcaagagttcgagaccagcctggctaacatggtgaaaacccatctctactaaaaataaaaaatkagctggatgtggtggcacatgcctgtagtcccagctacttgagaggctgaggctggagaattgcttgaacctgggaggcggaggttgcagtgagcccagatcacgccactgcactacagcctggacgacagactgagactccatctcaaacaaaacaaaaaaaaaaaaacaactcctgggttcaagcaatccttccctcttgcgtcagcctcccaaagtgctgggattataggcatgagccactgggctaatcctagtatagcgttttagaacgtgctctggaacaagatagagagcaggaagagagggcttggggaggtcaagggtaggagaacattgtaatttcactgagaaagtgacatttgtactcttgcagatgtacccttggggatgctggcttggagttcaaaccctcctctgagatctttgacaagctccttcttggattttacctgtagaaaacagctttagggatgggctccaccaccctgctcatttgacagatggggaaactgaggcccacaggcaggaaggattagagtagtgggaagagacgggagcccatcagagctcctgaagtttccagtgttccagcccctaatctctttcttcagggctggctatttgactgatatttatcttggtcagtgctgatgttaataaattactctgtctagtcctttctagagcaaaggtcttggttgataaatagtaggagctgctctcctcactgcccatctccctccaggggaagcagcccctctacattaaaaccaaaggtcaggtccctcagtgcccaacctgaggtggggattggctttcaaggaaagagcgctgggttcttaactctgccctctgattttctgtgcggccttgggcragtcccttaaactctctgggcttctttccattttatcctcgcgagaatgggaatactaatagtaccaatactataagatcattgcatagaatcagtgagatcctgcaactgaaaagtacatcacagatccctggcttagagcctcccttattctggtccaaaaacttcacagaccgcactacccatctaatgataattgtctttttttttttttttttttgagacagagtttcgctcttgtagcccagtctggagtgcaatggcacgatctcagctcactgcaacctccgcctcccgggttcaagtgattctcctgcctcagcctcccgagtagctgggattacaggattgcaccacyatgcccagctaatttttgtatttttagtagagactgagtttcaccatgttggccaggctagcctcaaactcctgacctcaggcaatccgcccgcctcggcctcccaaagtgctgggattacaggcatgagccaccgcaccaggctgataattgtctttttgctaatgaagcagatgcatgtacaatgatcgagagagttcatgaattcagaaatgcttaacacactttaaaatctttataaaaaattacaatgaataaagaaaaatttagccatctcctattcctctttcccaggtaagcagtattaacagtttgggacaagtaatttmttttcttttctttttctttctttytttttytttyttttctttyttttttttttttktgaagatggagtctcactctgtcatccaggctggcgtgcagtggcgtgatcttggctcactgcagcctccgcctcctggattcaagcagttctgcctcagtctctcgagtagctgggactacaggcacacatcaccactcctggctaatattttgtatctttttttaagtggaaatggggttttgccatgttgcccaggctagtcgtgaactcctgagctccagcaatctgcccgcctcagcctcccaaaatgctaggattacaggcatgagccaccatgcccagcctctttttttgttttgttttgttttgttttgttttttgagacagggtctgctctgttgcccaggctggagtgcagtggcccgatctcagcttgctgcaacctmcgcctcctgggttcaagcgatcttcccacctcagcctcctgagtagctgggactacaggcgcacttgacactcgaccacacctggctaattttttttttttttgagacagagtttcactyttgttgcccaggctggagtgcaatggcctgatctcggcttactacaacctccacctcctgggttcaagcaattctcctgccccagcctcctgagtagctgggattacaggcatgcaccaccacgcctggctaattttgtatttttagtagagatggggtttctccatgttggtcaggctggtctcaaactcccgacctcaggtaatccacccgccttggcctcctaaagtgttgggattacaggcgtgagccaccgtacccagcaatttttttatttattgcagagacagggcttcagactcctgagctcaagtgatccgcctgcctcggcctcccagagtgctggaattataggcgtgagcyaccatgcccggcccatttctcatttttatgcttatacaaacatatcaccactttggcccagcgcagtggctcatgcttgtaatcctagcactttgagaggccgaggcaggtggatcatgaggtcgagagatcgagaccatcctggccaacatagtaaaaccccgtctctactaaaaatacaaaaattagctgggcgtggtggcacacgtctgtagtcccagctacttgggaggctgaggcaggagaatcacttgaacccgggaggtggaggttgcagtgagtggagatcataccactttactccagcctggcgacagagcaagactccatctcaaatacaaacaaatgaacaaaacaaaacaaacatatcaccactttaagattatttttaaaaagaaattttttttttttttgagacatggtctctgtcacccaggctggagtgcagtggcctgatcatagttcattgtagccttgatttcctgggcttcatgcgatcctcctaagtctctcaagtggctgagactacaggcatgtgtcaccacacccggctaattattgtattttattttattttattttatttttttgagatagagtctcactctgttgcccaagctggagtacagtggcaagatcttggctcactgcagcctcaacctcccaggctcaagtgatcctaccacctcagcctcccaagtagtgggactacaggcacataccgtcatgcccagctaattttattttttgtagagacacggtctcacaagtttccccaggcttgtctcatggcctcaagcaatcctcctgcctcagcctcccaaagtgctgggattacaggcataagccagtcatatttattattttttttgtagagatggagtctcattttgttgcccaggctgatcttgaactcctgggctcaagtgatcctctgacctcagcctcccaaagtactgggattacaggcatttagccatcgtgcccagctgattttatccgtcccaatggctgctccatattttggaaaaaattgattgattttttatttgcaagacatttgtccttttttttttttttttttttgagatggattctcgctctgttgcccaggcgggagtgtgatggtgcgatcttggctcactgcaacctctgcctctcaggttcaagcaattctcctgcctcatgctcctgagtagctgggattacaggtgcacaccaccacgcctggctgatttttgtatttttagtagagacagggtttcgccatgctgggcaggctggtctcgaactcctgacctcaggtgatctgcctgccttggcctcccaaagtgctgggattgcaggcgtgagccatcacacccagcctaagacatttgtctaaccacataaaagtcttaaaaagggatagggcagccgagtatttgtattgtaaaaatacgaaaattacctggatgtggtggtacgcgcctgtaatctcagctactcaggaggctgaggcaggaaaattgcttgaacccgggaggccgaggttgcagtgagccgagatcgcaccactgcactccagcctgagcaacaagagcaagactctgtctcaaaaaaaaagaaaagaaaaaaagaaaagaaaggatagggcttcctgtgacctcacttggaaaaaacaaaagagaaaaaagaaaaaagggataaggcttgctgccactcagggatccctcttgccaggctccctggctaggaattgtctccattgggagacttccttttcaggcctggctgcaagctgcaccaaggctgtggagcgggaagattggtagtctcaaaataagcacccctgcctcctgctgggaccttgggtatgtgtttaggatgggagtgcagttctggtccagtaggagctggcagcagaccctccactgcccttaaccacagtgctcatgggcaaagcacataatcatattcattgatcattcattcattcattctcagtatcctatggagatgggcagagcaggtgttggctggatgagtgaatgcatcttgctttgcagtgccttttactccctctatctgccaaaccagtcctggggactgaccagctcatctcctcctctgtagagagtctgcccaggttgccagaagcagagttaaggctagttcacctgggctcttccagagacccctcctataattgtgtcccaaggcccatttctcctagtggactatgagctcctcaaggacaaagcttatttgtatttggctttccatgtgtggggtcagggtggggacatgggccaagtgcactgtgagagtgctggggaggacggtgagagcagtcttctcgttagaggggacagaacttgtacagaaagcacagagtagcagatcctggtgtgttcagggaagagcacacctggagagtgaggtgtacaggtgagggggcaggaggggaggctgacaagttaggttgggttgtcaagggctttgggcatgatgcaaggtggatttggggttgatcctcttggcgagaggctggagttatatgacccaagtagaggacctcttggaagggggatgaagtggaggcagggaggctagagagagaagtgggaggtggggctgcctctcctggcgtcctgaggctctgcaaagcttcaagaagccaactgggcagctggaatatctgtagaaaggagctggctccaatagcatttcacagtctggagctgccacaggactccgtggccctgttcccagaaatgtgggtcactggtctaggggagcaggacatccaagtggatggaattgctggggctcccccaacctccgcgcgtccccctcaactcctctgtcctgcagtttctattccaaggacaatgaaggcagctggttccgctccctctttgttcacaaagtggatccccggaaggatgcccactccaccctgctgtccaagaaggaaaccagcaacctctataagatccagtgtgagtggctgctgagctgaccaatttctgccctttcaggggctctgggggcctgtgaggctccaggaaggagatgsgagggtctggaatgtcctcagctgtcctgggacccctggccttgatgggctcccctcaccccaagttcttccctgtgtacacaccctacctcacttcttgttctctgtcctctgttgcagttcacaatgtaaagcctgaatacctggatgcctacaacagcctcacgtgagcaccctgcatccatacatcccatcccctgcttgggtggggaacacactttcagcaaatttgcrgaacatcctccaccctgttcttttctgtagaaatccaggagatgtagatttcttttatttctgcctttttctttctttctttctttctctctttctttttttttgagatggagttttgctctcgttgcccaggctggagtgcaatggcgcgatctcggctcactgcaacctctgcctcccaggtacaagcgattctcctgttccagcctcccaagtagctcggattacaggcatgcgccgctaagcatggctaatttttttgtatttagtagagacagggtttcaccatgttagtccggctggtcgcaaactcctgacctcaggtgatccacctgcctcggcctccgagtgctgggattacaggcatgtgccactgcgtttggccccattttctttctttctttttttttttttaagagatggtctccaggaggcggaggttccagtgagccgagattgcgccattgcactccagcctgggcaacaagagcaaaactctgtctcacacacaaaaaagagagatgggatctcactttgcttcccaggctggtctcaaactactgggctcaagcaatcctcctgcctcagcctcccagtgttgggattacaggtgtgagccactgtgcccagccaggatgtaaatttcagtgtcggaagtcctgagggcctcttgcctagcttctgcattttagagatggagagtctgaggcccagccccagggtctgtttgaactgagtttgaacccttatctcagaggccctggtggctatgtgaaccctgcccctctctgcacctcccccacagggaggctgtgctgcccaagcttcacctggatgaggactacccatgctcactcgtgggcaactggaacacgtggtatggggagcaggaccaggcaggtaaggcgctcacstccctagtgccattgccactgcccagccctggcctccagcacctttcacacctggctgttctccactccctctccacaacagcacctggtggggctcttactaaaacctcatcacctcactcccctgctcaaatacctgtcctggctcccctgtgccctcaaggtgacccgtgaagcctgtgactccttcccggccctgcccccagcctcatggcaccaaatcctccatgcctcgctgtgctgtcccacccaggactcagttcctcagattgacagtttcactctttagttccagactactgctcattctctttcttctgccttaagcattatttcttgtttgcctgctttacctggatcactgtcttttattctttttttttccgagactgagtttcactcttgttgccccaggctggagtgcagtagtgcaatctcggctcactgcaacctccgcctccccagtttaagcaattctcttgtctcagcctcctgagtagctgggattacaggcatgygccaccacgcccagctaattttgtatttttagtagagacgggatttcaccatgttggtcaggctggtcttgaactcctgatctcaggtgatccacctgcctcagcctcccaaagtgctgggattacaggtgtgagccaccgcacccggccttttttttttttttcttttttcttttttgagacagggtctcgctctgtcacccaggctggcagatagtggcacagtcttggctgactgcaacctccacctcctgagttgaagatattctcctgcctcagcttcccgagtagctgggattactggcctgtgccaccaggcctggctaattttgtatctttagtagagatggggtttcacatgttggtcaggctggtctcgaacttctgacctcaggtgatccacctgcctcggcctcccaaagtgctgggattacaggagtgagccaccactcccggcctttttttttttttttttttttttgagacagggtcttgctctgtcacacaggctggagtgcagtggcataatcttggctcactcgagcctcaatttcccaggctcaagcagtactcccacctcagcttcctgagtagctgggactataggtgcgctccaccatgctcggctaatttttgtgttttttggtagagacggggtttctccatgttgcccaggctggtcttgaattcctgaactcaaatgatcctacctcctcggcctcccaaagtgctaggattgtagacatgagccaccgtgcctggcctttcagttttattcatttttaaattttcatttatttatttatttttgaaaccaggtcttgttacccagtggggagtgcagtggtgtgatcacagctcacacagccttaacctcctgagcttaagcaatcctcctacctcagcctcctgagtagctgggaccacaggtgcatgccacaatgcccaactaatttattttaaattttttgtagagacgggatctccctatgttacccagggtggtctcaaactcccgggctcaagcgatccttccactttggcctccsaaagtgctgggagtacaggcatgagccacagtgcctggactattcacttttctattttggcatagatgtcacctcctcctggaaggctgccragatttcctccacgcgggctgggtcaggcaccttccttagctctccaggcctcagtaattacctcctcacgccctgatcatgtacccctatagctgcctgtttagttgtctgtctccatatatgggtgaatccccaatatgcagcacatatttgtggaataaataggagttcttcttgtctgagctggtgtcttacagtcccaggggcacccctagcatgccccatcccagcctaatagacacatcaaagttggcaccagctataagaacccacacatgaatttggctgactcacagcatctcagccactcaaagggacctcaaattcagacccacactgtccaaaatgatagccactaaccacatgtagttatttatttatttatttttttgagatggagcctcgctctgtactgtcacccaggctggggtacagtggtgcaatcttggctcactgcaacctctgcctcctgggttcaagtgattctcctgcctcagcctcctgagtagctgaggttacaggcgtgtgccaccacacttggctaatttttgtatttttagtagaaacagggtttcaccatgttggtcaggctggtcttgaactcctgacctcatgatcctcccgcctgagcctcccaaagtgttgggattacaggcatcagccactgcgcctggcctatttatttatttttttgagacagcgtctcactctggtttcccaggctggactgcagtggtgcaatcacagctcactgcacccttgacctcccgggctcagatgattctctcacctcagcctcccaagtagctggaactacaggtgtgcaccaccacagccagctaattttttatatttttagtagagacagggtttcgctatgttgcccaggctggtcttgaactcctggactcaagcaatccgtcagccttggcctcctggactactgagattacaggtgtgagccactgcgccctggcctcacatgtagctattgaaatttatattagttaaaattacataaaatttaaagttcaagctgtgtgccaaggtgctcacctgtagtyctagctacttgggaggctgagttgggaggactgcttgagcccaggagttcgaggccgtgattgaataccatcacacctatgaatagccactgcactccagcctgggcaacacagtgaggaccctgtctctaaaaaagaaaaaattcaggactgaatatggtggcttatgcttataatcccagcagattaggaggctgaggtgggaggaacacttgaggccaggagtttgaaaccagcctgggcaacatagtgagactttgcttctataaagaaaatacatattaaaaaaaaaaagaagaaaagattttaaaaaagaaaaaattcagtttcttagtcatactagctacatttcaaatgctcactcatayacacacaggctcatgcagaaagtacttttrgacagtactggtttagagtgtctgcatagcacagccataacagatggtcctytaaacttcmcttgaacactcctagccatgaagagttcacttgtaagccaatctatttcatcctttgacagccctgataatcgtgtctttgaaaataatctgtgacctgcagatagataggtgtatctccttaatcaattatttggtttccgtaacagacattaacatattatttatgttttatttttattatttccatttagaaacagggtctcactatattgcccaggctggagttgaatttctgggctcgggcaatcctcctgagtagctgggactacaggcgtgtgccatcatacctggctagacactgatatgtggctaagggaataagagaaaagcaaattgccttcagtttcagccactacagctttcccattttaagcttgacttgatcagctccagcagtattccttgaattctcttaagcatttgctagttgtgaaatgaactctgagggatgggatcctgactttttcttttttttctttttcgagaccgagtctcactctgttgcccaggctggagtgcagtggcgtgatctcagctcactgcaacctctgcctcccggattcaagcaagttctcttgcctcaggctcccgagtagctgggactacaagtatgaaccaccatgcctggctaatttttgtatttttagtagagatggagtttcaccatcttggccaggctggtctcgaactcctgaccacagttgatccacctgcctcggcctcccaaagtgctgggattaaaggcgtgagccactgcccctggcctttttcttctttttatttttctgtttgggacagggtctcgctctgtcacccagtttggagtgcagtggcatgatcatagttcactgtaaccttgaactcctaggctcaggcgatcctctcacctcaacttctcgagtagctgggaccacagacatgcaccaccatgcctgggctagttgttttgttttgtttgtttgtttgttttgtagagatgaggtcttgctatgttgcccaggctgatctcagactcctgagctcaagtgctcctctcctgcctcagcctcccagagtgttgggattacaggcctgagccactgcgcctggctgatcctgactttttaaagcataccctacattttttgtaccttgaagttcagtccctcacatagtcagctgaatcatgttgagctgtacgctgggagtagggttcaagaatctacattttaataamcttgtaagaaccattgatccatctcctatggagagcaccacagttgttagacaattccttcttcttggctgggcgcggtggctcatgcctgtatcccagcactttgggaggctgaggcaggtgcatcacctgaggtcaggagttcaagaccagcctggctaacaaggtgaaaccctgtctctactaaaaatacaaaaattagctgggcgtggtggcatgcgcctgtaatcccagctacttgggaggcataggcaggacagtctcttaaatccaggaggtggatgttgcagtgagctgagatcacgccaccgcactccagcctgggtgacagaaaaataaagaaaattccttcctcttgccaatgatgctgtccttgtaacttttctccgttaatccgttttccacaggtcattcctggttttggtagatttcyatccatacagtacttttgccatttcctttgggaaaaagacctttaaaccatagggtcaggccattttgcagatgggaaaatcaaggcacagatggagtcaaaaaacaggtgaaggtcaggctggggatggggatgggaagttacagagtctgagtttctagactgctggcagccagctgcccttagctctagcttgcctgtgtgatcccctggggaccttcctccgctgatgggcccagccatgctcccaggatggcaaaactgttcctttcttctcctccacaattaattaggtttctttgttactaggaattagattagtttcctggggtggccagcataccgcaaactgggtggcttaaaataacagaggtttatcctgtcacagttctggaggctggaagtcacaaatcaaggtgttgacagggctgtccttcctcctaaggccttaggggagaacccttccttgcctcttccagtttctggggattgctggaaactcttagtgttccttggcttgtagacttgtcattctaatctctgcctccctcgtcacatgctgttctctctgtgtgtctctgtcttcacatagtgttctcctgtgtccagatctcccacttctgataaggacactagtcactggactcagggctcacctagtataatctcatcttaggtcgattatacccacagagacctatttccaaataaggtcacattctgaggttctgggtgggcataaattttgaggggacattgttcaactcagtgcagataatatgatttttatttatttttatttttatttatttattttttgagacggagtcttgctcttttgcccrggctggagtgcagtggtgygatctcagctcaccacaacctttgcatcccaggttgaagcgattctcttgcctcagcctcctgagtagctaggattacagatgtgcatcaccacgcccagctaatttttgttttagtagagatggggtttcgccawgttggtgaggctggtctcaaatttccgacttcagrtgatccacctgcctcagcctcccaaagttgattatttatttacttgagacggagtctcaccctgccacccaggctggagtacactggcacaatcttgactcactgcaacctctacctcctgggttcaagcgattctcctgcctcagcctccygagtaactgggattataggcatgtgccaccacacccaactaattttttttttttttttttaagatggagtctcgctctgttgtccaggctggagtgcagtggcatgatctcggctcactgcaagctctgcctcctgggttcatgccattctcctgcttcagcctcccgagtagctgggactataggtgcccgccaccacgcctggctaattttttgtatttttagtagagacggggtttcactgtgttagccaggatggtctcgatctcctgacctcgtgatccwccttcctcagcctcccaaagtgctgggattacaggcgtgagccaccgtgcccggcccaggatttttataaattctaacagtacaaagagttttccatgcaaagtaagcttccctcctgcccgaggccccacaggcctccattctgtgtcccaggggcatctactgtcaatctctttttttttgagacggagtttcgctcttgttgcccaggttggagtgcgatggcacratcttggctcaccgccacctctgcctcccaggttcaagtgattctcctgcctcagcctcccaagtagctgggattacaggcatgcgccaccacacctggctaattttgtatttttagtagagatggggtttttccatgttggtcaggctggtctccacccacctcagccccgcaaaatgctgggattacaggtgtgagccactgcgcctggtctactgtcaatctcttaagtcgccattaagaggtgatgcataaattagcatctctggatgtccttgccacctcaacacatgaggtagcataccacacatcctcttctgttccttggttccttttttcaattcactgtcttggaatgttccatatcagcccatcagttctcccctgttcttttgttcagctgcccctctaaggcctggtggtcttccttatgcatgccactgcttccagggtacaggacacatctgatcttcttgttgctatttaaggaaggtggggtgggaacattattcccattttcaagatgagaacattgaggcctagagcagtccaaggctgctgggcagagctggagctcaaatccaggtctcctagacttgtgtctagggtcatcccctccccagcatggtcttccaccaaggcagagggaactcagggagtcttgctgctacagggaaccaggccaccccncctcccccgtccccaccacttagccaaccttgnggaggtcatctgctgggggtcccagcagctcactgacctatacctctcacccccaacagtgcacctgtggcgattctcaggtggctacccagccctcatggactgcatgaacaagctcaaaaacaataaggtatgttagtgtccactcagcacacctctctggatgtgggatgcagcccagccctgttctggggactactctgctaccccatgaggcacactgtcaggatggagcgcacttcctggtagccatgcctttaccaccatgcccacaggagtacctggagttccgaagggagcggagccagatgctgctgtccaggagaaaccagctgctcctygagttcagcttctggaatgagccacagcccagaatgggtcccaacatctatgagctgaggacatacaagctcaaggtgcctccctcygacagaccccctcctgccccccaatttccctgctgcaatgctgctttgcagctgccccaacacctagactggggcttctggcttctccctccctatgggctcagagcagagttgtatacacatgtgtgcaaacatgcacrccaggtgtgtgtcagggcctgngaatgaggccaaatggccgctgcagcttgggaggtggggagacagggcagtttcccttccttgccaagctgtgatgctatgaatctgaggtgggggctcattcccatcatccctttggttctctttcagccaggaaccatgatcgagtgggggaacaactggtaagtggcagcaccaagactggggttgggggaggcgtaccctgctcacctgccccaccaaggcccctggtgggccaccttttccagggccatatcacagggaactctttaccttctgcccctcatggatctgggagaaggatccarccaggaggtgaggatctcctagaaggttgtgacccctccgttggtagaacaccccgccatcagtcctttctctcagcatcccggaggacygtgggttccacctaggcccctcctgtgaagtgtggccaaggaatcagcctcagtaccctctgcaccagccctggcttctgccccatattattgtgccttctccagggctcgggccatcaagtaccggcaggagaaccaggaggcagtgggcggcttcttctcacagataggagagctctacgtggtgcaccatctctggggtaggttgaggaccttccaggagccttttgttagttctctttctctgtcatcactctctgtagccaatggggttgtattagtgtcctcatagaacttaatgttctagcaggagacactatcttagatgtaaagtcacaaaaagatcaatttcagattacaaataatatttatagaaaataggcaaggagtctgggagcggtggctcaagtgtataatcacgacactttgggaggccgaggtgggcaaatcacaaggtcaagagatcgagaccatcctggccaatatggtgaaaccccatctctactaaaaatacaaaaattagctgggcgtggtggcgcatgcctgtagtcccagatactcgggaggatgaggcaggagaatcagttgaacccgggaggtggaggttgcagtgagctgagatcacgccattgcactccagcctggcaacagagcgagactccgtctcaaaaaaaaagaagaaaaaaaaaaaaggcagggagagatgatggtgaaaaacataggggatctacattggtctaggtagacaaataatgcctctctgaggragtaaaatgtaagctgagrgstaaaggatgagaaggagccagctgtgaattgctaggcaaaagcattccaagtagacagagcagcacatgcaaaggccctgtggtggggaaaggccttcggggttttgaggtgtggcaaggaggccagtgtggagtgagtagggaagaatgtggggagatggaayaggagagggggaatgagttgggatttattgtaaatgcaatgagagactatttgtttcaaatagcagtgacacgacctgatttttgttctagtatgatttctctggctgctgtctgctttgttaagagtgcttggtaggcgagcaagagagaaagcagggcttcaggaagccattactctagttcaggcaggaggggatggggcagtgggatgctgagaagtccacagaagatttgttagtctagaggtggaaccaacaggacttgtggatgaattgtctgtgtggggcaagagaaggagaagggcattccagaagagctcccaggctcgtgcttgagctgctgtgtgtcatctcctgagtctgggaggtctagggaaggagcaagtcagtggggtcaggagcgtaattttggcccttggaattgttactttttttttttttctttgagacacagtcttgctctgtcacctaggctggagtgcagtagtgtgatctcagctcactgcaacctccgcttcccragttcaagtgattctcrtgcctcacgctcctgagtagctgggattacaggcatgcagtaccatgcccaactaatttttctatttttagtacagagtttcgctatgttggccagactggcctcgaactcctggcctcaagcagtccaccagcctcggcctcccaaagtgctgggattataggcatgagccaccgcaccyagccggaagtgttacactaaaaatgctgacacaccaaagtagagatgtcaagtaggcagtagatggatataggagtctggagcccttgggagtgtttgcgactagaaatataaatgtaggcaatattaacatatgtactgattggatggatgattaaagcagacagtgtttgctaatagtctgagggaggcatctagggaggaggagacagcagtgcagggtttaggggacagtgggaagagggccctgtgctgggtaagggatccagtcctctgtgcctgaggaatgagcctgtgcctttctcacagcctataaagacctgcagtctcgggaggagactcgaaacgctgcctggaggaagagaggctgggatgaaaatgtctactatacaggtgagtgaagsctttggaggtcttctgctgagaaccctgtctgaggatggaatcctctctgcaaggagwtctagtctttcttgattacctccagtgatggggaactcacttttaagacaatgagttaatgggtttctatccaagtggcacactccataggataccagcaggcctaggtgagtactctaggggatgataacatagccagggccacgcctctgcctaggagatgtggattagcaaacgcccattgtgaccttgggcayggttctttacctcgctgaggctgttccctcgtctgtaagatagtgatggtgatagtgcttctgtcagagggctataacggaagattctacaaactattttattattttatattttattttattttatttatttttgagacacagtctcactctgtcacccagggtggagtgcagtggcatgatcttggctcactgtagcctccgcctcccaggttcaagccattctcctgcctcagcctcccgagtagctgggattacaggcgtgtgtcaccatgtccagctaattttgtatttttagtagagacggggttttatcatgttggccaagctggtctcgaactcctgacctcaggtgatccgcctgcctcggcctcccaaagtgctgtgattacaggcatgagccaccacatctggcccacaaactsatttatgaaaagtgctttctccagtgtctgtcacaaaggaagcatgcaggaaatgtttttgaataaggtttttgtttttgtagagatgcagtcttactatgtcacccaggcaggtctcaaactcctgggctcaagcagtcctcccacctcagccttccaaagtgctgggatcataggcatgagctactgtgcccagccttgaacaagttttttgctcaaggtgtttgccactttgctaggaacctgaaaccacctagagtcagtgggtgttaattaagccctcactgtgtgccgggaactgtggtaggtaggtggttgaggggcacataaatgaacaagagcctgtccttgccattgagaagyttacagtgatcacttaccaggtggtatgagggagaatgtgtctgctgaaggagttagcaggagccttgctattcagtgtggtcccagctgggtatggtggctcacaactgaaatcctagtactttgggaggccaaggcaagaggatcacttgaggtcagtagtttaagaccagcctgggcaacatagggagaccccatctctacaaaacattttttaaaaattagcaggacgtggtgtttcccatctgtagtcccagctacttggaaggctgaggtgggaggatcacttgatcccaggagtttgaggctgcagggagccatgattgtgccattgcactccagcctgggcaacagtgagaccctatctcaaaaataaaaaataaaaataataaaaaacaagacaagcacagtggcttacacctgtaatcccagcactatgaagttgaggtatgtggatcaattgaggccaggagttggagaccagtctcggcaacatggtgaaacctcgtctctactaaaaataaaaaaaattagccaggcatggtaactcaagcctgtaatcccagctactcgggaggctgaggcacaagaatcacttgaacccaggaggcggaggttgcattgagccgagaacctgccactgcactccagcctggaagacagagtgagaccctgtctcaaaaaaaacaaaaaacaaaaaaaatcaagtgtggtcccaactgacagtattggcatcccctgggagcttgttaagaatgacaaatctcggctgggcgcagtggctcacgcctgtcatcccagcactttgggaggctgaggtgggcagatcacctgaggtcaggagttcaagaccagcctgaccaacatggagaaaccctgtctctactaaaaatacaaaattagccaggcatagtggcacatgcctgtaatcccagctactcgggaggctgaggcaggagaatcgcttgaaaccggaaggcagaggttgcagtgagccgagatagtgccattgcactccagcctgggcaacaagagtgaaattccatctcaaacaaagaaacaaacaagaataacaaatcgcaggcttcctgcaacctaccaaatcagaatctgcacattaacaagaactgccaagtgatttgtatgcacattaaagtttgaaaagctctgagctggaggaaagagtctaacctcctggatgacctggagctgaccttctctaggctgcaccctctctatctgtaaaacgaggcagttggtctaaatcagtgtttttcttttctttttttttgagacggagttttgctcttgttgcccaggctggagtgcaatggcctgatctcggctcacagcaacctctgactcccrggttcaagcgattctcctgcctcagcctcccgagtagctaggattacaagcatgtgccactacgcccggctaattttgtatttttagtagagagagggtttctccatgttggtcaggctagtctcgaactcctgacctcaggtgatccgcctgtcttggcctctctaagtgctgggattataggcacaagccaccatgcctggccaacagrtaactattaaaatttaagaaaatgttattctcatcaccaccaaastcctgtcttatcccataatttgagggatctggtgctcttcatgggcccttccacgagggcaatgggacattcctgtcgcagcatctggggcctcctcctgcccactcaaaggccagcatgtgtgggtggggccaggggaggttgttggcttgcttgagccccctgtgtgacctctgccttctctctccgcagtccccctggtgcgacacatggagtctaggatcatgatccccttgaagatctcgcctctgcagtgatgctgcctacacctccacctccttccccttctccctcaggcaaccccgacagacagtggcactcctggtcctgctgtcttggttttgtcttggctctgggaggactctgaggggcagtgctcagttcagacaagggggaactgaaggctgacaagttctgaggattacagctctgcccaggccctttctactttccctgcctgcctccctccccctgctagaagtagtttctgatttccctgaatgaaagatagtgatcttttaggccttcatwtatcttctaaaattcctcatctcaaggccaccagtccccagttatcacccttggaaatcctctgtttagcttagttgcacaaaaggtagtatgtccagtggctagaggtggggtgggaagagaggaggccaggccaggccctcaggaattccctggtttccactgggccacccacttgctggacagtctgagccaagtccctcctgctggagaaaagcctggaactgccaaaacaaaaaaacaaatacaaacaaacctcgtcaccacggtcaggaggaggttcagacattctgcccagaggggctggggaaagggatgggagccaggaaagatttaggggcaggagacagacacgtaacaggaactcggaaggtagaacttagaattcagaacttgggtttcaattgtagaatttggaatctggaatacagaattgggaagaagaacagagatgacaaaagaccacttgaagagaggttcctaatactagacagatggagagtggcttggctgtttccccctgcatattggggttgaaaacttaaatgtgtagttccagtccttctawgcagagtctctcctgccctccctccttcctgcaggcaaatatacaagctagaccctgttccctcaccctgtatcctgtctcccctaattgacattctatcagcccaaccctcattctgcagggccacctggtgtgtggaggtggcgggaggggtcagtgactctgggggtctcctcagtgacccccatacctcatcatgaacccttgggtagcttgattctgcctaccatccaggaaaacttgtgctggaattgctgatggaaacaattaaatatttactataaatcagtgtcttttcttcatctgcaaggaactttagcaggtgcctgaggcagggcacagtagagctggtgggcttagtcccacatggcagatctaccctcctggagggtactgtgttcttgagctattctcaacagtcagtactggttgggtgcagtggctcacgcctgtaatcccagcattttggaagtccgaggtgggcagatcacttgagtgaggtcaggagttcaagaccagcctgggcaacatggtgaaaccctgtctctactaaaaatacaaaaattagctgggcatggtggtgcatgcctgtaatcccagctacttaggaggctgaggcaggagaatcctttaaaccctggagtcggagtttgcagtgagcggggattgcgccactgcacttcagcctgggtgagagagcaaaactctgtctcaaataaaaataaaaataaaaaagagccagtattttcctccttgctcctgggaaggagaaggaactggccccgtacaaccagggattcaggacacgtgttactagctccagatgaggatttacacgaaaaaatcctgggccttgtttgtacagttcatgccaggggtaggaaatacctgaagctttcaaatactgcgttagagttgtgactctgtcctgggcaagtcaggcctaaaatggagaaactggtgatgcactcctcaaaaagccaagtgtaaaatgaggttaatgccctccctgacttgttgccttcactggcgtggcatattatggtaaaaataataattaagaagtaaggttatgcaggcaaatcctctagcgccgaaatcttccccgccgcgctaccaggttctttcgtgttatcttggacataacacaacattaattcaactactcggtggagcgcccactagctgctggacactctcttakgccctgggcacagtgaacgagaagcatgtgtctttgtttttacagtctcaccacgccaccacctccctcgggggcctccgcgctgagcttccggcctctacgcctcgcttccggtcggccgccccttccttacttccggttctctatggtgcgcgggcaagctttgctccgcctccggcagtggcttactcccggtgccaggttcttggagctgtgaggtgaggaggggacaagggcagtggggctgggagatggggcggggctgggcgctccgggactgaggtgctgatcgcccaaagggcgcccctgggctggggtctgacccggcttctcctccctcactacccgcggtccccggcctctcggcgytgcgctgttacctcatccgaaaagtgttcgctgcagcatcctcaggcttcacgttggagcctcttgattgtggtaatgtagcctgatgggggtgggggtggtggtgatggtaacagctcacatatatcgtgctcttcggtgtgccaggcactctactgtgttgccaaagtcaggatttcccacacttaagcctttcaggtccggtctttgtaggctttgccagatcaacttaccacctctactaccgtttattaaaaatttgtttgtttgtttgttttagtatttattgataattcttgggtgtttctcgcagaggggatttggcagggtcataggacaatagtggagggaaggtcagcagataaacaagtgaacaaaggtctctggttttcctaggcagaggaccctgcagccttccgcagtgtttgtgtccctgggtacttgagattagggagtggtgatgactcttaaggagcatgctgccttcaagcttctgtttaacaaagcacatcttgcmccgcccttaatccatttaaccctgagtggacacagcacatgtttcagagagcacggggttgggggtaaggctatagaccaacagcatcccaaggcagaagaatttctctcagtacagaacaaaatggagtctcccttgtccacctctctccacacagacacagcaacaatccgatttctctatcttttccccacatttcccccctctctactagacaaaaccgccatcgtcatcatggcccgttctcaatgagctgttgggtacacctcccagacggggtggcggccaggcagaggggctcctcacctcccagaaggggcggccgggcagaggcgccccccacctcccggacggggtggcggccaggckgaggcgcccccctacccccgacccgacggggcggctggccgggctggggctggcccccacctcccccccggacggggcggctggccgggcgggggctgccccccacctcccggacggggcggctgctgggtggaggggctcctcacctctcagacggggcagccgggcagagacgctcctcacctcccagayggggtcgcagccgggcagaggygctcctcacatcccagaygsggcggcggggcagaggtgctccccacatctgagatgatgggcggccgggcagagacactcctcacttcctagacgggatggggtccgggaagaggtgctcctcacttcccagactgggcagccgggcagaggggctcctcacatcccagatgatgggcagccgggcagagacgctcctcacttcccagacggggtggcggccgggcagaggctgcaatcttggcactttgggaggccaaggcaggcggctgggaggtggaggttgtagcgagccgagatcacgccactgcactccagcctgggcaccattgagcactgagtgaacgagactccgtctgcaatcctggcacctcgggaggccgaggctggccgatcactcgcggtcaggagctggagaccagcctggccaacacagcgaaaccccgtctccaccaaaaaatacgaaaaccagtcaggcgtggcggcgcgcgcctgcaattgcaggcactcggcaggctgaggcaggagaatcaggcagagaggttccagtgagccgagatggccgcagtacagtccagcttcggctcggcatcagagggagaccgtggagagagggggaggggggagggggaggggtttactaaaaatttttaatccagtccaaattttttttttgcaacgggatctctgttgtcaagactgagtgcagtggcgcgatcatagctcactgcagcctggaacttctgggctcaagccatcctcccaccctagcctccagagtagcttgggaccacaggtgtgcaccgccatactaggctaattttaaaatgttttctaaagatggggtctcgctctgttgcccactctggtcttgaacgcctgggctcaagcgattctctcacctctgcttgccttggtttcccaaagtgttgggattacaggtgtgagccatggtgttgggcccagtcactttttttgttgttgttgagactgaatctcgctctgttgcccaggctggagtgaagtggcygcgatctcggctcattgcaacctctgctccctgggttcaagtgattctcctacctcagcctcctgagtagctgagattacaggcgcccgcctccactcccggctaatttttgtatttgtggtactgacggggtttcaccatgttggccaggctggtctcaaactcctgacctcaggtsatccacccgcctcagcctcccaaagtgctgggattacaggcctgagccactgcgcccagccaagtcactttttaaactcaaatttactttgagagaaaacttgaaatctctccaccagaaatggaaagctgctttcacttgttttatgtagaaggtaaaaattaatatagttaatataatgcaactagatcattgttaacaaactctggctagattttgttgtttaaggctgtgggatagagttcttttgttacaaaggaacattggcattcatagatgttaaagacaaactagggaactgagatgttctccttgaagcaatcagaagtttcaaaataagaattgaaaagggattaactttctccttaggtgttcagcattatttaagatcacctatgcatcatctgaagccacagtcccaggtcatcttcatcaccttccccagtggaatgcctcctgtgttaaagcccacaacaacccctgtggtagggactgttattctcatttgatttgtgaggaatcagacccagagaaaagtgaagtgactcgtccggggactcatagccatgaaagagtagaatggagattccagttcagggctctctgacttttaccgtgacaaactattggctccctcaagtcggggatgtggaagcttcagtgagtgatgattgtgccactgcactccagcttgggtgacagagcaagagggattagggtaaaggggacagtgctgcccacctcaggaggctgtggtgaggcaacaagggaggatgctttgtgactgtagagccccatgaaatgtaggttctatactttaaattctaggatcaacctgggagtcaatggcatcactagatgagaggctggcaggactaggaggcataaaagtgtagttaagagcaccagtatggcattgattggatagatccggattttggcctactagtcatgtgactcgcaattacttgcaagtaattccccttgcgagcctcagttttgtcatctgtgaaatggtggtagttcttagctgaaaagtttgttataaggagcaaatgagaacatacccataaagtagttagatcaaggcccagcacacagtgatcacagtagtattgggagtgtctttaaatgccagaccgaggagtttggatactaatttatggagcactctgccaggctcagggggaagagggtagagctcacaatctaggtgggaagacaggtaaatgattcatagagataaattccctaatagtgtacccaaagtagccaaaagagggctttggggagacctgacaggcttcctagagcagatgagcattgcttagtcttgaaggatatagggaggaaaaggaagatctttgcaagcaggggaaaagacatggagtgtttggggaactgggattgcagggtgcagttgcagctaggagcagaggttggggacagtgggaaggtcggtaggaataggaatgcaagaaatgaagttgggaaggtaggttggggacaaaccatcaagggtctttatgacaagtcagggaatatggatattcagtgcattatgaagagccagcaaaggttttgaaacaggagaggcattaattaggtcggtcttttttaagaaagagaatttagacagtattgttgggcaagactgttagagtagtcctggagaggaatgtggagggcctggcctagggtgttgagatggagacacacatggtgcctggatagctgggtgaacacttgaatgcaggtctcctctatggagagtgtggagcaggatgtgggtggaggcagggcagggagaggttgaagtagatgattccgaggtcagtgggagtgggtggtgaygcctttttaaaagagaaggtggagtttgttttggacaggctgagagatgcttccctgttgtattacagagggttaaattgaggctttgaggggttaaatgactttccttgagttaccaagtctgtaagtggccagaactgctagtttgacttcagtgttatgactccagaagaatctcaaaaactttctcctcttaacaggaggaacaaccatgtcatcagaatcgagcaaaaaacggaagcccaaagtgatccgaagcgatggagccccagctgaaggaaagcggaatcgatctgacaccgagcaggtgagatcagtcagggttgccatgctgctgagaaattacatctcatggccaagcacctggctgtgtgtttgcagcagctcggggtcgcatctaccaggtacaactttttggtggcttccacttgaccaggtgactgggattcctgtttcttcactaaagctgagtgtccacatctggtttagctgcagcatctccaaaaccaacaagcctgtattagacatgattatacctacccagagwatgtattccagtatgatatgtgtctccagttttcctgatggtcagaagaaggtagtccatctgcagcatggcactggagcttcaggaatccctcggtgtgctgctgagacaataccagaaccatgtgcccacagaacctcttttgtggcctgagagctcatgtggtcgtcaggttcttttcttctttttgtctgtttctctgtccttgaatctgtcaacttcatttgtgacttagctatttaaaaaaaattttttttgagacagggtctcactgtgtygctcacgtcggagtacagtggcacgatttctgctcactgcagactgcatttcctgggctcaagcgatcctcccacctcagtctcccaagtagctgggaccacagctgcaygccaccatgcccagctaattttgtattttttgtagatatgaggttttgccacgttacccaggttggtctcaaactcctgagcttaagtgatctacctgccttggcctcccaaggtattgggattataggtgtgagccaccccgcacccagctggaattcctctctataggagactgtcatgcagccattttgattgagatctgtatttactgggatggtcatatggtttggccgtgtccccacccaaatctcaacttgaattgtatctcccagaattgccatgtgttgtgggagggacctacgaggaggtaattgaatcatgggggccggtctttcccatgctgttcttattatagtgaataagcctcatgagatctgatgcgctcatcaggggtttctgcttttgcttcctcctcatttttcttttgctgccgccatgtaaaaagtgcctttcacctcctgccatgttcctgaggcctcaccagccatgtggaactgttaagtccaattaaacctctttttgttcccaatttcaggtatgtctttatcagcagcgtgaaaataaactaatccagtaaattcataccagtagagtgggggtttgctgaaaagatacctgaaaatgtggaagcgactttggcactgggtaacaggcagaggttggaacagtttggagggcttggaagaagacaggaaaatgtgggaaagtttggaacctcctagagacttgttgaatggctttgacaaaaatgctgataatgggccggacatggtggctcacgcctgtaatcccagcactttgggagtctgaggcaggtggatcacgaggtcaggagttaaagaccagcctggctaagatggtgaaaccctgtctctactaaacatacgaacaaattagccaggcgtggtggcggtagcctgtaatcccagctactcgggaggctgaggcagagaattgcttgaacccaggaggcagaggttgcagtgagccaagatcatgccactgcactccagcctgggtgacagagtgagactccatctcaaagaaaaaaaaaaaagttgataatgatatgaacaataaggtccagcctgaggtggtctcagatggagatgaggaacttattggaaactgcagcaaaggtgactcttgtgttttagcaaagagactgaaaacatttgcccctgccttagagatttgtggaactttgaacttgagagagaggatttagggtatctggtggaggaaatttctaagtagcaaaccattcaaaaggtgacagggccatgygcagtggctcacgcctataatcctagcactttgggaggccgaggcaggtgaaccacttgaggtcaggagtttgagaccagcctggccaacatggcaaaaccctatctctactaaaaatacaataaaaattarccagacatggtggtgggcccctgtaatcccagctacttgggaggctgaggcaggagaatcgcttgaacccgggaggcagaagttgcagtgagctgagattgcgccattgcactccagcctgagcaacaagagcaagaccttgtctcaaaaaaaaaaaaaagaagtgacttgggtactgttaaaagcattccattttaaaaggaaaacagagcataaaagtttggaaaatttgtagcctgatgacacagtagaaaagaaaaacccggctgggcacggtggctcaygcttgtaatcccagcactttgggaggccgagctgggtggatcacttgaggtcagaagttcgagaccagcctgggcaacatggtgaaaccccatctctactaaaaatacagaaattagccgggcctggtggcaggtgcctgtaatcccagctacccacaagcctgaggcaggagaattgcctgaacctgggaggcagaggttgcagtgaactgagatcatgccactgcactccagcctgggcgacaagaccgagactctgtctcaaaaaataaaaataaaaaataaaaaaaggaaagaaaagaaaaacccattttttgcggagaaattcaagttggttgcagaaatttgcataagtagcaaggagcctaatgttaatccccgtgggggattaacaccayggggaaagygtctccaggccatgtcagagacctcacggcagccccttccctcamaggcccagaggcccaggaggaaaaagtggttttctgggccaggyccagggtccctgtgctatatgcagcctagggacttggtgccctgtgtcccagccagtccaggcatggctgaaaggggccaatctagagcttggcctgtggctcagagggtggaagccccaagctttggcagcttccaagtggtgttaagcctgtgggtgcacagaagtcaagaattgaggtttgggaacctccgcctggatttcagaagatgtacggaaacacctggatgcccaggcaaaagtttgctgctggcgcgctcatggagaaccyctgctagggcagtgtggaagggaaatgtggggtcagagcccccacacagtccctactgaggcactgcctagtagagctgtgagaagagggccaccgtcccttcagaccctagaatggtagatccacgaacggcttgcaccatgcacctgaaaaagctgcagacactcaatgccagcccatgaaagcagccaggagggagggagactgtaccctgcaaagccacaggggtggagctgcccaagaccatgggaagccaccttttgcatcagcttgacctggatgtgagacctggagtcaaaggagataattttggagctttaaaatttcactgccctactggattttggtcttgcatgggccctgtaacgcctttgttttggccaatttctcccatttggaatggctatatttacccccactgtatctacgaagtaactagcttgcttttgattttacaggctcataggcggaaggggcttgccttgtctcagatgagattttggactatggacttttgggttaatgctgaaatgagttaagactttgggcgactgttgggaaggcatgattggttttgaaatgtgaggacatgagattcggaggggccaggggcggaatgatatggtttgggatttaaatctcaacttgaattgtatttcccagaattgccacatgttgtgggagggacccagagggaggtaattgcatcatgggggccagtctttcccgtgctattctcatgatagtgaataagtctcacgacatctgatgggtttataaggggtttctgcttttgcttcctcctcatttttctcttgccgccgccacataagaagtgcctttcacctctcgccatgattctgaggcctccccagctatgtgggactgtaagtccaattaaacctcttyttgttcccagtttcaggtgtgtctttattggcagcgtgaaaatggactaatgcagatgggaagttgcacttaacagcayggacagtatgatcccgttttgtttacaaataaaatgtttatttatccacaatcttcactcagtttcggactgagaggcgaaattataggcaatttttccattttctttttgatactcctctgtatattctgaatctttgataccaggcatgcattactctgcaatcagaaagcaaaagaggtttctattttgaagagaagaaaagcatttaatttaaggaccagatcttttagagacctgactgaggcttcattgttactgtttttatctaaaaggagatgtcagccaagtgtccctgatcccagcagggagacttttaccccatgcacacagagcctttatccttacctctacaggaaggtaaatactacagtgaggaggccgaggtggatstgcgggaccctggcagagactatgagttatacaagtacacctgccaggagctacagaggctgatggctgagatccaagacctgaagagcaggggtggcaaggatgtggtaaggagtgggaccaggtggccgtgaacctggtgggtttacatagatgaggctgtttttgcacctaccagggcccttcctgatcttgatcttctgtcctagccatgatcaggtgattggagcctgagggctcccaaaacctgtgaatttattggaacttcttatcaccattcagtcaccaattacaggaatgaaagtacaggataattaattttttccctactaatttgatcattcatccaattaatatttattaagtgccaggcattttgctaggtgttgagaaatgatggtacttatacatttgcttgatacaaagatggatgtgtacaagtaaattgtagataccaaaaatgaaattatcattaatagtaaatgaataaatgaggttttaggggcagagaaattaaacaatgtgactaaaaactcgatagataagttttttaaaatccattttttcccccaggaatctcacgtatttgtgcttatgctgacaagttttgttagaattattgcattcaatctattctagccaagctttatggctataattctgttattttccatttaagttatcctgtaatgttatttatagaggtcaaattttatgacaagatgttactattgctgggatctctgtgtaggatctgtagagatagattgtgcctttgctgcccttattccatcttcaattcctgttactctagtccaagcagaaattacttttttttgcccgagattcttaatcattttccttatacaatcgtcctcttattttcttcatgacccttctcatggttctgagctccctccggtgccgtttttggccccagatgaggatgggtcagtggtgaaggactgaaggaagctgagctagccctgtcgtcagtgggctttactgttttctttgcccacaggcaatagaaatagaagaacggaggatccagagctgtgtgcatttcatgactctaaagaagcttaaccgattagcccacatcaggttgaagaaaggaagagatcagacccacgaggtagtagttaaaaggtttaattttaaccttcctccttcctcctccccatccccttctttttttttttttttttttttttttgagacagagtctcgttctgtcccccaggctagagtgcagtggcacgatctcagctcaccacatcctctgcctcccagcttcaagcgattctcctgcctcagcctcctaagtagctgggattacaggcacctcccaccaccatgcctggctaatttttgtattttttagtagagatggggtttcaccttgttggccaggcttgtcttgaactcctgagctcaggtgatccactcgcctcggcctcccaaagtgctgggattacaggcgtgagccactgcacccagccccatccccttctttattccctttacaccttctcttagtttgctgaccctctcctctgctccatcctgacttgccctgctcacttctgatcgtattttcctttcaggctaagcagaaagtagatgcctatcatctgcagctccagaacctgttgtatgaggtgatgcacctacagaaggagatcaccaaatgtttggagtttaagtgagtttgggaggacagggctttggcacatgtggtctttcggtaactgctttttcccatgtagctcactgtaagtctgtttcttttttttttttgagacggagtcttgccctgtcacccaggctggagtgcagtggcgcaatctcagctcactgcaacctccacctcccrggttcaagcaattctcctgcctcagccttctgagtagctgggattgcaggcgcccacctccacatccagctaatttttgtatttttagtagagacggggttttgccatgttggccaggctgttctcgaactcctgacctcaggtggtcctcccgcctcggcctcccaaagtgctgggattacaggcgtgagccaccgctcccagcctaagtctctctttaaaaagaaatctgatgagcttagaaaactgtaggatctgggagaagggcaaattgcaagggtgaatgtgggagaattgcaagccgtgatttcaggctgcataaagaacctcagaagtctctctgacctttttgagttttgagctctgcacttggtaaaaagcaggtctctctccctatcaggggtctttacattaccagtttgatttctgggcatgttgtatgggagcaactcacttccagtcacattcttttaaccttttggcccagttttcctttctgtagtcccagcagttcatttctgcaaatggattttattctttggaacctgaatttcttgctgcttagctgccttcaggtgaagaaactacagtttgtcagtgtccttcctcaaaaccaagctgagagatgagaaggaggaaggagtaaacgggaagagaaggggaagtgttctcacttgatcagacctgtttatgcaaactgaaagcagcttttatctgtaacaaacttgacatatgcaggggccctattagacattgggtccaggatatatatatatatatatatatatatatatttttttttttttttttttttttttttttttttkgagatggagtcttgctctgtcgcccaggctggagtgcagtggcgtgatctcggctcactgcaagctccgcctcccgggttcacgccattctcctgcctcagcctcccgagtagctgggactacaggcgcttgccaccacgcccggctaatatttcgtgtttttagtagagacagggtttcaccgtgttagccaggatggtctcgatctcctgatcttatgatccgcctgcctcagcctcccraagtgctgggattacaggcgtgagccaccacacccggtgggtccggaatatttttaataatcatgatactgattgattgttttgttttttgtctttttttttttttttttttgagacagggtctcactcctgtcacccaggctggtgtggtggcacaatcctggctcactgcmgccttgacttgacttggctcagatgatcctcccatttcagcctcctgagtagctgggactattggcatgcaccaccatgcctggctaattttttgtatttttagtagtgatagggttttgccatgctgggctagtctcaaactcctggttgcaaatgatccacctgmcttggcctcccaaaagggtaagattaaakgtgtaagccaccaagcctggcctgatgctgatttttttcttttcttttcttttcttttttttttaaagataaagtctcgctctgttgcccaggctggagtgtggtggcgtgatcttggctcattgcaacctctgcctcctgggttcaagcgattgcatgcatgagccaccacacccagctaattttcgtatttttagtaaagacagggtttcaccatgttggccaggctggtctcaaactcctgacttcagatgatscacccatttcgacctcccaaagtgctagaattacaggcatgagccactgtgcccagccctgatgctgatttttgagaggcatctttatctgttccacaaaatcgtcacataacaatagttaaatatgaatagaggtgaaatctgcatcaggtctgtacttgagttaataatattgtaccagtgtcagttcctggttttgacaatgtataatgtggttagataagatagtatcattgggtgaagggtacatggaggaaatacattctaagtattatttttgaaacttcttggagtcttaaactatttccaaattaaaaaggtatcaaaaacaaaataatgtgatgcactggtctgtaatcatcacccaaatggaaactgacaaacccagaatacagtggaacttgcgcctgttgggaggcagacggccacatggaaggagcataggccttgaagttacacagmctgggttcaaatcccagcttggccactccctagctgtggaccttgggcaagctgcttactgatagaagcctccatctcagtcaaaaaatggagattaaaactccccacctcttagagttgttgtgaggcttaaatgaggtgaggatgacatatagtgggtgcttattaatatatgatagctgccgttatcattactgtcatctgaccataacctgagcagtcaactatgttaatacagcaaagagggttggatttttttgagatggagtctcgctctgtctcccaggctggagtgcaatggcgcaatcctggctcaccgcaacctctgcctcctgggttcgagcgattctcctgcctcagcctcctaagtagctgggattacaggcatgcgtcaccacgcccagctaatttttagtagagacggggtttcaccttgttgatcaggctggtctcgaactcctgacctcaggtaatccacctgccttggcctcccaaggtgctgggattacaggggtgagccaccgcgcctggcagaatttcttttcttttatacatataaatcactatgcatgcaacggtttaagcctctagatctttttccatccagttctcccatgctggatcttcctcattctgttcttacgcggctaatgtcttgaacttaagtgcagacccttgtatttattcctgttaaattatgtcttgctttcaaccctacagcctaggcccaggctgtagtgtttttayttgactttttagctagtagttctcctgctcagcttggagacatttgtaaatttgataagaatcccttcygagtctttaattcatgggtaaaaaggttggacagcatggataaggatcctatggcatgtcaccaactacctttcttcacactgaaatatctgctaatgagcatttgtggagaagactggattccaggatcctgtagaccaggactaagcaggcatatgttggggataactttgggcctgcttaaactacagtttagtttcctgagaacagcagcttgatgtcatgtttttgtctgtaggtcaaagcatgaagaaattgatctggtcagtttagaggagttttataaggaggctccaccagatatcagcaaggccgaagtcaccatgggagaccctcaccagcaaacactggcacgtctggactgggagctggagcagcggaaaaggtagcatttcctccttcctgaccttttaaccacaaagtgtcagtgctttgtcatgacccakgataaggcagcaaaacactgtgcaactctcagaatagtttctaagaccaaatcccattttatgattaaatcacactggatagtttaaacttcaccaacctcatcatggatggggttggggttataattgcttaagggtttttttttttttttttttttkgagatggagtctcactctgtctcccaggctggagtgcggtggtgtgatctcagttcactgcaacctctgcctcccaggttcaagtgattctcagtcctcagcctcccgagtagctgggtggtaggtgtgcaccaccacgcccatctattatttgtattttttgtagagatggggtttcaccatgttggctaggctgatctcaaactcctgacctcaagtgatctgcctgccttggcttcccaaagtgctgggattacagacrtgagccactgtgcctggcccttttttttttttttttttttttttttccaaagagatggcgtttcactctattgctcaggatggagtgctgtggcactatcacgactcacttcagccttgacctcctgggctcaagcgatccttctgcctcagcctcccaagtagccaggactatgggtgcctgccaccatgcctggctaatatttttatttttgtagagcagggttctcactctgttacccaggctggtcttgaattcctggcttcaagtgatcctcccaccttggcctcccaaagtgctgggattacaggtgtgagttaccatgcctggtctctccttgaaattttaatgccgaagaccttatcttttgtaccataaatctaattttgtatttgcctttccccttatctgtaagtgtatgcctatggcagaaagctttgtaaacactatttcaggaggttgtgcaacattctagtgtatattctggtgtatagaaaaatgcacaaaattattcccctgttggattttaggttgtttccattttttgctgtcataaataatgcttcagccaggcgaggtggctcacgtctgtaatcccagcactttgggaggccaaggcaggcggatcacaaggtcaggagatcgagaccatcctggctaacatggtgaaaccccgtctctactaaaaatataaaaaattagccgggcatggtggcgggtgcctgtagtcccagctactcaggaggctgaggcaggagaatggcgtgaagccgggaggcagaggttgcagtgagccgagattgcgccactgcactctagcctgggcgacagaatgagactccgtctcaaaaaataaataaataaataatgcttcaagtcacactttaggtataaacttttctatatgaataaagaggtttatttatttatttatctatttatttatttatttttttgacacagagtttcactcttgtcgcccaggctggaatgcaatggtgtgatctcggcttgctgcaacctccacctccctggttcaaccaattctcctgcctcagcctcctgagaagctgggactacaaggcgtgtgccaccacgcccagctaatttttgtatttttagtagaagcggggtttcaccatgttggccaggatggtctctacctcttgacctcgtgattcacctgcctcggcttcccaaagtgttgggattacaggcgtgagccactgtgcccggccaatttttgtatttttaatagagttgggggtttcacctccgcctccccagtttaagcgattctcctgtctcagcctcctgagtagctgggattacaggcgcatgtcactgtgcccagctaatttttgtattttagtagagacgggtttcaccatgttggccaggctggtctcgaactcttgacctcaggtgatccgcctgcctgggcctcccaaagtgctggaattacaggcatgagccaccattcccggccgagtctggttcttaggaaatttgtgtcagtgtcttagcagatggggctgacctgtcactccgctgtccagtccactgattgtgctgggcactgactcagccatcagtgctgcattcttgtggcactggtccagaatctgttcccaccctgtgctaaccaggccagtccatgggcctcttttgggttatatagctgctaagtccatgtttgtgaaagttttaggtcttacctctcaagcaagaaatggagcagaagatggcatgtgtattccctagtggttacagagcagacagagcctctggagagcaagagacatggatccaaagcctagcgcagtgtttgttcttagctggatgcccttgggcaagttatctacttgcctgagccttggtttcctcctttggggataagcaaagtccctgtcttccagggtctttataagtattaaatgtaattatgcttttaaagagctcaccaaagtacctggcacacattgagtgctggataaacattggcagttaatcatggctgctactattaggtggagtctgacagtgaacaggcatgttgaggtatcactgggggatatcaggtgacaatgctctttcctcccccaacaggctggcagagaagtaccgagagtgcctatctaacaaggagaagattctcaaggagattgaggtgaagaaggagtacctgagcagcctccagccccgcctcaacagcatcatgcaggtggggccctctggccttttgctttgccttcaccactgaccaggcgctgccagaagtcatgtcaccctttgggctttgccaggtctattaccctaaattagagtatagtataaggatggccttgtctgcatccctacccagttggtgtgataagcttgtgtctgggaggaagaaktgctggcctcaggaatatatacacacattgacctgggtgttttcatccagaggccttctctgggtaacgtactttctcagactgtgtaaatttagtttaccccctgcatggcccccaccggcctcacaatctccaggcatctaaacttgcttcctgtggatgtctgtttgatcccccgaccatgcttcagggtcagactgctcagcagatcttctcactctgaaaaaaactttactcatgaggaagagtcaacacttcgcctgtaaaacataatgtctttctgtataggtgatccactttttatttgctttgcgaagccagatttggtctaaatccttataattttatgaagcaagatggctaatatgaaagaactttgtaaaaggatcctagagataaatttgcttttcttcttaggatttggcaagatctatatttcctttcttcaactgtaagcgtagaaggagagttgttgactgcttgtggtgcctcatgcctgtaatcctagcacttcgggtggctgaggggggaggatcacttgagcccaggagtttgagaccagcctgggcaatatcgggagaccccgcctctacaaaaaaaaattaactgggcatggtggcctgtgcctgtcgtcccagctacttggaaggctgaggcaggaggatcgctccagcctgggtgatagagcagaaattaaaagttttggttgtacttaaccaaagcctctgcatggttaaattttctcttgttacctggaaattttctaaatgtccttaaatagggtacaggttaaataaattcttgtatggtacagccttagagctgtgatgaaagtatggaatcaaaccactgatatttgaaccactgacagaataactgaaatatgaaagaagatctgtcatattaaataagaaatgcaagttgtagaacatatagtatggactcatttctataccttggtttacaaagtatctgtagggatatatacaagtaggagttgggtatatgcggtatatgcttggaaaagtctatattcatagcagaccattagcagctactttgaggactgggaactgggagcttttgttttacaaacttgaataccactttttttttttttccttttccttacccacctttgccaccgccccccatgactttaaaatgctttttttttttttttttttggagacagagttgctctgtcgcacaggctggagtggagtggcgccatctcggctcactgcaacctctgcctcccaggttcaagtgattctcctgctctgcctcctgagtagctgggtttacaggcacccaccaccacacctggctaatttttgtatttttagtagagatggggtttcatcatgttggccaggctagtcttgaactcctaacctcaggtgatctgcctgcctcggcaaagtactgggattataggcatgagcccccacacccggcctaaaatgcttttttttttttttttttttgagacagagtctcgctctatcacccaggctggagtgcagtggcgcaatcttggctcactgcaagctctgcctcctgggttcacgccattctcctgcctcagcctcctgagtagctagaactacaagcgcctgccaccatgcccagctaattttttgttttgtatttttagtagagacggggtttcaccatgttagccaggatggtctcgatctcctgaccttgtgatctgcccgcctcggcctcccaaagtgctgggattacaggcgtgagccaccacacccagcctaaaatgctttttattttactttatatattgtacaattggtcctcatgcactgtgcagaatctgcaaacttgaaactcaaggcgatctagttcagtctttcccgagtcaagaaaaaaaagaaaaaaaaaaacagaagaaaagcacacaaataaaatctctgaaacaaaacctgaattcattgcctaaggtcttgaatacaacttttaaaaacagtgtaccatatattactttaaaacagagttttttatacagaaaagcatgtaactcgcaagtgtatggctcaatgaatattcactaagcaaacacatctgtataaccagcacccaaaatcccagagaaagaacattaacaatttcctggaagctcctttattccccctcgcagtccctatcttccctcacaccccagtaaccataatcttgacatcttaacatcataggttagttttgcctatttttgaactctrtacaaagagaatcatagtatatactcctatgtctggcttcttttgttcagcagtatgtttctaagattcatctgtgctattgtgagtacaagagtttgttttcattgatgtttagtarttggttgtttccrgtttagggccatttcaataatgctgctatgagcattcttatacatgtgttttggcatacatgtgtacatctgtctgttgaatatatacccaggaatgaaattctaggtcatacagtatgttatacatatatttagcttttgtagacactgaaacagttttctaaactggttgtaccgatttacagaaattcccaccagcaccatatgcaagttctaattgttttacatccttgtcaacactttatactgtcagtctccttaattttggctactctggagggtatctcattatagttttaatttttatttccctgaggactagtgatgttgaacacagcacrttttgccttttggataacctcttgtgatgggtctaggcaagtcttttgcctgttttctgttgggttgcctggagatgagttttttcccaggtcttycccattctgtaacctcctgccttttcactttgctaatggtatcttttaatgagtgcatgttcctaattttactaattattcttttcctttatggttagtactttttttgtgtcttgtttaagaaatctttctatttaaatctgttgtcatcctggaagtgattttgttagttaagggtaaagattcattttttctttccacataggtatttagctgaccatttattgaagacattctctttccactgctctgtagtgccacttttgttacaaatcaaatgtctttgtacatgtggatatgtgtataatctctgtgtccatccttgcacagtatcacactgtcttatttactgtggctttatcagaagtctcgatgcacagttccaacctatttcttcaggattgtcttggttattcttggccctttgcatttacatacaagtttcagaatcaggttgtctgttttcacctgctgggattttgacagggattgcattgaatctgcagaccactttagaataaattgttacctggacaatatttgagtcttccaggccattgacattcacatgtatccacttattttagacttttcatttctcaggtttttgtgtagaggcttatatgcctttcatttgtttattttattttgttttattttgaggcagggtcttgctctcttgcccaggctggagtgcagtggtacaatcttggctcactgcaacctccgtctcccaggttcaagtaattcttctgcctcagcctctggagtagctgggattacaggtgcgtgcccccacacttggccaatttttgtatttatagcagagattgggtttcaccatgttggccaggctggtctcaaactcctgacctcaggtgatccacctgcctcrgccycccaaagtgctgggattacaggcatgagccactgcacccagcctgcttgtttattattttttgtttgttttttgagacagagttttgctcttgttgcccaggctggagtgcaatggcatgatctcggctcaccgcaacctccacttcctggattcaagtgatgctcctgcctcagcctcccgagtagctgggattacaggcatatgccaccacgcccagctaattttgtattttttttagtagagacggggttctctgtgtccgtcaggctggtcttgatctcccgacctcaggtgatccatctgcctcagcctcccaaagtgctgagattacaggcgtgagccactatgcccggcctgtttattcttatttgatgttttattgatggtattgaaatggcatctttttataatttctttttttaaattgatttttattttttgtggaaatggcatctcgctaagttacccaggctgctcttgaactcctggcctcaagtgatcctcctgcctcagcctcccaaagtgctgggactatgggcatgagccagggtgccctgacagtaggtaaaataaaacaattttatttccttactgtttgttgctagtataaagaaatataattttgtttacgttgagcttttatccacctattagttctattagtttatcatgtatcacttttataaataatgatttacggtcactaagtagccactttttcctgtgtggactggctaaaaaaggaagaacaaaaatctgtctctygtgtgcaggcttcccttccggtgcaggagtacctgtttatgccattcgaccaggctcacaagcagtatgagacagccagacacctgccgcctcccctctatgtcctctttgttcaggccactgcgtatgggcaggcctgtggtgagtatggggcctgggtgaggacaaggggctatgggagcagcagctgtggccgagtgaatcagttggaagcagtacctgctcaggaaatttctcagtcctgcccgaagccctcaggtgacagaagctttcttccctctgcattgcccagcatggctgctctgaccagctggcctaaggctggattaacctgatgggtatttcacaatgggtggctttgartcattcgtgagcctggctggacagctcttgggtgcagaacccaggcagcctgtctgggctcccaggtgctcaccccatcaaggcacgcttggcagttagatcagtgcctcttgctctgcttcagggtgggggtgcctggtgaatacaggtctcagccagctctcccaggctttcaccatgccttgaatcaggctgcatgtctttgttgtgaatttccaggttagatgatatgtcctcattaagcttgagggcagcctgtgactctgctagggttttgagaaaattttggagactctgccttttgccctaatgcagctttcacccagcacctacattttctcccccaccccaccccacctcatcagacagacatayaccgcaccagtgcttgcttctcctcccaccttgggcaccaacacattactgtctcttcttgtgtcttcctcgtccttctggtcctcccctcccctttgttctccctcctgtttccatcatcagctcatatgaaatcctcccagccccctagacagggtgagtaattttcttttcttttatgtttaaaatcggcctgttccattctgatgttcttgtagaatgctaatattaaatggctgaaaaaaatagtctgttgtttgccagtgcttgatgggagcaactagttgcttggggtgaagggtggtgattcacatagggttgccatagataaggcagtggtcagccacttgggggaagtttgccatccctccttagtgtggctaggcaaaccgtttcaggctcttgggaccatatgtacccttaagaatggagttggacggtggtggcctgtctgacctcacaacgctagaccctcagagggggtctcaagacatcactcaatgaggtgtcatacctggtgtatgcaacaggctgttagctcatgtgctggagaggccaagcttaagttgaacagacctggtcttgaatcctggtttatcagccttatagctgtgatgtctagcttctctgagccttaagtttctcatctataaatggctataatgtattactcctgtagggttgttgtgagtattaaaaaaaatttttttttttgagatggagtctggctctgttgcccaggctggagtgcagtggcatgatcttggctcactgcaacctctgcttcccaggttcaagcaattctccctgcctcagcctcccaagtagctgggattacaggcacccaccaccgtgcctggctaatttttatatatttagtagagacagagtttcaccatgttggccaggctggtctcgaactcctgatctcaggtgatccactcaccttggcctcccaaccagacatgagccaccacacccagcctaaaaattaatttttaataattttataattaaaattacaagcatcagctcattcagtccccaccactaatggggcagctactgtttttcttttttcttttttttttgagacagagtctcactctgttgcccaggctgcagtgcagtagcatgatcttggttcacagtaacctccacctcctggattcaagcaattctcctgtctcagcctcccaagtagatggggttacaggcacatgccaccacacacagctaatttttgtatttttagtacagacgggattttgccatgttggccaggctggtctctgaactcctgacctcaggtgatccacctgcctcggcctcccaaagtgctgagattacaggtgtgagccactgcacccggcagctactatttttcaagtccccttttcatagatacagaaactgaggctcagacagtgacataactttccaggtcatgtgtttgagaattggttaggcagggactcaggtctggaactggactgcaagatccaagttcctattcactgtcctactgcctcccagttaagtgagacaatggcagccatgtgcttggtatagtgtagaatagagaataagcacttaggtgagagtcattgtttctgggatgtggacaggtgtggatttctgggtgagaacctctaagacaactggcagaggagttccatgtggctttaggccctcagtttgaatttctgtgctttggtgtgcaccaaaaaagagaggcattcactgctagtttcaggtgatgctggtttaggaatttgtacttaagttctctgttctcagtaaatgacggaaaaaaaagcttaagtgtcccaccttgtttcccttcatctggagcaaggacttttgcccttccacccttagtcagcaaggagctgggcagaggtgggagaaatgcagccccagagcyggcctactcacrctgcttagcagctttcctcagcagctttcctaacagacttcttcttgccccccagataagacrttatctgtggcaatcgaaggcagtgtggatgaagccaaggctctgttcaaacctccagaggactcccaaggtaatgtggtggttgggattcgtcccccagggacaccaggtcaccatccaagggcagtcctggtctttggagaactagctggactagttctgtgtagcaggaagcttsacttgaatgtcttagcaccctggagtagacaggaaagagagctcacttcccggagtcacaaggtgcggcccgtggatttcagccctgccactcactagctgactgaccccgaggaaggtatttaatatttcagagcctcagtttattcctttgtgaaaacagatagtaacacctcatgtaggattgttatgtggattaaataaggtaatgcacatacagcctttagcataattctcagcacatagtaccccctcaagttatgcatgcttctactactattattattatttgtgttactattattaccacagccaccaccaccatcacaaggaggggcttgtgttccatctaaatgacatcaaaaagccctttgaaaaaaatgagttatacgtcattcttcttttttcttttttcatcaccatgttttgtatactgaataagaagcagcaagttaatttattatttattacagagaaacttatttacaaaagacagagtcagggcccctttatgccatgtgggttggagtgctttaggragcatttggagccccctcacctctagctgccttctctctgtggctgcagatgacgagagtgactcagatgccgaggaggagcagactacggtgagaaccatttcctcttgtgggggcatcaagcagctgcatgcactggggcatgcttgttcgcaggtgccrtcctccctagaagcagaagaggtgtgaaagaaggtgctgctgggaggggagtctgacaacccagctagctgaagcagcaggtgccaggcagtagggctgaggcctggctggttgggagagggaaggggagrttgctatgactgatgctcatcagcttggcactttcctttgtccagaagcgccggagacccacactgggggttcagttggacgacaaacgcaaggagatgctgaagaggcacccactgtctgtcatgctcgacctgaagtgcaaaggtctggttgcactcaccttgtttaagggatctgtagcacctaagagttcacccagctgcaggtgcagagggtccgggagccaaacacccatttgcccaacaaaggattcccatttcatattgctttgtttttccttattgttttgcatggactttgtttctttttgttaaatcataaccgtaacaacatagcaacaaaactccagtcacataaggcagaagcttgagaaaactatacctctttctgaatctagcaagtcaaatatctagaacaagttgcaaaagtatacaggtttttagtaagaccaacatgtttaataaatgtaagtagaactttgtattctgcagagtatatgttttgaagttggtttgtatgaaaaagtaccatataataaaatgttctagcagtagaagagctaacagtaaaatttaagtttccctctcaccacaggttcctatataccagtcctaggtctcacctccaagggcaaccattattacagacttcttatgtattttttagaaagattctttgcacctggaagcttttatacaaatgtatatttatctgcttcccactttattttttacacaaatggaaataggctctacgcactggttttctttttgctggttgtttgtttgtttgtttgtttttagagatagggtctcactctcgtcatccaggctggagtacagtggcatgatcacggctcactgcaacttcaacctcctgggctcaatcgatcttcccacatcagcctcccaagtagcgggggctacaggcatgtgccatcatgccagttaatttttgtattttttgtagagatggggttttgtcatgttgcccaggctggtcttgaacccctgggctcaaacgatcctcctgcctcagcctcctaagtagctaggactggaagcgtgcaccaccatggctggctttgagataattttaggctcatagaagacttgccaaaataacatgagttcctatatactcttcattcagcttccctaaagttacatcttaattaaagatggtatgattaacagcgatccacaccactcttaatttcattggcccaatactgttaacaaaatgacagaatttttttagtttcttccttttttaattaatgtcctttttctgtcccaagatccaagccagggtctcaaagtgcatttagttgccatgctccttagtctgctctaggcagtgagtgtctcagtctttccttgtgtttcatgaccttgattagactgagattatggatttgggggagagaatagcatagatgaggtcgtcgctatcatgtcatatcaggagtacctgatgccactgtattatttctgctgatattgaccttgatcgcttggttccctttccatcttgtatttgttagaagcagagtcactaagtccagcccactctcaagggcagagaaattaagccctacctcttggtgggaagcgtagcaaagaatttgtagatgctctccttgcttctttttgttcattatattactgttgtgatttttttttttcttgagacagagtctcgctctgttgcccaggctggagtgcagtggcgtgatctctgctcactgcaagctccacctcctgggttcacaccattctcctgcctcagcctcccaagtagctgggactacaggtgcccgccaccacgcccgactgattttttgtatttttagtagagacggggtttcactgtgttagccaggatggtctcgatctcctgacttcatgatctgcccaccttggcctcccrgagtgctgggattacaggtgtgagccaccgcgcctggccgattttgtttttatagtaaatgattgtaaaagtctctgaatttttctataattctgtttttctttttttgttataatttcaacttttattttcgattctggggatacatgtgccgatttgttacactattttgcgtggtcctgaggtttggggtatgaatgatcccgtcacctaggtagtgggcataatacctagtagttagtttttcaacacttgacccccccaccttactaccccctatgactctgttcactctgctctgagtgttttgactcataaattctctcatcttcctcccctccagatgacagtgtgcttcacctgactttctactacctcatgaacctcaacatcatgacagtaaaagccaaagtgacaactgccatggagctgatcacccccatcagtgcagggtattgagcaggcgctctgggcaatgacgtgcgggatggggaggtgatgagagcctcattgtggggctgctctcggttcctccctctggctctggagagggctacggctgtgttgacttgtcttgtatccagatggaccagaagtcctggcacatcgctggtatttagaaagcactctctgactttaatttgtgaagtcctcttactacacagcagatgataaaagtgacaacagcatatttgcaaattgagtaggtggggcagagcaccagctttttgctaccagtggaaagtgtgtgaatataaaatgagatttggcagacattattaggttgccarattcaggccactctttcccttttctctttctatcccaaggtgctgggatttttgctccccagctcagcccaagcccatgtccttatctgggtggtgggaggactgtggtgggtccctgtgaaagttttgagaagagtgagcagaggcacagtaatgacagccatcatcgcatccccaggaaggccctgactacagtgttctttttttaatttctatttttgttgatacacagtctcactatgttgcccagactggaggaccatggcataatcatagctcactgtggcctcaaacttctgggctgtagtgatcctcctacctcagcctcctgagtaactaggactacaggtgcatgccaccatgcctggctgactttctatttttattttatagaaacggggtcttgctgtgttgcccagggtggtcttgaactcctggcctcaagcactcctcccgtctctgcctctcacagtgctggaattccaggcatgagtcaccatacctggcccaatcatggcattcttcttctgcaaacatgggcgggaagaagggtcatgcggggctgagggtgaaatagcttccattcacaagagcactgccctgacctagtcccactgtcagctgcagaaagaccactgaggcttagggaggtacagctctggtgcctgktagagcagggctctttccacccctgccagttctccatgatgctggtgtctcttgggttttagactgcccttagagtccacatccccttcaggccatagcagctttggctgctgtgcctgagagtgttgttggacacccccaggggtgctctggatgaaattgcccctgttcccatctgaccccagcagagggagcccagggcttgcttctgagcacccagttacactgtccagggctctcagttcattgaggagttccagggcccccagatcgtggtagagctcatcatgaacattctgcttgttcatttctcaggtgccctacatgctaataacagggctgcagcctggctttattgcatgctcaactccagctcttcactaagctgtatacctggcctcagaatctgtttcctcgctgtgtggttgttaattgtaatatcccctcccagggtgcttgtgaagagtcaggtcaagtgcttagcatagaggaagcacttggtaaaggacagctgatttatwatcattgactcttgtaactttcacaatagctctatgaggtgagttaactgaggctctggacagttaaggggtagcctcaaggtcacaggtagagagtggagaattatgattcgaagtcagcaagacctgtataccactgctgtcatagccaggtgggccctgacccccaaacagggaggagacataaaaggagatgccactgtgaaactgggattaggtcttttaggccttcaggtgttgtctagctcatcctccttttacaaatagagaaactgaggtccagggagcatacaaccaattatcgcagcactggacctaaagcccgagactctgggctcccagcccagaagcctttgctcaaatacaggctgcctttggccacatgaagacagcaacctggcatacagttttattgatttatctattaaaacataaagggtatattctcacactaattcttgaatctcrtactatcattctaatttccctgatttttttcatatattttttgggggagggagttttcagacaaacaattttttttaatagttttgtgttttgagtctggatcactataaggcccatacattgccaatgagcaaagcttctttcaagtatcttatcagagggtcctgccatctcttttgttttctcctaagattcattgtcttgggctttccaccgtctttgtatttgttggagaaaatgggtcgtttgctctgtaggttctacctagtctggattttgaggactgcgtccctgtggtatcgttaaacgtgttcgtctttctacctgtgtgttcttgtgaacagggagttggcttagagacttgatcagattaggttttcgaaatttttttgtggtggtggggtgggtagagggcaggactgtatcatggctgttgttgaatacttccatcaagaggcacaggctctctttatttttgtgatgttactgtcttgacractgttgcctagatccattaattcattagagaatttttaaaaatcctccctgacagagttaatgtttttattttattatttatttatttatttatttattttgagaaggagtctctgtgtgtcgcccaggcyggagtgcagtggtgagatcttgactcactgcaacctccacctccctggttcaagtgattctcctgcctcagcctctcgagtagctgggattacaggcatgcgccaccacgcctggctgatttttgtatttttagtggagatggggttttgccatgttggccaggccagtcttaagagttaatggtttggttttttgttttctttttttcttgagacagagtctcgctctgtcgcccaggctggagtgcagtggtacgatctcagctcactgcaacctccgcctcctgggttcatgcagttctcctgcctcagcctcccaagtagctgggactacaggcgcgtgccaccatgctgggctaatttttgtattttcagtagagacggggtttcaccatttcggccaggatggtctcgatctcttgacctcatgatctgcccgcctcggcctcccaaagtgctgggattacaggcgtgagccaccacgcccggccactaaggtttttttaatcccttactttttatcaaaattttataacaaagatttgactggttgagaagtttttttgttttggtgttatatttttatgactataaatagcctttccttttatgttcatcatttttaccaagttcagttgtcttagccatatgttgcagatataaattttgccaagaaggtgattccttcatcaggttttgtcaattaataaccttcatcrtgggcagttttagttctgttttatttatttactaatagattgaatcaatctattagtaatagtccctaaacacttgctaaaagactgaaaagttttattttattttattttattttattttatttatttttttgagacagagtctcgctctgtcacccaggctagagtgcagtggtgcaatcttggcttattgccagctccgtctcccgggttcacaccattctcctgcctcagcctcccaagtagctgggactataggcgcccgccaccatgcccagctaattttttttttttttttgtatttttagcagagacggggtttcaccgtgttagccaggatggtctcgatctcctgacctcatgatccgcccgtctcggcctctcaaagtgctgggattacaggcgtgagccactgtgcctggcctgaaatgttttatttgtttggtagtcagttctccatttgaggtggtgaagggggcaaagaccttggggaacagggatactcagtgagacacagtagggaagagctggaagcctccactgtcctagcatggagttcctgaaggcatgctggggccaaaacgcaggaccggcacgtgctgcccaagttgctcctgacgttatccatggaaagatgaaggagaaccccctttggttcagggaaagaatgggccttgtcatcctttgtgataaaattactacattaccctcccacattatctcttttttgcttgtcacatttaatgacaaactgtgcccgaaccatcccaggtgggtggcagtggcgtcactatttctctccgcttgtagctgtgggtctccagtgtatgtgattgtatctttttctgggaacatacagggggccttttcctgtgatgagcataagatttggtcaaagtgagatagacatagcaccaaagctatacacttgttctctctgtagcagaaaggagtctgttctgcttttatgaaaattgaaattatttctactgatggtgtcatgggactttgctcccctgaggtaaggccttaggcaccatataaatcttgaagggatgagttttttaaaaattaatgattaagagtactagtctgtttgatcagacaatataaagccacctctagcacttactagcagtgtgatcttgaataagccatatcttttaaagccttgagtttttcctctataaaatggaaatgataatcctccctcatagggttgtaaggatgcaatgacctcaagcatataaacggtctggcccacagaargccttcaataaatggtggcattggtcatcagtgagacgtggcattaccatccccaaatgcccaagcctatgttgaagaaagatgttggctgcattctcactgcttactgtttttccttttctagtgacttgctgtctcctgactcagtcctgagttgcttgtatcctggggatcatggaaagaaaactccgaatccagccaatcagtatcagtttgataaagttgggtgagtcagcagtttcctcctctycgagctctctacttctgagtttctctggkggctcaagctaaatgctggagacctgttagggccagaggtgacccagaggataggaaagaccacagggtagaaggaaatgtttgttctttcttgcttacaaggcaaagggagatcacaaaaagggtggaaggatcaaaactcggaaacatgctgggtgtggtggctcacgcctgtaatcccagcactttggaaggccaaagcaggtggattccttgagctcaggagttcgataccagcctgggcaacatggcaaaaccctgtctctacaagaaatacaaaaattagccaggcatggtggtgggcatttgtagtcccagctactggggaggttgaggtgggagaattgcatgagcccaggaggttgaggctgcagtgagccatggtcatgtcgctgtactccagcctgggggcaacagagccagaccctgtctcaaaacaaaaacaaaaagaaaaacaaaaaaaaccctctggaagcataataatacgtgatacaataaaaatgtttgacattttaattatccgaggattaatttttaaaagattttctaaattggtagaccaataaagacattagtacactgcctttgtatttgatatttgcttataagttgaaggctgcaagaagaaaaggaaaaagaggaaagtgaatgtgagagagatgaaattcacagtagggaactgacaaagttgaagggctttgccagcagcctggctgtgaacatggccaaacctgcaggactggatggtttgtggggcatgggagggtgggaggaggctgtatcctgggaccacagcagaaatgacttacagcacaattttatttatcttcttttctgcagcatcctgactttgagcgactatgtacttgagctaggtcacccctatttgtgggtgcagaagctgggtggcctccacttccccaaagagcagccccaggtctgtacactgatctcatctagttggctgaggagcttacctcttctcttcctgtatagactctagaaaggccaggccaggtgcggtggctcatgcctataatccttgtactttgggaggctgaggcaggtggatcacctgaggtcaggagtttgagaccagcctggccaacatgatgaaaccccatctctactaaaaayacaaaaaattagctgggtgtggtggcacgttcctataatcccagctattcaggaggctgaggcaggagaatcacttgaaccagggaggcagaggttgcggtgagctgagatcatgccactgcactccagcctgggcaacaagagcaaaactccgtctcaaaaaaaaaaaaaaaaggcctgtcatggcctttggagttttgaactggcagaatgtgtcccctcagggctgtgacctgtcttctatccactcaggacactaaaatgtcttagacttacaagagtttacgtaccttttgcattttctctgagcctagtagccttttagacccaggcaacttgagtccttgctctgggactcatgtctgcaggctctgctgcccttgttcttgtgygcaagtaccaaatatgaggcatgagcagaaatccagggggcctggccccttagcagaagcctgcctttcctcaggagttggacacagcttctcaagaacgcagcatattgtgttgtttctgccaggactcagcgtctggcctgtcatagcagataaaccttgccatgtctaaagggtacccatcttggggcatggataatccagggtgccgcagacargcaggtcccaggagagagatggtgcccggaggaagggatggggragcacacgtgtatgtgtctcattgtcactcacagcaaacagtgattgctgaccactcgctgagcgccagccacatggagaccaccatgaaacttctgaagaccagggtgcagtcccgcctggccctccacaaacagtttgcatccctaggtaagctgatgatggggcagtggtttaagagtcactcagacaacacacggacaacaacaacttagcctttcactcaaaacttgaatcctgatgacaaatacaagacctggattcctggctttacggagtgggcatcttggcagagccactggggagagctccaggcctgtccaggcagaggaccgagctcccccttagagccatcagtgctgtcctgcctcacagaggaggcccagagccattgggtggcacaagtttgtggactggtcggggcagttcatcctaggtcatgcattgcagattttgatgtgcattcgacacatatttagtgagatcctgattcatgccaggcactgagcatagtgctgggggaagaactgagcacagtgaacccctgcccctggctctgtggctcacagtcagctttttgaatatagctatccagggagcaactcgcatatcccttccccaaggcctactgacctcgtgttccccagggtgaggctgagcctatgttttcttctaagctcccaagtgataatgatgagccactgacttaggtggtggcatttgggggcttcttttagtttattcactcagtaagtggttgtcaaatgcttaccatgtggcagggggatggggtcaagatttttctgayctaaaagagtctctgggacaggcgcagtggctcttgcctgtaatcacagcactttgggaggccaaggcagacagatcacttgaggtcaggagttcaagaccagcctgccaacatggtgaaactccgtctctactaaaaatacaaaaattagctgggcatggtggtgtgcacttgtattcccagctactcaggaggctgaagcaggagaattgcttgaacctgagaggcggaagttgcagtgagctgagatcgcatcactgtattccagcctgggcaacaaagcgagactccatctcaaaataaaaagtaaaaaataaaaaagagtctctgtcaggaaaggcattgggtttccaggacacatctggagaccactccccaccagttcttagactccacatggctgccgatctctccagagcactgatgtttgtccatcgggccgtgctccccatcagcactgctgagtttgttttgtcccaaggtagggaacttgtcattctggacagtacttactgtgttggcatatttgcttattkaaatgccagcaggaatttaccctggagcagttatctggctcttctccctgacacacaacacttcagttgtttcctccatcaaggtcagctatgaaaacacaggcctctatgctatttgatctaattaacagtcactgctgcaggggcaccctccctagttctgactgtaagggtttttctttggcaggctatcatttgcattaaagagaaagcaccataagtgctggcrctggatctggccacaagcacatagcactgggtgaaggtcaggttgacatgcttgcattcctggcacgtgttgacctgggtacttcctgagtaccaggtataccaggatagctggccgggccatctgagcccttcagagagccccaggaggatgctagttacccatctgtggcacctgatttctacctgtgacgtcatctgtcttgttctcttttagaacatggcattgtgccagttaccagtgattgccagtacctcttccctgccaaggttgtctctcgcctggtgaaatggrtgacarttgcccatgaggattacatggtaggtgaaggagtgacaagttacccttactgtcctgaggattgcaggaccatgtcacctttcagctcctgccacctcactggaagagcagggggtttaaccagaggagccagcagttcacctcttgtctgtggtacctcttctaggagctgcacttcaccaaagacattgtggatgcgggactggctggggacaccaatctctactacatggcgctcatcgaaaggggcacaggtaattgctctsctgattacagggrttctagacaaagggcgctgccaagratcaaacactctccggggctgcccaaagcagaagatcctggagtcctgcaaggacttaacagataataatgatcgtgagagcytgttcagcaaggactcattctgcaacacagtcacacacacgctgtgtatcactgaaccctcactgcagtcctaggggtggtgctttcatttctattttacatgggaggaaattcaggcttagttgcaagcccagtctgagcgctgagcctgagctctttgctccttccttcaccgctttctagtaccggacatctcctccttctccctcttcataacagggctgaggtgtcaccctcaggttgtaaagggcagggccacagggcctcgctccctcttctgcagtccctgcactcactttagaggcattgaaagctctgattcttcatacctcttctggcatctgactctgccagggctccctgctgaagtcctgggatgttgtgtttgggccgttgtgctgttgtcccacccaagccgcagcaagcctggcactgcccgtgggatctgacacccycaagacttggtgctgagctgaggaagttgtctgtagttctaagacagttccagaactgtaaggaaaggctgaactctttggtatcagagtttctgtcctcactaccccactttcttctctttctattcttcatgtcttttaaaaaaaaaattctgaagaaactgaatatttcagatacagttgaggcctccctatcccactttattccctttctcctaataagtgaccactatttggattttatgcatttgctttccatcctttccccgcyacacccttttttttttttttttcagtagagataaggtcttgctttgtcgcccaggctggagtgcagtggcacgatcatagctcactgcaatcttgaactcctggactcaagcaatccttcttccaccttagctccctgagtagctgcgactacaggtatgctaccatgctcagctaagattttttgtttttgtttttgtttttttgtagaggcatgttcttactatgttgccaagcctggtctcaaactcctggcctttcttccaaagtgctgggattgtaggcatcagccatcatgcctggcctctcccctttcaaaatttaatttaacttattttttgagacagggtcttgctctgttgcctagactggagtacagtggctcagtcatggctcactgcagcctcaactgcctgggctcaagtcatttccctacctcagcctcttgagtagctggggctacaaatgtgcaccaccatgcttggctaattttttttttttttttttgtagagataaggtcttgctttgttgcccaggccagtctcgaactcctaggtttaagtgatcctcccaactcggcctcccaaagtgctgggattgcaggcatgaaccaccacacccggtcttccttttatctcatccctaaacaacataaagtacaggcatacctcagagatattgcaggttcagttgcagactaccacaataaagcaaactttgcaataaagtaggtgacacaaattttttggtttcccagtacgtataaaagttatgtttgcactatagtctaagtgtacaatagcatcatgtttttaaaaaacaatatacagccgggcgcagtggctcatgcctataatcccagcattctgggaggctgaggtgggcagatcacctgaggtcaggagttcgagaccagcctggccaacatagtgaaaccctgtctctactaaaaatacaaaaattggctgggcatggtggcatgcacctgtagtcccagctactcaggaggctgaggcaggagaatcgcttgaacccaggaggtggaggttacaatgagccgagatcatgccactgcactccagcctgggcgacagagcaagactctctttcaaaaaaaacaacaacaaaaaacaatatatataccttaatttaaaagtactttatgggctgggcatggtggcccatgcctgtaatcccagcactttgggaggctgaggtgggaggatcacttgaggtcaggagttcaagaccagcctggccaacatagcaaaccctgtctctactaaaaatataaaagttagccggggttggtggtgggcacctgtaatctcagctacttgggagtctgaggcaggagaattgctcgaacccggaaggttcgagcttgcagtgagccaagatcgagccactgcactccagcctgggtgacagagcaagactccgtctcaaaaaatatatatatatatattttttcatttgagtgcattgtgaaattgaaaagcaaaatttagacgaataagtgggcaacaattgcaaatataattcttcagtcatggccgggtgcggtggctcaggtgtgtaatcccagcactttgggaagccgaggcgggcggatcacgaggtcaggagatggagaccatcctggctaacatggtgaaaccccatctctactaaaaatacaaaaaattagccgggcctggtggcgggcgcctgtagtcccagctactcgggagggtgaggcaggagaatggcgtgaacccgggaggcggagcttgcagtgagctgagatggcgccactgcactccagcctgggtgacagtgcgagactccatctcaaaaaaaaaaaaaaaaaaattcttcagtcattctacaacagatccatttggaaactttctgtagtgtgaatttaaaaattggtgaacagcctgggcgtggtggctcacgcctgtaatcccagcacttttaggtggaggcgggtggatcacgaggtcaggagttcaagaccagcctggccaagatggtgaaaacccgtctctactaaaaatacaaaaattagctgggcgcggtggcgcatgcctgtaattccagctacttgggaggctgaggcaggagaatcgcttgaacttgggaggcggaggttgcagtgagctgagattgggccattgcactctagccttggtaacaagagcgagactctgtctcaaaaaaaaaaaaaaaattgatgaacagagataaatccagaaatgtatgctgattattaggacagaagcaatacagcagcagagaaagaaaatactttttattttatttttattttttatttatttaattctttatagggatgaggacttgctatgttgaccaggctggtcttaaacttctggcttcaaaccatccttctgcctcagcctgccattgtgctgggattacaggcgtgagccacgacgcctggccagaaagcactttttatttatttattttgagacggagtcttgctttgttgcgtaggctggagtacagtggcatgatctcagctcactgcaacctccaccttaccaggttcaagtgaccctcccgtcttggcctcctaagcagctgggattacaagcatgtcccactaggcctggctaatttttgtatttttactagagatgagatttcactatgttggctgggctggtcctgacctcaagtgatccacccacttctgcctcccaaagtgctgggattataggcgtgaccccccatgcccagtccagaacactcttttttggggacagggggaggtaaagcaactttttttttttttttttgagacggagtcttgctctgtcacccaggctggagtgcagtggcacgatctctgctcactgcaagctccacctcctggattcaagcgattctcctgcctcaacctcctgagtagctggtagctgggactacagtcgcccaccaccacgcccagctaattttttgtatttttagtagagacggggtttcaccatgttagccaggatggtctcgatctcctgatctcgtgatccgcccacctcggcctcccaaagtgctgggattacaggcgtgagccaccgcgccagccacaactttttaattaatgttctgactgttagggaagaattgtgttaacctctcctctcctctgttatttgaataactagtggtcagagagtgaaagtctcccccctaaaaataactaaaaaggaatggcatacctatcccacttgagaagataaatgtcttcctgttgaaaaaggcaaaggctttcaccagagaataaatgagtatgttmaaaaacacaaatattttgtttaatgattatgaacacagctttgatatcagccagttctggttaaactcagcactgctaccttccaactatttgatggtagggaagtttctgtcagagcctgtttctttatgtgtaaaatgaggatgaggataatagtacctaactcatagaattattgttaggatgaaataaaatgtgtctagagggtttagcacagtgcctgggatacagtaaggactctctacatgttggctagtatacagaattttatgtaacaaagtatgtaaaaatcaaatgaagaaaatagagaaaatatatttgatgtgatagttgatacacagtattgttgaaaaattagtaagctttcacatggagaaaaccttagcttgctggcaaataaagaaatgacaattacacttctatcaaagtagcaaatagaactcatggagagagccaaggtggaccagactctggggagtccgcagctttgtggcacagtaaatatgtcaaagtccttggagagaccaattataggacctcacattctgcaagctggcaattccacttaggacattctggaacagttggtaccagaatatactctgcagcattcagattaataggagacatctgagctagcctcaggggtgcagtggggaggctgccatggctggcaagctgagtcttagaactgngcatttcccctctctcctctcttcccagccaaactgcaggccgctgtggtgttgaaccctggctactcctccatcccacctrttttccagctctgtttgaactggaaaggggagaaaaccaacagcaacgatgacaacattcgggtaagacccagctggggatgacaggaggagcaggcagagctcccgggggaggtggccgtggcagaacccactgcagctgaggacttgggcactgccttaattcccaaaacagaaggttgtgccaggatttgcagaatttgctggagcttgtgtggtgtamtagaggaaagagcccagacctacttgcctaccttggggtccacaggtttccccacttagagagtaaggagaaatacctaccttgaaaggttattggcttgggctcctataaaaaatgtgaataagctctgaagcattatagaagcactggaatgacatgaggaatgacatcaytgcagttgttaatcagcattgcagctgttaatcagcaytgcagttgttaatcagcattgctgctactaagtcaaacatgccatggaacacgtttttaaccaacatcttctgacttaggtcttattttgagactgcttccctgcacacctctgttttcctggctgtgggcatatgaggcaggraaagctatgggtcagaatcaggaaracctcattgtcttgatgagggggcctgaggacaagccagtctagcttgatctgatggcctagcccctgrcccagcccctgcagaggcatcagcrctygggcccatccagggacggaagcctggccagtgtggtcccccacatgcaggaaggtagtgctgagatgctggctttcctatcacacaggccatggagggcgaagtcaatgtgtgctacaaggagctgtgtggcccttggcccagccaccagctgttgaccaaccagctgcagcggctgtgtgtgctgctggatgtttacctggagaccgagagccatgacgacagtgtggaggggcccaaggaatttccccaggagaagatgtgtctgcggctcttcaggtgaggagagggttggggctctggtgacttctcatggtgatgtgggacagagatcagagccagattttctggggagagcttgcttcttccttcctgaaacttcccctgcagccgatgcctatcactctggtccacctgtttttcactaacacctcctgaaggtgttagtgccaggtctgagccaagaggatttggctgaactttattttctatactttctgtggaaaacaatagagtttgtttgctttttagtgtccaaataagctttttaaactgtgtgcatcctcgcctgtccccagggagtctgctgtggtctttctagggtactgtcctgtcagtgagaatcacagcttaggcagtcaggtggcacagaaggaaccagcttcaaagtaaaacagataggagtgcagatctctgttttgctgctgaccttagaagagtcagttctgcttagctctgagccctcctccagctttttgtttgtttgtttccttttctttgagacacggtcttactctcttgcccagactggagtgcagcagcatgatcatagcccactgtagccttgcagtcttgacctctggagctcaaacgatccttccgcctcagcctccctagtagctgggaccacagacatgcaccgccacacgcaactaatttttaaatttttttgtagagatggggtttcaccatattagccaggctggtctcaaactcctaggctcaagtgatcagcttgtctcagcctcccaaagtgctgggattacaggcatgagccattgtgcctgacccctattttctaaagacagaaatggtgaaagtaataccttctagctcatgatgaagcagaagtaattcatataaagtcctggcacaggactgggactcggaaaatgccagcagttcctgacagcttggtactcaagagtgtctgggctcatggcacttccagctacttttcctttctctttcattttgggtcctttatttccctttcagcctctaactcatgttcttttaagagtcagtttcaaaactgcagatttcactgctcaggcatcccttcccttctgcatgaggttggcggggagcagtgtttgggaaggaagaagagtgataatctgtttctaatcagaacatccccccttgttccctgtcagtctacacagtgccttatctctccctcaccttgttctctgttccctgtcagtctaagcagtgccttacctctccctcaccttgttctctgttccctgtcagtstaagcagtgccttacctctccctcaccttgttctctgttccctgtcagtctaagcagtgccttacctctccctcaccttgttctctgttccctgtcagtctaaacagtgccttacctctccctcaccttgttctcagacagccagttctagcccctagaagcagtcccagcatcctttcacctcatctgacacctccactggcctggttcattatgttatctcataataaccagttccagctctgagtggctgctgggaggtggagctggtggccagatgctggcaccttctaggacttgctctctccctagagggcttgtgtgagacctctgctcttctcacctgcccagcccaytctagcacattgccagggtgggaattctcacatggccagcattgatttcctcttctccagtggttcccaaaggacccatttctttttcttttttctttttttttttttttttgagacagagtctcactctgtcgcccaggctggagtgtagtagcatgatctcggctcactgcaacctccacctcccggccaaaggaccccattcttgaagggctttgttgtgtctccaggctgagctcctctgtcagcattctgggaaggtgctccttcagtgactcagatccagttaactctatggccggtagatgtgagaggcaaggctctccggccaggatgcagagtgctggcatgggcagcaagagacctgaggccaggagttccaccagcctggccaacatggcaaaacctaaactaaacctcaacctaaacccgggcgtggtggtgcatgcctgtaatcccagctacttgggaggctgaggtacaaaaatcctttgaacccgggaagcaggggttgcagtgagccgagatcacgccactgcactccagcctgggcgacacagagactccgtctcaaaaaataaaaaaaggaacaatcctaaaaagtgagggtgcctaaagctatgtccccgaagtgccactgtcagtgagggcctttccaagtttgtgttcactcatttgcaagcacaaaaagacatttttacaaaaatagtatcgcaccttatatgttgttctgccgtatgcttttctcaacaacattctgtgtcatgtaactctgcctcttctttttcccttgtgtgaatgaaccataatttattttatcagcctagaaggtgtgttattaacaactccgttctcctrtttctctaggggtcctagcaggatgaagccatttaaatacaaccatcctcagggattcttcagccatcgctgatctcccgcgcagaccgttgtttcccccaaggcctcaccctgagcactgggcttctgctttctgctctggcccacatgtgactcttgatattytccaaagacaccagccaattaaaaagcgtcacctgaccagtggcctttgtctgtggttcctggcaaggtggctttgcagtctggaagggcaggtgggagctgtgacacagtgtgaaaaagcatttgtagagagactttttctcagcagccaataaaagcagagtggaaaaagattccaattctgcagagagatgctcacctcttgtctacgcacaccctatttgtgctttgcggggtgaggtcctcatgatcttgtatttattatcccaagttcctgctgttaagaggtggtaggagaagccaaaggcagcagagcacaaaaagcaaaactcttccctccccacccgctcttcccattagtcctgtcagggttgccgatggacaaattgtctctgatcgttggatgttataaatgtctgacagtgcagtgcaaacagaagacaaactcagttgatccttgaacaactcaggggttaggggcaccaacaccccctgccctgcacagttgaaaaatccgtgtataacttttgactccctaaaaacttaactaatagcctgctgttgaccagtagtatgctattagtagttacttactgctaacatagtcagtacatattttcagtatatattttgtatcttatacactgtattcttacaatacagtaaactagagaaaagaaaatgttataaggaaagtcacaagggggcctgagtgcagtggctcacgtctgtaatcccagcactttgggaggccaaggcgggtggatcacttgaggtcaggagtttgagaccagcctggccgacatggtgaaaccctgtctctactaaaaacatggaaattagccaagcgtggtggcgcatgcctgtagtcccagttactcaggaggctgaggcagaattacttgaacccatgaggcagaggttgcagtaagccaagatcacgctcctgcgctccggcttgggcgagagtgagactccgtctcaaaaataaataaataagaaagccataaggaagaaaatatatatctactattaagtagaagtggatcaccataaaggtcttcacatactgtctcagggttgaatagtctaaggaagaggaggggttggtcttggtgtctcagggatggcagaggcagaaaaagtgggggaggtggagggggaggcaggcaccactgttatttttattgaacaaaatctgtgcagggactcatgactgtaatcctagtactttggaaagctaaggcgggaggatcccttgaggccaggagttcaggtccagcctgggcaacgtagtgagagaccctgtatctacaaaaaatttaaaaatcagccaggtgtggtggtatgcaccaatagtcccagttactcagaaggctgaggtgggcggatgactggagtccaggagttcaaggtagcagtgagctattcatcgtgcctgtactgtactccagcctgggaaacaatgcgagtccctatctctaaaaaattttaaaaaaagaaatctgcatataatagacccacagagtccaaactattgttcagagatcaactgtacttcacagagagtaattctaagtcttacaggatttcatggagatggcgagagtggtgttggagaatcaatcacatacagagatacaggacagtgagaccaggtaacatttgaggagaatattttttttttattgagacagggtcttgctctgttgtccaggctggagtgcagtggcacgaacacagctcactgccgcctcaacctctcctgggttcaagtgatcctcctgcctcagcctccsaagtrgctgggaccacaggtgtgtgccaccatttctggctaatttttaaattttttgtagaggcgggatcccactatttttcccaggctggtctcaaactcctgggctcaaatgatcctcccacctcggcctcccaaagtgctaggattataggcatgagccaccacacccggcctgagtagagtctttaaggtaatgacaaaagtgcctcaaaatataattatttgattaagagaagtcttgggaagataggtaacaacctttaaaatgttcataaaattacatcctttgtaatactcctgcaagtcaaagtaaaggatggcatagactattcttggacagttttgtcaaaaagtgtatctkgaccccaccatcagtactccattcttcattttaaaaaataagatgggctgggcacagtggcttacgcctttaatatcagtactttgggaggctggtgggcggatcacctgagatcaggagttcaagaccagcctggccaacatggtgaaaccccgtctctactaaaaatacaaaaattagctgggcatggtggtgygcgcctgtaatcccagccactcgggaggctgaggcaggagaattgcttgaatccccgaggcggaggttgcactgagccgagatggtgccactgcaccatctggacaacagagcaagactccgtcttggaaaaaaaaaaaaagatgtagaaatgtaaaaatatttgagaattattacatagttgcagatatagtttgctaactccaagaggaaacacattttattttttgtgattgtcctgatgaaactttatccccccacaacatgctgttaagcttggttcccatcataagcatattccccctaagtggacttttactgattttccatggataatgcagacctccagtataaaagctattcctccaggtctctctgccgaccactgagtatcccagggataaggattttaagagtaagagctaagtaataaattcctgcccctagcagggccgttcattttacggatgaaaacctgatccttgctgggcgtggtggctcatgcctataatccaagccattcagaaggctgaggcaggaggattgcttgagcccaggagttcaagaccagcctgtgtaatatagtgagtccccattcagaaaaagaaaagaaacctgagcctagcaaggagaagagaatggtacctttggtggctgttaaatcaccaccgctaccctcagtccacatcagtcctttgaattccaaaggcaggtactctctagctcagaggtcctcgaacttcagcctgtgtgggagtcacccatcctggcacctgattagaaacacagacacccaagtcccattccaaatattctgactcaattgacctgagatgcaccaaggaagtgtatttttttatttttattttttgagccttgctctgtcgcccaggctagagtgcaagggcgcaatctcagctcactgcaacctctacctcatcggtttaagtgattctcctgccttagcctcccaagagctgggattataagtgtgcggctaattttgtatttttagtagagacagggtttcaccatgttggccaggctggtctcaaactcctgacctcgggtgatccacccaccttggcctcccaaagtgctgggattacaggtgcgtgccaccacgcccagccaggaagtgtatttttaacaaggatccctgggtataggctgccctggtctctttatggaaggcactgtactttcttcccttcccttccctttcttcatttttcttgatgactctacagggccaaattctctgggcagctgtctttcttctgtcttctgcacttgggtagcagcatgagcatctgggtgctttttttttttttttttttttttttttgagacggagtctcgctctgttgcccaggctggagtgcagtggcatgatctcggctcactgcaacctcagcctcccgggttcacgcaattctcctgcctcagccttctgagtagctgggattacaggcgcccaccaccatgctaattttttatatttttagtagagatggggtttcaccatgttaaccaggatggtctcgatctcctgacctcgtgatctgcccgcttcggcctcccaaagtgctaggattacaggcgtgagccaccgcgcctggctaagtatttctctccacatagcgagatctccttgtcttttccctgacctacttgcctgggactttgtcccaggcggcatccccctggtctgtccaccttcaggccttgtgtctcaccgcctgtgctgaataagattgaaatagagcctaaaaatagtttaatggcccctgcattgcagcctgcacttctctgttcttggctggaaggcagccaaactgactcagcacaaaagctcatctccagaagccgggacaagatttcaaagagggcttgtgagggctgggaagaggctttgcttcttagacaggggatatcagagcctgtcaccctccagaagagattttccctttccagagaagcagactgaacaaaagaatcccttggctttaaggaggattttaaaacaagcgagaagcccaggtcaatccctcccctgtgagctacttagccattcatgccaagggtgggcagattagggggaaagggactggcttgggaggacctagaagcttcctcctcagctggaattgtccacggacttttggcagattatactctggggcatatcgcagaccgcagcccatctgtcgctctcttgtacctgggactcagcctgtgttccttgcttttttttttttcccctttacaatttttttaaaacatttttttttcttttgtagagacaaggtcttgctatgttgcccaggctagtcttgaactcctggcctcaagcaatcttcccacctcggcctcccaaagtgctaggattacaggcgtgaacccaccatgtcaggcctgttccttgcctttttaaagctgccgtccacattcctgatttattggtatcttctagtttctcccttattttcttcctagcttatcccttactattttctctgcaaataactccacagactcttttcataaacttaagggtgttcttgctgatcactccgcaaagctaagcaaaactctatccctaggaaggagcagggctgccagacttccaaaggaactttgtccctgtcggtgtagccgactctgtcctttctatggcgttcagcagtgtctctgatgagaataggcattaagcatctattttgggtcaggccctgtgctaatcacacttttacattcactgtcctatttaaatgaaacttagtgtataagtcttttgcctccttggttaaatttatccctaggtattttattatttttgatactattataaatagaattattttcttaatttctttttctgattgttcattgttggtgagtagacatacaattgttctttgtgtgttgactttgtcccctgctgctttactgaattcatttattaactctagtaattaaaaaaaacttttctgccagtctgggcaatatagtgaagccctgtctatacaaaaataagatttaaaaattagccaggcatggtggcgcataattgtagtcccagctactcagaaggcaaaggcaggaggatcacatgagcccagaagttggaagctacagtgagctatgatcacacaggtgcactccagtcttggggacaaagtgagaccttggtctctaaataaataaataaataaaagggtttactgtggattatttgggattttctatatatgtgataatgtcatctgcaaatagagatcgttctatttcttcctttccaatttggatgccttttctttttcttgcctaatttctctggctaggactgccagtactgtgttgaatacaactgtgaaagtgggcatctctgtcttgttcctgatcttaggggaaaagctttcagcttttcaccattggttttgtgttttttgttttagatacagggttttgctctgtcacccaggctggagtgcagtggtgcaatcaaagctcactgcagccttcaactccagggctcaagcaattctcccacctcagcctcccatgtacctggaaatacaggtgtgagccatcgtgcccagctccccttcattctttaaggcaaggtagtgtactacattaattgattttctttcctttttttttttttgagacggattctcgctctttcacccaggctggactcagtggcgctatctcggctcactgcacgctccgcctcccgggttcactccattctcctgcctcagcctcccgagtagctgggactacagacgcccgctaccatgcccggctaattttttgtattttcaatagagacagtttcaccgtgttagccaggatggtctcgatctcctgacctcatgatccacctgcctcagcctcccaaagtgctgggattacaggcgtgagccactgcgcccagccgattttcttttcttttcttttctttttttttttttgagacagagtctcactctgtcgcccaagctggagtgcagtggtgcagtcttggctcactgcaacctctgcctcccaggttcaagcgattctcctgcttcagcctcccgagtaactgggactagaagtactcgccccaccatgcctggctaatttttgcttgctatttatttatttattttatttatttattttttttgagatgaagtctcccactgtcgccaggctggattgtgcagtggcacaaactcagctcactgcaacctccgtctcccgggttcaagcgattctcctgcctcagccccccgagtagctgggattacaggcgcgtgccaccacacccagctaatttttgtatttttagtagagatggggtttccccatgttggccaggatggtcttgaccttgtgatccgcccaccttggcctcccaaagtgctgggattacaggcatgagccactgcgcccagactgaattttttttttttttttttgagacagtttcactcttgttgtccaggctagagtgtaatggagtgaccttggctcactgcaacctccgcctcctaggttcaagcgattcttctgcctcagcctcccaagtagttgggattacaggcacgtgccaccatgcctggctaatttttgtatttttagtagagacggggtttcaccgtgttggccaggctggtcttgatctcctgaccttgtgatccacctgccttggcctcccgaagttctgggattacaagtgtgagccaccccacttggccagattttctcatttttcttgagtcagtttcagtagtttttatatttctaggaatttatgcatttaatctaaattattgaattagtggacatacggttgttcacagtattgccttataattccttttatttctgtaaggttggcattaatgccttctcttttattcttgattttagtaatttgagtcttttcttcttttatcttagtcagtctagctaaaggtttgtgaattttgttggtctttttaggacctttttttttttttttttttgagacagagtttcactcttgtcatccaggctggagtgcaatcttggctcactgcaacctccgcctcccgggttcaaacaattctcctgcctcagcctcccaagtagctgggattacaggcgctcgccaccatgcctggctaatttttgtatttttagtagagatggagtttcaccatgttggccaggctggtctcgaactcctgacctcaggtgatccgccctcctcagcctcccaaagtgctgggattataggtgtgagccactgcgtccggccaagacctaacttttaatttcattgattttctgtgtcatttttatattctctatttcattaatttccactctaatccttctttgggtttactttgctcttcttttttcaatgtcttaaggtagaaatttaggttattgatttgagatcattcttcttttcctttatttatttatttagagacagggtcttgctctgtcacccaggctggagtgcagtggtgtgattgtagctcactgcagtcttgaactcctgggctctggcaaccctcctgccttggcctcccaagtagctgggactacaggtacacgccactgtgcctggttaattttttaatttttattttgtagtgacgggatctcactatgttccccaagctggtcaggaactcctgggctcaagtgatcctccagccttggcctcccaaagtgctgggattacaggcgtcagccactgtgcctggcctcattcttctttttaaatgtagacatttacaactttaaatttccctctaagcattgttttacttgcataccgtaagttttcatatgttatatcttcattttcgttcatctaaaaatattctgatttcccctctgatttcatctttgacccattggttatttaggagtgtttgtttttcacatatttgtgactttcccagattagttattaacttttactctagtgtgatcagagaacgtactttgtacgatttcaattcttttaaatttatggaagctatttttttttaattgaggcttttttttttaaagatggagtcttgctctgttgctcaggctggagtgcagtggcaccatctcggctcactgcaacctccgccgcccgacttcaagtgattctcctgcctcaacctcctgagtagctgggacctggtaccggtgtgcattaccacatctggctaatttataaattttttggtagagacagggtttcaccatgtttgtgaggctggtcttgaactcctgacctcaagtgatccacctgcctcagcctcccaagtgctaggattataggcatgacccactgtgcccagccctaattgaggcttr

SEQ ID NO: 94589 - DNA, 152658 bp, Homo sapiens
  misc_feature (1)...(152658): n = A,T,C or G
gcctgccaccacatctgtctgatttttttgtatttttaatagagatggggtttcaccatgttggccagactggtctcaaactcctgacctcaagtgatctgcccgcctcggcctcccaaagtgctgggattacaggcatgagccactgcgcccggcctatatgtttgtgttttaattacagaatacatggctgactgtacaaaagttttaagtacatgtataggcactaatatggaaaataaaaattacccatggggcaccaactcagagatgacgattaccaaagcctgaaatatatttttcatcttaaaaaaatttgatataatgttatttacactttataaactattcttttattggataaaaaattaaacattttcctgtgatggtatttttcaaagctcgcatgcatttcatcttgtataaatgtattatttacctagccaactctgtattgttcatttaatattatttttaccattatgtgtaatgcttctttgactgtccttggacgtaaatcttttttgaccattcctggtttttttggtagaataaattctttgagttggaattgctgggtgatgtttaaagctcttgctacgtgttgtgaaatctgtgtctgtagctcgtggctgtgataaacatcctcagagatccctgctatccaactcttgtcaccagctaactggtcattaggccaagctgtgtgagtgaaccattagacaatttgataaaaataagcactgctgccattctttagcatgcgtctgtgccacaagttagtgacacatgtacatatattccctttacctcacagtaaccatctagggtgtgggcatcataatcttcatttttaaaatgagggtactgaggcatgaataggctaaataatttgctcaagatcacaagttagtaaatggcagtcagttttcaggcgtaggctttgaagactctaaacctgtgcttttaacatctgcctcttcttgtgactgggggcttcactggagccaagcctcaggaggcatttgcagccacagtgggtcatgcgaggtagagcagactgcaacctgatagaattcttggactggcccacggccagcctttttaatttttccaagagttaaagttgtggatctgagatgtggcctggcctgccagggctatggtgggctcagtgtgattgcatcattagtattgtggcatggagtcttccgtcagcctcagagaacccttgcaataatgcattatttccccgcagggttttctgcccaaggatttgcaagctgaagctctctgcaaacttgataggagagtaaaagccacaatagagcagtttatgaagatcttggaggagattgacacactggtaagtaaatattcagctgagaagaactagttttctttgactttatttcagtcacattcactctttcagtaatttactctcctattgcctgagcaaacccatcacttgagaatattaagcatctactattgtgtgccagtcatgttgctaggtcctgggtgaatgcatgatgataagacagttcctgctttctaggcactcacagccctccagcataggacttttatcatttacacttatgtttgccagtagcatctgtaatcgtcatgaagctgggacccaaggagtccacgatctcatggtccaggaaacagaggatttaactttctctgatgaatatgtgactgataattctgcagggctcattacttatagatgattcagccagacccaggtcatgtgaggccattgaaaatcattaactcttttgcagatgatagtaatgatatctctagcctgatgcttcattcttgaaggtgaactgcactgtgtacttctgttggccagggtgggtgtaaagaagcagcagcaggcacttttcctgtcacaatgagcccatggtgtggccagggcagagtatccatacataggaaacaataaaagaacaaagtctgtgttacagatcagttcctatggcccagacattgagaacacagggagcttttatagggacaagagccatggaaaggccatacaggatacagacccagggaaagggttcctgaaaatggatatcacatttacattggtgacctgtgacctgttttgtgtactgtgggtgtttcttatgtgctctcatgtcattttcactgaggattatttgttacatgtttactatttactaacttgtattatcaacttactcttccatagatcctgccagaaaatttcaaagacagtagattgaaaaggaaaggcttggtaaaaaaggttcaggtgagttgtgtaatagtgcacgacaaggtgtaatatgttaatgtgtaggtatgtgtgtttatctgttcaaaatcaggtagtgtaggagcgtggtgtgtggtatgggcttgttttggttacatttatcagcaggaaccccaaacgtcagagaagagccacctgtgtccctgtaattatatttgaatttaaactatttagggagggaactcactggagagcaggtagggctgacacattacacaattccaggaggcagtattcatgcacacagtgcttcctgcgattgtgcagttgctgtgcagtggccctgaggcaaagctccctgcctttaccaccttttaggggattgctggcctagagcatggtcagaatgctggtcctatgctccctccctccccttaccttggaacccaggccagtggcccatctccattcatgcacaatctgttttgagtctcagccatgggttccccagaatgggtaagcaaggagccttgtgtgggcagtggtcggctacccctggatgggcccttactgccccgtgtgtattttctaggcattcctagccgagtgtgacacagtggagcagaacatctgccaggagactgagcggctgcagtctacaaactttgccctggccgagtgaggtgtagcagaaaaaggctgtgctgccctgaagaatggcgccaccagctctgccgtctctggagcggaatttacctgatttcttcagggctgctgggggcaactggccatttgccaattttcctactctcacactggttctcaatgaaaaatagtgtctttgtgattttgagtaaagctcctatctgttttctccttctgtctctgtggttgtactgtccagcaatccaccttttctggagagggccacctctgcccaaattttcccagctgtttggacctctgggtgctttctttgggctggtgagagctctaatttgccttgggccagtttcaggtttataggccccctcagtcttcagatacatgagggcttctttgctcttgtgatcgtgtagtcccatagctgtaaaaccagaatcaccaggaggttgcacctagtcaggaatattgggaatggcctagaacaaggtgtttggcacataagtagaccacttatccctcattgtgacctaattccagagcatctggctgggttgttgggttctagactttgtcctcacctcccagtgaccctgactagccacaggccatgagataccagggggccgttccttggatggagcctgtggttgatgcaaggcttccttgtccccaagcaagtcttcagaaggttagaacccagtgttgactgagtctgtgcttgaaaccaggccagagccatggattaggaagggcaaagagaaggcaccagaatgagtaaagcaggcaggtggtgaagccaaccataaacttctcaggagtgacatgtgcttccttcaaaggcatttttgttaaccatatccttctgagttctatgtttccttcacagctgttctatccattttgtggactgtcccccacccccaccccatcattgtttttaaaaaattaaggcctggcgcagcagctcatgcctataatcccagcactttgggaggctgaggcgggcggatcacttgaggccaggagtttgagaccagcccaggcaacatagcaaaaccccattctgctttaaaaaaaaaaaaaaaaaaaaattagcttggcgtagtggcatgtgcctataatcccagctactggggaggctgaggcacaagaatcatttgaacctgggaggtagaggttgctgtgagccgagattacgcccctgcactccagcctgggtcacagagtgagactccatctcagaaaaaaaaaaaattgagtcaggtgcagtagctccttcctgtagtcccagctacttgggaggctgaggctagaggatcacttgagcccaggagtttgagtctagtctgggcaacatagcaagaccccatctctaaaatttaagtaagtaaaagtagataaataaaaagaaaaaaaaactgtttatgtgctcatcataaagtagaagagtggtttgctttttttttttttttttggattaatgaggaaatcattctgtggctctagtcataatttatgcttaataacattgatagtagccctttgcgctataactctacctaaagactcacatcatttggcagagagagagtcgttgaagtcccaggaattcaggactgggcaggttaagacctcagacaaggtagtagaggtagacttgtggacaaggctcgggtcccagcccaccgcaccccaactttaatcagagtggttcactattgatctatttttgtgtgatagctgtgtggcgtgggccacaacatttaatgagaagttactgtgcaccaaactgccgaacaccattctaaactattcatatatattagtcatttaattcttacataacttgagaggtagacagatatccttattttagagatgaggaaaccaagagaacttaggtcattagcgcaaggttgtagagtaagcggcaaagccaagacacaaagctgggtggtttggtttcagagccagtgcttttcccctctactgtactgcctctcaaccaacacagggttgcacaggcccattctctgatttttttcctcttgtcctctgcctctccctctagctcccacttcctctctgctctagttcattttctttagagcagcccgagtgatcatgaagtgcaaatcttgccatgtcagtcccctgcttagaaccctccaatggctcactttctctttaggcaaaagtctttaccccatgccttctcccatctcatctcaaccccctcatttgttggctgtctgctgtcagccactcttctttcaggtcctcagatgcactgcaccctctcctgcctgggggtctttgctcctgctactacctctgcttgaacagctcctcaccttccttcctccaaccctacccttgtataggtgacttttgttcatccttcagaattcaactcacatgtctcttgcatggagaaccctcacctactgtgttgagaccctgtccagcccccaggtgggatcctctctcgacttcccatacatttctttcacagcatttacatagtccatgatagtttacttgtgggattatttggttaatctttgcctttaacaccagggttccttgggtgaaggagcttctttatcttggtaacagcattatttcaagcataacttgtaatatagttatattacatatataacatatatatatataacataacatatataacatatataacaagcataacttgttatatagtcttgtatatagtaagacctcaataaatatttggagaacaaatgaatgttgaatgcacacatcaatagtgaaacttctatagctgcatttggcctcagaatctccgtcagcattggaatttacagccttaacagcctttattgtcttaagggttgagaaaagaggccctaatgcatggactgctgggcagatgtgataggtgattgcacaggccccacccacgcagatctgctcacccaaggggtttctgcctgtgaaactcttctcccgtgagaaggggagagagcaccccttcttctcccgtgagaaggggagagagcaccccttcttctcccgtgagaggggagagagcaccccttcttctcccgtgagaaggggagagagcaccccttcttctcccgtgagaaggggagagagcaccccttcttctcccgtgagaaggggagagagcaccccttcttctcccgtgagaaggggagagagcaccccttcttctcccgtgagaaggggagagagcaccccttcttctcccgtgagaaggggagagagcaccccttctcaggtgcccacttgcctgggacatggtaagtcttaccacagggagaacagatgggaatgtgtgctcccacaaacgaattcttcggcctcagggctggaaggattctcccacattgttttttgtttttgtttttttttgagatgggttcttgctctcttgcccaggctagagtgcagtggcttgatctctgctcactgcaacctccacctcctgggctcaagcgatcctcccacctcagcctcccgagtasctgggaccacaggtgcgtgccaccatgcccggctaattttttgtgtttttggtagagacagggtcttgccatgttggccaggctggtctcgaactcctgagcttaagcaatctgtctgtcttggcctcccaaagtgattggattacaggcgtgggccaccatgcccggcctcgacattgtctatttagttaatggtttctacttatccttcaaggcacaacttaaaggttacctcttctgagactccttcatatagtagtcaggacctttgtcaaaagtaccagaagccaagctgggcacagtggctcacgccagtaattccagcactttgggaggctgaggcaggtggatcacctgaggttgagagttcaagaccagcctgaccaacatggagaaatcccatctctactaaaaatacaaaattagccaggcatagtggcgcatgcctgtaatcccaactactcaggaggctgaggcaggagaatcgcttgaacctgggaggcggaggttgcggtgagccgagattgcgccattgcactccagcctgggcaacaagagcaaaactccatctcaaaaagaaagaagaaagaaaaaaggaagaaagaaagaagaaaaaggaaggaaggaaaaaaaggaaagaaagaaaaagaatcagaagcctaattccaaagagactgggcaaaatagaaactttatggtcatgatatcaagttatcccatgtaattttgggaaggtcaaaggcagccgggcttcaggaactcaaacactgcctgtaatcactctgcctctgcatgcctgcatcatcctctcattcctccttcttccacaaagcaggacatgtgactgctgacaacccctgtgttgctcatcctacagcttcagtgccagaggggaactgcctctgtttgcttgtttctaatttgaaagatcctggggaagaatcttttggctaatcagcaatggccagggcagcagggtctcatgccacacataaggtctttaggggccaacacttaggttttggggtagttcccagagagggggccacagagtccacatctgtaagtggtaaattaggtattccttccaggtggtgcctggcacattgttcaggcttaatctctgattcctcagatgatgagtagaagcctgggaaggaagggtcactgatgagatgcttggctgggctatgccacttgggtataagaggggtgtcccacttagggcagaaacttttagatgtcaccaatatccactttctcctcctacaaaaagtgaactaatttttagtttaatgcatggccaaccagatagactgtatttctcagtctccctgctcagaaggccatgagactacattttagctaatgtggtttatacagagtgtgtatgtcttaagggaaatgtcttcagaggcaagtggcgtgccctttctctctgtggcctagaatgcagatgtgatggctgtggttggagtagctgtcttggacctgaggtagaaactgtgatgcggatggcagagtaacaaaatagaggagcatggagttgtcatactacataggtctatgtgtaggagaaatgaagttctggctataagtcactgttattttgggttttctgcctctcacagccaaacttaatcctacatcattcatatgcaggtatgaaacaggtatgaatcagtcccagtagaaggccttattcatagatggcctcctaggcctgccacctgcaaatctatcagcaacaattcctgctcagtgttcccattccagtggtccaagagaaagtagcttcctgccttcctgtgcccattctctcagacatgtgtcttctacagagcatttcctgccctttctgcccactctgcagcaggaatcagagtctgtgtgaaactgctttcacctgcccaggcctctctccatacccctttctcctgccaccattatcaagaggctctgcctaggggctttggccaaaagaggaggtattcaacatataccacaggagggagtctctgtctatggtgacaattctgaacactgtgtgtccctgtgggacattgtgtgagtgcatgtgtrcaggacgtgcctggggctgtgtctaatgtcagaatatttgacaaccagtcagagcagatgttgaccaaaagagcagagcagcatctcgaaatcatcccacagtgccaggaattaaccccagactgtggaaaccgagagacccaggtgtttccaggggacaatctgggtggctagggtatgggggggcactcaaagggcttggggcatcacctgttttcgattgtgaaaaacctagttcaatgttacaacaagcagttcagctgtactgtgtacactgcctgaatatcagccattgctgtgccacgtgtctgtgtgtacatgccttggagtgctggcacaacccaggaggaagccatggggggcacaggatgactctcacaaagcttttttttttcttttttgaggcagggtttcactttgtcactcaggctggagtgcagtgatgcgatcatgggtcactgcagcctcgacttcctgggctcaagcaatccccycccacctcagcctcctgaatagctgggactacaggtgcatgccaccaagcctggctaattaaaaaaaaaaaaaattgtaaagacagtcttgctatgttgcccaggctggcctgaagcaatcctgccaccctcagcctcccaaagtgctgggattataggtatgagctactgttcctgatttcacagaggctttctgaggctgggccgtgcaccccagcagtggcagaggatacagacctcacctaggttcttggcctgaatgatagtccaggctggggcagacaggagtactaggcagcatcctggggtcagggactggcctctcaggcaggcagaagataactgggacctctgaggggacatgtgacagggttgaggagcaccagagggacggagagaagctggacatcaaattcagagtagaggcgacaatgcaagatccacctcctatcccctctgcaaccagtgtccccagagacactgaccacttcactcagttgggctggatcttttatttcatgtcatatcctctccatgcccaccactgttctccagctgacacttcatggcttgaggtgctcctgtgggatcagcatttgccatctttcatgatctggatgtcctgtttggtttttctaggatcaaagaagacaggcatgaggctaccttctcaggagctgtagtgtaccattcagggacctggcacagtccatccagacatcctgctgagcgtcgcccacatatgcagtgtatggatacagggcagatcccaagggtccatgggcacatccttctacagcttttccttttttgtacacccttcccctgggggattttagcttcctggggtttccaccaccagcgcacgctgatggctgccaaatctgtctccagctcggacctatgtcctacctgttcatgcagttgtccatatccagtgggatgtcctaggggctcaactgtccacaaacatcactgccccccacagaactggtacagacccccaaaccacccatctcagcccatgaaaccactggccacccaagcccacaaatcagaaaccagtatgctgcctccttcccctcagcctttacatacagtcacataccaagcctgtcaattccactcccaatgtacctcctaaccatgagtctttgattagcatgatctttctctaagctaggacaacatcctgatgttccttatatttcctcaaatacaaactttcacatctatccagagctttgcagcttccgaggactttcttcacttccatggtctcatttagttctcaggatcatagaagatgggttttattgatgaagaaactaagagccaataggtgatctgatgtagggaggtcatgttctagccctgctcatctttctggactcacttcttgcctctccctgattctcccttaaaccttatactccaacatgtccaacttcttatatttcctcaaatgtaaacttttccttgtagaccttttcaaattcatctacttggaattatcttcccttgctcctttttcctagctaatttctacttattcctgtgtgccccactgatyccttagaattctgtgctgaaggccgggcacggtggctcatgcctgtaatcctagcactttgggaggctgaggcgggtggatcacttgagatcgggagttcgagaccagcctggccaacatggtgaaaccccatgtctacttaaaatacaaaaaaaaaaaaaaattagccaggtgtggtggtgggcgcctgtaatcccagctattcgggaggctgaggcaggagaatacttgaacccaggaggcggaggttgcaatgagccaagatcgtgccactgcactccagcctgagtgacagtgagagtctgtctcaaaaaaaaaaaaaaaaaaattctgtgctgcaattggctgactatcagcctggcttcccccttacaccaattgtatgttccagaaggccagtgatgctgtctaacttaggctctgttctagccccagtgcctagcacatagtaaatgctcaataaataattgctggctagacgaatgaaaaaacagatgaggtcacctagtcaatcaaggcagaacaaggaaaatggtttctgcccctactccctatccaccaccagcttctagatttctgcttggaaccatgtgccttctttgagttaatctggcactcattctattaggggcatatgttggaggactcttctcaggtcaagcgtgtatgaaggaagaagcaggtcaagtcttgctcctttcagactgtgcaccagagatggggcccacccaagcaagcaggggttgtggggcagacttacatccgggccaagcagagctggcattcattcgtatatgtgagcccatcagtgccgcagaccaggttggacatctgggaacaggttggagactctaccatgtgttcacagatgggctgtggaagagaagggagggagaggactcagggattcagaggcagtggggagggatacaggggttctgctcggaaccagtggggccccagtgaggtatcagagtcaagaaggcccccagtgtgggtccagtgaagatgaaaccaaccactcagagccccttggtgtgtttgcttgtatgtgcgtgtgcatgaccacgtgtgtgcctatggctggatgtgtacatatgtgtacctgtgtctctggagcccccggtgtgcaggcattcaagcgtatgcctgtgtttatgtctatgtgtgtggagtgagtttgtgccctcaagctcctggggacttgttcacaccctcttcagaggcactaatcagaacttbtgctggtcccattgaagaccccaggatacggaaccacccatcattcccaggaggcccctctctccctgggggctcctgaactctccctggcctgcatgatctatcaggcccatgtcagaaaggctgcaaagtgtgcgaaggctgaagaaatggggcagagcttggggcttaattgaggctgtctgaaagggttttaggacaggcctgaggtcaaggtgagaactcagtcaggactggcattagtgcctgagacagggataggctgagaaaggttgtgcggtgcaaccgtgaaggcccgaaccctagaaacctgaattttgccactgattagctgtataaccttaattgaggtatttccactctctgagtctcagtttcctcatctgtaaaaattataatagtggcgtttctctcacatagggctaattgaaataatgtatgtaaactatttggctctttggcactgaataagcggggctggrttctgatggactgacggggacgatgctgaggctgtggatgggaaggtggctccgagcctcctcattccactacatgaaggggcaatctcaagagtctcaaggatgccagtaccactgccttctgggtcactgggggcattaggccaagggccaaggtggaatcaggattcggggacaacttggtgtttagacaatcagatggaatgtggtggtgggaggctggcacactccacaggtgctttcagtgtgccagggtcccctctttggcctgaactctgtggcctgcctgtctgcactatacagagcagagagcacaccctgtcctgctaagcctgggtggggagatctcactgatggaaggggccttggacaccaggtgggggacatcataagggctttgaggccaatcttgggacttgggtgagggggctgggcctactcagccttgggggctaatgtggggaatgtgcaggccaggaggccaccttggccaccttggagccattgaaggtgtctgagcaggatcgtggagaagaataactggtttctcagcatggacgagaggactcctctcagcagagagaaggtgagaacaacacgcagctgccttaccattcttgagaaagggagctttcctgctgccactggcacttctgaaacacaaagaagcaagaattagattatgcyggctctagaccccaggtctaggggtctgaggactgcttctgcttcagggagcttggtccagcaactacccaacctggaattcctcaaggaaaggtgatgagccaccagacaatggggctgccagaaagctratgtgatcttgggttccataaacagagacagaaattcaaaaattaggaaggtgacagtccagcctattccttgttagttagatcccactggaattgttrtgtcccatataataattataaaatagcaattcagcagttattatgtgccgggcattgaraacacatgattttaactcctctccacccctmtcttactgctgtgtaacagagggaagaaaggagatagtagtggatgctgtgttctgccatcaagagccctcgcgcaagtctgaggcactcatttcccctgctgccagaaatattgaccactcactgcaagtctcttcctaggaattaccctcagagaatgaagctgccttgcccagggctgcatccactacccaggaacagcccatatcccatgtcgggttgatgtggttacaaagggcctgatcccctcgcccaaagctgcctgtaggatcwtctgaagcctctgttgtgctgcatggaagtcaacttccctcatccttcatggatgttactcccatgaacgctccccagtaaattgcatgtatagctcagaatctgtttcctggggcataggtcagtttaacgaactacgaaagaggctcaaagaggtgacgcaatgcagtttgttaaggcagaggtaggattttcccacacgtctgttgcagtccagagcctgactctttctacatacactggtgtacccctcaaggtctggctgaactgcttaaaggacatgagcaaactgtgatgtgactgacaagcatgatgggtggatgagggaactggagctatgtctaatggcacaggtggaaggaagggcgtttatgtaaattagagaagggcaggatgctccctgaagtctctgaagggctatcctggggctgagggagagatggactcttttcaacctcacaaagcagagcccatctctgtgaggaggctgcagggaagcaggtttgggttccatatgaagcagaattttctctcagtgggagctatgccacagtgaaagaggctttctccagaagtagtgagtttcccatcactggaggtgtgcaaggcaatgtagttttatattttcctggagatgctattacagggtatttccacagagagagggaaacagaaacttagactaagtcaccccaatgtgctgtttaagcctggcattggggtatcaaaatgcaaacctagacctgtcactgaactgcttaaaacccttccatgtcaaattgcccaaactgaaagtgatccaaatgtccttcaacaggagaatggataaataaatacaatggggcactactgaacaattaaaacaagcaactgatacatgcaataacgtggctgaatctcaaaaatagtttgctgagcataagaaaccacacacaaaagattatataccctatgattccatttatgtgaaatcctagaacaggccaactaatctatgatggaaaaaaatcacattgggaagctggggcaggaggatcacttgaagccaggagtttgagaccagcctgggcaacatagcaagacctcatctctacaaaaaatttaacaatgagggcaggttgcagtagcacacacctgtaatcccagcgctttgggaagctgaggcaggtggatcacctgaagtcaggagttcgagaccagcctgaccaacatggtgaaaccccatatctactaaaaatacaaaatttgctgggcgtggtggtgcacacctataatcccagctatttaggaggctgtggcaggagaatcacytgaacccagtaggcagagattgcagtgagccaagattgtgccactggactccaacctgggtgacagagcaaaactccgtstcaaaaataaataaataaataaataaawataaatttaaaaaaatttttaaattagctgagtgtggtggcacgcacctgtagtcccagctacttgtgaggctgagataggaggatcgtttgaatccaggaggttgaagctgcagtgagctatgattgcaccactgcactccagcctgggcaacagagtgagactttgtctcttaaaaaaaaaaaaaaagtgtcagagcactgggatgggggcagggattgactgacataggggaatttctggggctatggaaatgttctgtatttatttttcttccctaagtccttgtctcaagaggtcctgtatcttgatgggggtttgggttacacgagtgtatacattgtcaagattcatcgagtgataagatttgtgcatttcttgatatttaactgttagggaaaagaaaagcatttaaaaaatataaagcccttccgtggttccctgtcctgatcactaagcctccctatggacckgagctgcttagtcttatgtttagggtactgcgtaagctgaccctaaacttgcttcttgggctgacttcccagtacacctctccatgccccagctattcctctctgctcacgggtcctagattgggccctgctttggctcatgccatgtcccctccctgaaatgtcttcgtctccgttctcctcccgccgaatcataccctcctttcaaggcttgatgctgccccccagtgaagctgtccttgacgtccccaacagtttcctgagcagatctggatggaggcttctttcacaccaccatgtactgtcccactcactgggtcaccccgcctccctatgcacctgagctccttggggttcctttatgtctgcctttgcgcagcacttggttcaatgtccyacactgtgggtgttcaggaattgaatactaaagtgcattggtgtaatcccagcaccttgggaagccgaggcgggcaaatcttggggttggaagttcgagaccagcctggccaacatggtgaaactccgtctctactaaaaatacaaaaattagttgggtgtggtggcatgtgcctgtaatcccagctactcaggaggctgaggcaggataattgcttcaacctaggaggcagaggttgcagtgagccaagatcgtgccactgcactccagcctgggcaacaaagcaagactctgtcttgaaaaaaaaatttttgtttaaataaaaaaaaaaattaaagtgtattgggaggagggggtgttcagaactctaagatgtcagagtttctttctgggggatgtggggaaaagctacatttacccccaggctgcccttgaccttgacccaaartgccccctcctcactcagcccaggcagtagtctgaaatgtgcaaaaaacaaaaacaaamacaaacaaacaaaaaccaaacttcttcagagcaggcttttcagtgttcccaactgctcaaggagtaggtaggtgtaggtgccaggctgggcgtaagcaggctgctcctgaacaggtccccagaccmgtttccctttccccctgtgcccaggtctgtttccagctggggaaatgggtgtgggactggccatgaggtcagtggccctggatcctgccaggcgttgccttataacttatggcttttgtccaggcgggtcctaactggtctccccgcttccctgttcagtttattctcaatgtaccaaccagagcaacccttgaaagacataactctctgctcaaagctttcagtgcctcccattttagtcagaggaaaagccaagttcttatgttggccaacaaggtctttcccggtacagttccaatttgcctctctcatctcctctcctatcactccgtacaatgtcccctcctgccacactggtcttacagtacctcagtcactccaggcatgcccctgcctcaggtcctttgcacctgagctgttccctctgcctggaatcttcttctcccagatatccacatggcttagtccctcatctccttcaagctttgctcaaacatcggactctcagagatacctcccctgatttgaaattgcaacccccttccagtgcccatcaccctgcyaagtattttttccttaacttttatcagcttctaacataccgtttaacatacattgtaaccatcttgtttattgcctttccccttttcctctaccccattggatttatgctccatcaggaccgtgctttttctgtttgggtcactaatctgtcttaagggctcagaacagtgcctgacatggtagctgtgagattgcagggatggcccagatcctgagagggccctgccccaagtatatgtgtccagtcctgggaaagggctctgtcgtgctcacatggctgcccaagtcccaaaccacagcctttcagagagatcgggagctcagaagacctyggccaggtctctcttagcatccaccaccctgcacccagcatacttrtcagtctctcctgagagctgggacctacctgctcccttctgtccccacagcctccagcccaatagttgctcagtgcagctttgaactggaacaatgccctcytttacagctggagaaactgaggccccaagagggtaggggactttggtaattctgcgccagtcaggatttgaacccaagtttcttttctcccagcccagaactttccccagcacagtggagggtgcatatgcagaatgaaggtacatggaaaaagctgaggcctcacagggtgctccaggccctgcttctgctctcaccccaagctcacctaccaacacaaagccacagagaatccaggttctgcccactcacccctgtccacaacaaggagggcagccaaggccagggcgattayccactggcggacggccatgctgatcctgggatagtgtagcctgagctggctggggcctgsgcctgaggaaggatgggggcctatttatagtgccgctctcctaatcttatcttatctagggccagatggagagaccagagttaatctttgcacgctgacatccggaaagggcttgctctaggtgcagatgctgagcttttgatgagatggggctgtggccatggggctggcaggtttccagagtgacaaaaagtttggacaacttgcaaagctgactccaatctgagggttggagcaaggagaggaaagttgaagtagaaagagagagagttcaaggcagagagaaggggaaagagatagagaaagagagaaaggaaaaaagcaactggaagatggcaggaggcagagaagggggctggagcctggattcctttgccagtgcctccagcaaccaactctgggacctcggtagagccacttttcttaactgggcctcagatcacccatgcacgaagtggagatgagacttttggctctgcctttctcccaggctgctgtgaggatggcggcggtgatagcagacgggaaaacattttgcagaatatgaaatgagctgtaaacgtaagcagaaatgatcatttttacttacttttatttcacttatttttttgtaccgcaaagtgggcacaactaacaggcaaaacaaaggcaaaataaaacattaaaaggaagatgccttcttgctttgcaggtattatgtgttcatttgctttttttttttttgagacagagtctcacactgttgcccgggctggtgtgcctggcgcgatctcggctggctgcaacccctgcctcctgggttcaagcgattctcctgcctcagcctcctgagtagctaggattacaggcacctgccacctgcccagctaactttttgtatttttagtagagacggggtttcactatgttggccaggctgrtctcgaactcctgacctcgtgatctgcctgcctcggcctcccaaagtgctgggattataggcatgagtcactgcrcgcggcctcatctgtatcttcataggttaaataaagacaagattcttttaaagaaaaatcagtttctaaaactcccccatacttacatagtatacattaataagtmatttggatatttgctctcaaagaatttctgatatataaaatacattttatttacatacacgtttctctaattcatttagatcagtgtttttcagctctgtctgcagattggatttccctgggggagaatttacaaatacagatgctgagcttcgctctgaaatatttaaatcagaatctgtggttttttttttttaaagaaaaactttatttcgaaagatttcaagcctgcagataagttgcaagaatattccaatgacaaggcgaaggattcttgtttgaggacagccccagccaggtgcggtggctcatgcctgtaatcctaacacttgggaggctgaggcaggaggattgcttgagcccagaaattagagaccagcctgggcaatatagcaagaccccaactctaaaaaaaawttttttttttaattaaaaaaagaacagtccctttggggacaccagccatccagtcacctctacagacccatagaagccccagacctgtggccaagactagcttgaggcccccagtgatccttgactcarcttcaagatccttccgttcctccttaggaaactgcacagtcccagggatrcctctgaggcaggtggcagctatctttccattgcttaggcaggtagagaaaatatttaatgatgacttcctgtcctaaagcaaaaacgccatcttataaaaggggaattggactttaaaggtcatyttggggccaggcaccatggctcacacctgtaatcccagcactttgggaggaggctgaggcgggtgcattcacttgaggtcaggagttcgagaccagccctggtcaacatggtgacacccatctytaccaaaaatacaaaaaattagccaggcgtggtggcgcatacctgtaatcccagctactcaggaggctgaggcaggagaattgcttgaacctgggaggtggagggtgcagtgagccaaggttgtgccactgcattccagcctggtgacagagcgagaaactgccwaaataaataaataaataaataaataaataaaaataggcttggtgtggtggctcacgcctgtaatcctagcactttgggaggccaagctgcatggatcacctgaggtcaggagttcgagaccaggctggctgacatggtgaaaccccatctctactaaaaatmcacacacacacacacacacacacacacacacacacaaattagctgggtgtggtggcgtgtgcctgtaatctcagttacttgggaggctgagggaggagaattacttgaactagggaggcggaggttgmagtgagccgagattgcgccactgcactccagcctgggtgatggagccagacggtctcaaaataaataaatagatacataaataaataaaataataaaataaaaaataatggtcatctgggtttcatctcccttcttccactagggctttcctacagcagccccactgggaggtcattcatggtgatggggagctcactacctaccagtttcgttgttggatggcttcgaacaaagacagtccttcctcacacaagaggtctgcctccctgagagtccttggggcttatagctttgtctctggcctcctgtacttgcatgaacctcctgtacttgcacaagcacctttaggctgagcaggtctgccatctgcctgcctcctacccttgcacatgtgaagctcctgggcctctctccatttctcatctgatcactgacaggtctgtctgtcagtgtcccaggttacagtgaggaagggacagaggggagcaaagggatttgatcccttccttgttttggaccttagatttctatccacgtggcagaaatggctactgaacattctagttgctgcaaggagccaggacgcttgaattttgcatccttcaaagtacagagtaaagtcaagggcagcctgtggagtactgagctcacttaccatcccagcccaccccaaggtctcctcttcagacaaataccttctagattcactcatagtaacaaacttcgtaatctgtcatcccatcaaagtgtgaacctagctcctatatccgactgctattgaacagcccattaaggatgtcagtgcatccaagaaaacctcaccattaattcaccattcatgtattcagtaaaagtttaacaagcggctaagtgccatgctccatgctgagtgcttggatatggcagagagtgagtcagatacagttcctgtcctccaggagctttggttaagtagaggcacagtactgaacgggcagcagcattgtatcatcactgctggagtgagtcccatgaaccacacatgctctgttctgtgagaggatccaagagtgacctatccatctgagatcagagacgccaagggctgagtgggcagggcaggctgtagccaagtggaacagtgctgcaggtagaggaaacagaatgtgtgagagccctgaggcaagaagaagcttctcacatctgaagaacagagaagccatgtgggcaaagtggggccagggagccggggagggccatgacaggagtctggaatggtcagtgggggctaaataagccttgatctctgctcccctgacccacatcccagcaacctccggcagtggaatcccaggcactgacccctcagccttgtttgccttcccatggagggtctaggttctgcttcctacatagctcttgaatccatccctgcccctccacaccccccactctaccctagtcctggccactgttgtctccaacctggccacctcaatggtgtcctgtctcatatccctggctctccacctgccactccaaatcactctgcacgcagcgtcccggacaagcgtcctaaagagcaaagctgaccaggtcatcttgcccaaaacactgtaayggcgtccactgccaacaggaagaagcccaaactccttagcctggtgaccacaccccttcaacatctgatcccaacccatctttccagcttcaccttcaccttgccccaccctggacctgcacttcttcagttcaactgaaccccttgcacaatttattctgtctgctggcaatgctgggtctcccttctctatccccctactcccatcctgtgaaacctagcttaaacattccctcttctgaaaccttcctaactgcctttcaccaacaaggtcatgactgttgtcacccaccctgaatgccccactcgcattgtgccttctgtctcctccatccgtgtcttccccctgcactttggtggcccttgcttatccatctgctgactaagctgcaagctgtctgggaaaaaggacaatgtttcaattatctctattgccctggtgcccagtcctgagcgtgggacacagtaggtgctcaataagtgttgaggctaggcatggtggctcatgcctgtaatcccagcactttgggaggctaaggcaggaggatggcttgaggccaggagtttgagaccagcctgggcaatgtagtgagaccccatctctacaaattttttaaaaattagccaggcagtgtggcacgtgccttgtagtaccagctattctggaggctaaggcagaaagattgcttgagcctgggaggtagaagctgcagtaagctgtgatcacaccactatactccagcctgggtgacagagcgagaccctgtctcaaaaaaatgttgcgtgacagatccaagaacgggaagaacacagtgggcccaagggcagagatggtgcctgctttgggaaaagaggaggtaagtgctgatccctccatgcccctgggatgccgtgagtgcccaagagagcccccagatacacacaggccccaggaggtgtggcctgggtcacagtgcctgttgtgtctctggcaaaggrgtaaggctgccaccctccagcctaagccaacccctcctgcactctttcctcctctggcttctctgagacatagagaggtacaggagagagctccggaccaggagtgaggcaatctgggtttgtgtgttcattcaacaaatacttatgaagtatctaccatattctgtgcactgttctgagtcaccagggggtcagctataaataagatggagaaagtccctgtcttaaggagcttacrttctagtggggtgatagacaacaaagaaagacaacaataaacacatgacatgtgatgtggaagagaaatcaagtggccaagaggagagtgacaaaggagaggcttctctttgaatagtagcacatgagcagagaagaaacgagtcctgcagaggtggcaggggaagagcctgccaagcagagkaactgcaagtgcaaaagccttgacttgggaacagggttggcagctacaacaccaaggagtccagtagagccagaatggaaagaacaaggaagtcagtggcrggaggtgagggccwcgttgtacactcagctcccagcccagctaccagtttcttaggtgagcttaggtgcatcccttcccctctttgggcctgcacatgttcttccatctcccatgttgggttcaccaatttgtaccaccagcagcctgactcccagggcacctgtgagggccctggagaggagaatgtgagatgagatgtgtgtagctgctgtgataccaaggaaagggtttaagtggggattcctggaggcagaggagaggccaagacctaaatgccctgggcacctgcacaggtcctggaatcaatacaatcaggacacagatgacctaaaacagggctcaggcaggaaagctgggcaattcctgcatcttctgccccaggtcagagtgaaaacctgggtcctgtgccttggctgggccaacactccccagcctcacccagcagccttcatgccatctgcttagattggcctggtgcccagctccttgaggtaaacagccactccttgatgacggcaatgctggatccatcaggtctgagtcatgggttctgctgatgggtggtggggacagaggccttgtttagcttaaggtgggggagctgagctccagcagagcttgggyctgccagatggcatggccarcatggccagtttgccctgggaccaccttccctggcctccagctcacatcctgctccacccttcctccagcccaaagtgcccccacctgcctggaaacctgtgtgagctacccaggtgtgggcatcccctccagggagacctggtctggactgagccagctccacagcctgtcctgggcccctcagccacccaactcyatgtcccaggtctagagcccacctgcccattccacttggtccagagctgtagggggcaggcaatgggaggacactactttaaggagaggtttcatctacttttttgggatttgactccaaggaatgctcagtgatgaaatgagctgaagtcatccctccatgggggcatccactctaccattcaatggacacttattgagcaccggttgtggggcaccaatcactatgccagtccctgggactccagagatgagtgagacttggactcaaggagcttgcagttcaccagtggtggagaggtggaatggactcttgagcaggaatctacaaaatgctgtggtgagagctgtgatagaaatagagatattccttccaccccattatcctatggacccccttctcaatatgtccaaaagtcaactttccatcttctgtccacccagagctgccctacctcccagttcccccacctgggtggacagcaccaccatcaccccactgccttaggctaatctggggaccatcctgagcttctccttcacctctacattccaggaaccaggtcttactgatttcacctcttcaccacctctcatatccatcacctcctctatatttcccctagttcagcctctgcgatctctcaccttcattactcatgctgtttccctgcctccagtctcacctcctccaatccattctgcttccagagccatctttctgaatgcaaaaatgaccacatcatccctctgcctaatattattcaattacagatagtcaattcaactaaagttactcagtcacaatgactcaagcatgaaaaccaagctccttggtttgtatgacataaaagttccgccacgactggtcctctgttggcctctctaacttcacctctggccacttgagccttcaccccatccgatagaaccacctgcaggcttttacgcctccaagccttttcttatgctgttcttcctgattggcgtgcccctctattacctccccttgggctctcctctcagaccctcagcccactccagtttggggaccatgtttgcacagacatctatcccagcagcagctgtaatgtttcatgaccttatcttgcctatgtgactatctctcatatttccttaaagagaggaacagggggacatttaagtcacttcatatccccagtgctctgcccagggcctggcatgtgtgtgttgactatttgaatccatcctgcactggatgaagtctcaggacagtaaggatgccagcttcagatgcttggtctgctggactgagggcttgaggaagctctgaggacaagctggactctagtgggtccactgggtccagccagtgacatcctatgctgtgtccatataggtgggaacagaggtggcactctatttcaaggaccacattttctactagctcttasccaacctggctgrggacctaagaacttagtatctcctctaagacctgagtgtggtgctttgtctccataagctaccccaagaccatctgctgaactcacaggaaacagtttcagtkcctatcttctctcctggtgcatggactcttggcttgatcacctccaaccataagggattatcatacagacccaycgaggagtggggctgckcaagagacctggtgttctgggaccttgtgccatccaaacatttccattcatggacataaccagtggctcaagtcctctgagcatacatacaaaagagcttagaacaaagtctcttgatacccccttccgttccagagctctgatggccttcagaaaaatcagattatcacagcctggtgcaacatgwcacaactccagaccactatgaattttgatagggtccttgggttgcaagcaacagaagtagattttggcaaacctcagcagaataataattttccagaaggatgtggtrttgtcttaggttggactcaggggcagaccatragaaaagcacattagattccaaatcattttctgggaggcaatcccacgaaacacctgcaggagagtgggaataaggaaggcagggaagggaactaataatgtatgcatcgctgaggttaccactggggaaactgggcctcaatccaaccagggatggctgggacactgtgtggcacacatggcagagttatccccactgagaggtgaaggaattggggtatatatccagcaactcccaacagtcgctgattgagggctgctggaagagagaccattaactccctggcactatcggctagctcctttcatgtctctgggctcytagagaaagcctccgggcaaaggattgcaagggttgcacagggaggccgcaggtatgcacaagaatggggagtggtaaacagtgtgggtgggacactgacagtgcctgctaccacagctgcacaaaaaactaggtgacaagctgaaaaaactatgccccaaaagaactgggctcaaaaaacctagagttatgtgtccacattccgtttttttggtttttgttttagagacaaggtcttgctctgttgcccaggctggagtgcagtggtgagatcacggctcactgcagccttgaccttcctggcttaagcgatcttctctcctcagcctcccaagtagctggaaccacaggtatgcatcaccatgcccagctaattttttatttttattttgtagagacagggtcttcttatgtcgcccaggctgktctcgagctcctgggctcaagtgatcctcccaaagtgctggcattatagatgtgagcactgtgcccagcccatgtctactttctgaccagggaagggaaggcatttttatggacagtcccttatttgtatccaatgaaggtaagtaggtctccaaagaaaacctgggattctattaccgaaaggaggaatgttgctggtcagacaaaagccacagatgttactaaaccttccccacatgcttactttgttttgttttgttttgagacagagttttgctctgttgcacaggctggagtgcagtggcacgatctcagctcactgcaacctccgcctcccgggttcaagggattctcccacctcagcctcccgagtagctgggattatagacgcgcaccaccacacccagctaatttttgtattttaagtagagacagggtttcaccatggccacatgctgatctttcacttgtacgatgaattcgctcacaagagcccagggcttcataaagctggcccaacaagggcctcctgatggctcctggacacaggggtgccgttgtccagagtaacagctyccagactcatgttggagtcctgagtgctgcctcccttctgggctgtgccaggggtggrccaggaggcagccatgccatcagaacctgggctctggagtctggacaccttgtctktgtgacyttgggtgtgtcattgcacctctgagcctcagttgctcacctgtaatcagggctacttcatgtggttgtgtggaatgtgttctgttcatctccagggggtgccattccccttagattccatgggccctgtagtgtgcacttaactggagtgggggcaggtaaggtatccagcagcaaagttcagaggccatgcaacctgcccaaaggatcctggggtgtgctggggagaaccagagttttgttcacaatctcccactctcatacttttctttggggggctgtcatcatgctctcccacttatagacaggcttactgtttgctattagggatggggaggtatggctgcagaccgcttttcccaactttgtgaactaaaggaacagaagggacttttctcctctccccacagcctccttcagtgtataaaaacccaagaggagactctgattgggttgggtaagtcatgtgctcatctcttgaaccaatcaatgtggcctggaaattgggcatctgtgatgggccgggctgaggtcacatgtaccctattgttgccaaaggaacaggataaaatgattagcgattttggagcctggcaaatggcacagcctcagagcccaaaaggctaaagtcttcagtcggttccaggagccctggaaattctttccttttcatgatgtttcytttccatatccaaggtggccctggttggtacccaccctcttaaggcagactctcttccaggcaggtgctttcaacatgcccatgggcactggtccaaggcaggcaagggagaggtctagttctcatgctcaaaggcgcccagtaaatatttgaggtgagtcagtgcgttgacaggtgaggcctcagggcttgtctgcccctccctggtgattgtctccacctgaccctcaagctgcccgaagatckctgctgccctctccctgtggtgggtgtgatctgggcatggtcccctgcccagggtctcctgcccacctctttcttcccagcctcgaggaggggtccttagatycgcacaaggagttccccctcttagcctcttaacctggccttataattctatctattttacagacgagaaaattaaggctcagaaagattaaatgacaagttcgaagtttccagcattgtaagtggcagagccggcattcaaaacaatatctgattttaaatctcagactcttaccagattcctctgcccaccatagattctggttttaaatacatacacccagaagcccatcctggcccagtaactgaaatagcaggagctgaaagagccgcacaatttgaagtgagtttcgtggaaaattctgtggtccagccttggcaggaagttgccaaaatagtcgagtgtggaccacaggtggaacctccttgcatctgggcccagctaaggtctagaggtccctgaatatagaccctctccaaaaggcagtcattccagggggtccaggcagaaggtgggaggagctgccacacatgccccayggcacttataggttcagcaggcaggacccatgtgaccccagcttggcatcttcccagacacagccactggcagtatctatgaccaggctgaatttagacacggggtccaaaatactgctactcatcccaccaccgaccccagcaacctgcaccctcctcaccaacattcacatagtacctgtgctgtcctcggcattgttcagagggtacactgctccctttgcagaacctctcctgtctggccctcaaggccaacctccccctccctttatggtgaatggggtatgggcatggagtctcctgccgtctctcctcttccctcccagatttgaaaagaagtctttggactctcaccaggatatgtgatatcctgatatgtccagccttagggtcttctgctgtccctttctgagaatctgtgcttgctgggaacccaggacagctccaaggacaggaaggactgaaggaaggggcagtgtggtttggagaaagatcccagattcaggaatacgacagaaccgggtttgaaccctcatttggccactcactcactgtgataggcagaccgatgctcccatccccccaaatacctacctccttatcccccaaacctgtgaatatgttacctcacatgacaaaagggattctgcatctgtgatcaaaggaaggatcctgaaatggggaggttatcctgggttacctgggtgarcttgggccataaagttctcataagagggaggagggagagtcaaagaaggagctgtgatgatgaaagcagagtggggggtgatgcaggcctggatcccagggttagaggcagccttaagaagctggcaagggcaagggacgttttctcccgtagggcccccagagggagagcaagcctgtgccccatttctgactctgacccccgagtggaacagaatgcattgatgttgtttgaagcctctgcgtttgtggtaatttgtgactgcagccatggggtgtgaatccacaagttctgtgacctcaagcaaattccttaaccggagagcccacattccctcatggggtgagggtgccgtggctcatgcctataatcccagcatttttgggaggctgaagtgagaggattgctcgatcccaggagtttgtgatcagcctgggcaatatagcgagatctcgtcttgacaaaaaattgtaaaattagccaggcatggtagcacacgcctctagtcccaggtatttgggtggctgaggtgggaggatcgattgagcctggaggtggaggctgcagttagcaccactgcacttctgcctggcctacagagtgagaccctgtctcaaaaatgacaacaacaacaataataacgcctaccttgaagtgttgtattaaaaagtatatattagggctgggtgcggtggctcacacctgtaatcttagcactttgggaggccaaggcgggcatatcacttgaggtcaggagttcgaaaccagcctagccaacatggtgaaacctcgtctctactaaaaatacaaaaaaacattagcctggcatggtggcgggtgcctgtaatcccagctactcaggaggctgaggcaggagaatcgcttgaactccggaaggggaggttgcagtgagctgagattgcgtcaccgcgctctagcctcggtgacagagtaagactctgtctccaaaaaaaaaaaaattaaacgcctggctcataacaaaacttaatacatgatgccgttatgaaaaggaggaagagagaggtgaggagaaacagaaagaggaagagggaagagagaagttgggtggtgaagctacagccagccccatgttctgggcagctccaggcaatgcggggcccatggaaacctgcccatctcttcacctggctttcattcattttgacttcaggacactcttattctccttagaagggtcagggccaacctctactaatagacccctatgaaagctttccctactgaatgaagaactgcagtaaaaaacaggtataagagcctgccccagtatacgcctctggcactcctgtggctccacgccaccaatgcacagcagcagatttgtctttccgcctttttaactttccaggcttgaccaacagtagcctatgcagaaatgtgcaagtcacaagctgaatccttcttttgtgaaggaattgagctggtgacctgagagagctggggkgtgtgtgtgtgtgtgtgtgtgtgtgtgtgtgtgtgtgatttccaattgcctccaatttctccacattctcaacattttaacattctagtgagtgtaaagtgatatctcattgtggttttagcttgcattttcctgaaaactaataatggtgggcactttttcctgtactatatagctacttatatatctccgaatgttgattcacgactttttgcctatttagataagctgggttgttcatctttttattgctgatacaaatacattgttggtggatgtgtaaaatgatacaacttatttggagaattgtttttcgcaattaaaaaaattacacatctatccatgctatgaccttgcaattccatccacagtaaataaaaagcatatgtctacacaaagccttattcgtaaatattcatagaagctttatttgtattaggcaataagtggaaatgatccaaatgtcagtcagttggtgcacagatagaccaactggaatacagctatgcaatagaataccacctggcaataaaagtgaattaactattgatacgtgctacaacatgactgaatcgctaaaacattatgattcctgaaagaaggcaaacacaaaagagtatgcactgtataattctgtataattccacatatgtaagttctacaacaggggaagctaattgtggtgacagaggcggatcagttgttgctttcagggtagggcatggggagagtaggagggaaccttctggggcagtggaaataccgtatatattatttagagtagggattacactggggtatacagttgtcgaaaaatcatcaaatgaagatctgtgcatttcattgtatgtaaatgttatcttgttaaaaacaaaactgaattatgccacaaatttgaagtgctaccaccaggtggcactgatgcgtaatttccaagagttcaactgtaaagtttatgcagtgactaagactcataaatcattctatttgcaagtgttctcaaaagcatgtggcattgttttgtgggtatttttcatttcaaaaaataatattgtgctggaggcctccttctgttcctttcttcttttttcccccattcagcattgtggagttttggcgttttttgctcttgtttatttgttttttgtagagacagggtctcaccatcttgctcaggctggtttcatactcctgggctcaagcaacccttctgtctcagcctcccaaagtgttgggattacaggcttgagccactgcaactggacagamccatgttttaaagatttcttgamcttttgkgtgtatctaattcattgcttgytactgtggtagaatattctgtagtgtgcttakgtcacattttacttacattcatttccccaatgatgaatgcctcattgcatccagctctccagccatcacaaataacttggtgataaaatatcctcttatggccaggcacagtagttcacgcctataatccaccccccccagactttggaaggccgaggcgggtgaatcacctgaggtcgggagttcgagaccagcctgaccaacatggagaaaccctgtctctactaaaaacacaaaattagccgggcatggtggtgcatacctataatctcagctacttgggaggttgaggcaggagaatcgcttgaacccacgaggtggaggttgcggtgagccgagatcgcaccattgcacttcagcctgggcaacaagagcgaaactttgtctcaaaaaaaaaaaaaaatcctcttacatgtctctttatggagttgtgtgagaatctctttaattatatagccagtagtgggatcctccccatccctactcataatatttatttatttgtagcattttatccccttctacttaatacatttcctccagaattggtcattatcttgggtgaaataagccagtcccaaaaagacaaacgtagcatgttctcacatatgtgggagccaaaaaaaatgtgattacattgaggtaaagagaggaaatacggagaacagagactgagaagaatgaatggaagagatggggaaggatgaagagaagtgggttaaagtgtacaaacagttagatagaaggaatacattcattgcttgatagcagagtagggtgactatagttaaacaaaaatgtactgtacttgggtgatggacagcctaaataccttgacttgatcactatgcattatatatatatgtaacgagatttcacatgtaccccataaatttttacaatttttacaaataaaaagatgcatcataaaaaatttccttcaaaatcttcatgctaaaagttattaagtatatttaagcaatgtcctaaacttttaaattaaagggaatatttgctgtgaatccttttacttctctctttgcaaaatagcaagtgttgtttgagatgtgttttaaatttacaaaatagtattgctgactaagatttggatgtccttttttttttttttttcattctcaaaggaggtgaccaaattgttaatctggatttttttatactgaataaatttctctcaatttttttgtggtatagcaactgaatttgtgcaccattgtaaattgtaaattaaagctgatatttaaaaacaacttttaaggcaaagtttctcaatggtgacactactgacatttgggacctaataattctttgttgtaaggggctgccctgtgccttgtaggaggtttggcagcatctctggctactacccactagatgccagtagcacctcttttcagttgtgacaaccaaaaatgtccccagaccttgtcaaatgtccaatgggagaccaaaattcactccagctgagaatgactgttttaagataaatgaagtctgggattcactggggtctttttctagatgtttcctttcttttaatcagttcatttcaatcccaatctcggctatagacttgtattacatggccctttaaaaaaacatcctcccctgctttctagctggaataaagctcctcctggagacactttatctccagatastttctggagtcctttgtcttttagcagactgagcatcaacaggcttccatgttcgcttctctctaggtttcctaacctccccctctcagccactgcagaggtcagaggaggaagacagagtcagaatttctcctgtgctcccctcccagaggaacccagaagagcagagagagccccacagcagtgtgataagaactccaaagaagtggggcgtggtggctcatacctgtaatcccagcactttgggaagccgaggcaggcagatcaccagaggttgagagtttgagaccagcctggccaacacggtgaaaccccgtctctactaaaaacacaaattagccgggcgtggtggcgggctacttgggaggctgaggcaggagaattgcttgaacccgggaggcggaggttgcagtgagccgagatcgtgtcattgcactccagcctgggtgacagagcgagactccatcttaaaaacaaacaaacgaacaaccaccaccccccaaacaaaacaaaatctcaaaaacaaacaaacaaaaaacccccaaaacaaaacaaaacaaaactccaaagtgggacgactcagtctgtgaaagaaacatcctcctctgcttttcagttctgacatccctctcccctcatcaagtgtctattaattctctagacctttgtaacttaattatctccaagactcgagtgaacactagagtgctcactgtgcccctcacctctgttcctcggcatcctagccccgcaaggtgcttctcaagaggtattctctatggtcaacgaagtgagcgaaatgctgctcactggatctctctctgggacactggcactgaccactagtttattaaaggctgtgagaagcttttcaggagtctatttttcatccagcatttcttggattaagtgattacaaaagcttcccacttcccccaccacatttaacaaatatctgttaacatccctctgaattggtgtcagaattggtgtcccagggaacacggtttaggaaatgtcttaaatattaacaaccttccagcctggccaacatggggaaatcccgtctctactaaaaatacaaaaaaattagccaggcatggtggtgcgtgcctgtagtcccagctactcaggaggctgaggcagaagaattgcttgaacctgggaggcggaggttgcagtgagctgagattgtgccactgtactacagcctgggtgacacagtgacactccatctcaaaatatatatgtacatattaataacctataccttttgcaaatcaccttcaaatgccattaatttgttcattaatttgctcaaacaaactgctgagcatcctccatgctagggagtacggctacaaagactacgtgtcccagtagcccccagactagtcagggagcagatgtgggcagactgtgctggcacctgggacaacggctgagccaggtgttcaggaaatgatggatgaagtgattaattctgacatcagcactctgataatcttcacagaacaagcaagacctcatctgagcctagaatataagcctgggtcccttccatctttgcagtatcaggagcttgttagaaatgcagaatgtcctgacctagaactcccaaatcaggacttaggctgtggcaagatccctgggtgatccttatgcgcattcacgtttgagaggcgctgacttaaaatagcgggctttctgacaagaatgtaaacagaaccaaaatatacttctgtgtggggtattggtcaaaggctgacctagtgggctccrtactaggccaggcagacagaatacaaagatagggtatagaaagactggtagtggcaacaagtgaagtgtcttctctcctgtcctggccctcacctaacaaggactgtgattcagcaggttagactgcagatatgcagtgtggagggagcaaggacaggcaacgaggccacccctgtggtcccttctgcctagatgtctgccgtgactggctcagtgtaatgggtatggctcggaggaagggagcagggcatgagggaaggatgcttcccattaccctcatctagagacaccacctctgctgtggaccaggtaagtgacaggccacaggggctcggagcccagggctctgtgtgaagaatttttggcctcttcctcttcctcttgatcttcaacactggtcacaagaggaagygcagggagggttcagggcagcctgacccttcaggaagcagacacatttagggccagtgtgcctggagggttcagggcggcctgacctatcaggaagcacacacaatacccttgcctgggactggacctgggcccagacctgggccctgctggcctcggtgagactgtgggcaggttgggccttgggaagggaccttgggaaggggccttggtgaggacctaagagaagccccttctcacagacttgggcctgtgatgggtagagagtggctagcccaggtggggagtaactacgagggaaggaaactgaaaaccgcaacatcaataaccacagcacaacaaaactaaatataaagagatcccaacacccacctgacagcagtttccctgcccctgmctctggaagacggtctgtgtgcgaagcatcccccagcagggaccatatgtgtgtgccctccagagtccagagaaggtgaggtgagctcccaatgcccaggatcatcaggatgtagacttcttgctattctacctaaacaaataaatcagacaggaatctcgctagtagagatggcatttcacatagaggggagggcccaaggaaaggcccaaaggcaggaccacactcatccggataggaagacaaatgtcaacgtatacgtctctctcctatcctgattgagctggcactactgtgttttccagtctgaggacaccagtcacaaccygtgcatatcacggtgatagagtcacgtggttgctcctcaagaactgggctagtttggactcaamttgtcttccagcagcccactgcacagtggcccaacctggcctcagctggaagactaagtactccccatatctctacaacagttgctcaggacaattcagctggatccactgaagcagtcccactcctagaggcagccctcatcagaagggtctctgcctcctgctttctgaagggttaactccaagagtcaaccaggccaaggcatatctggagacagattccttggttgggacttgccagggtcagtctcatttgtttctgataacgtgagcataacataatgtgtgtgttttcttaaaaaacaacataaggctaggtgtggtggctcaggcctgtaatcccagcacttttggaggctgaggtggatggatcacttgaggccagragtttgagacaagcctgaccaatgtggtgaaaccccgtctctactaaaaatacaaaaattagctgggcgtggtggtgtgcacctgtaatgccagctactcaggagactgaggcaggagaattgcttgaacccgggaggtggaggtggcagtgagccgagatctcaccactgcactccagccagggtgacagagtgagaccctgcctcaaaaagaaaaaaaaataaagcaaaaataaaaaacaaaataagcaggttggtgttccatgtaagtctgaaagtctgaatctgctaaggagtgtgtaacaattgacctgccaaaaaaaaaaaaaaaaaaccggaaaggaaaaagaggctgggcatrgtggctcacacttgtaatcactttgggaggctgaagtgtgcrgatcrcttgagcccaagagtttgccaccagcctgggcaatatagggagacccatctctacaaaatacattttaaaaaattagccacatgtattggcatgcacctgtggtcccaactacttgggaggctaagttgggaggattgtttgagtctgggaggtcgaggctgcagtgagctgtkatcacaccactgcactccagcctgggcaacagarcaagaccctctctcattaaaaaaaatggaagaaaagaaaaattataattacgaaagtaattcatgttcattacagaaaaattagaaaatacagaaaaatataaggaaaaaaatcytgcccctaattccaccatctaaaggcayctctttatacattttggtgaatttcttacaagtttttttcctacrcatatttgtgtacatatttaacatagttgacagatcatartgaccatacgtttcatgcccyactttttcacttagcagtacgttataagctyttactcattaacgtttgctgtaatcataattaaatattccatcctataatcctctaaattagttagtcacatccctgagagtggtgacagatttatatcacacttcgactaagaatgtgcagagaaactgtgatttctatattctttctccctaactgatgtagtcttcttcacaatgtcccacccactggytaatagggaaaaatgacaacgggcctaactaaagaaaaatctgaagcaataacctaaatagcctgtatttaaggcttttstttttcttttttatttttatttgtatttttttagatggagtctcactctatcgcccaggctggagtgcagtggcrcgatctyggcttactgcaacctctgcctccagggtttaagcgattctcctgcttcagcttcctgaggagctgggactacagtgcctgccaccacaccctgctaagttkttgtatttttagtagagacggggtttcaccatgttggtcaggctggtctcgaactcctgaccttgtgatctgcccgcctcagcctcccaaagtgctgggattacaggcttgagccaccacgcctggcaaaggcttttgtttttctatgtaatccaattttgtatgtcagaagcctcagtatttctcttcgtattttttctgtagtaaattctaatccctgccctccctttttccccatggatgctatattagccagggtctcrgcagaaaacagatgggttactcartgtggtcaytgaagggtttaatgaagacattgtttatgaaagtgccagcaaggctaaggtagtgaataagaaatgacaaaacactcagggactagaaatgtgggagagcatcgctaccctgaggcccaaaggagcaacaatacaractgcagcgatgggtgagggacagctcgaaaggaatttaggtggagaaatgcagycgtttcttacctgtggtctggcagagggggagctagggcaataaataccctggcatatctctcctcctgccctcacgttctttccagtacctcccatttgcagaactgaaatggaaggcagagaggtaagtatattccgcagaaaggtggcctcccagtgcacaaagcagrgtggaaaatggtggaccatggatctgaagaagcaggtggaaaataaccagcccatgagatttgtgctgaaggggaaaagacaaaagaaacaagaacattagtacatttcaaaatgcagtactattctcattgcatatctatgattgagcttttaagttatttctcattttcagttttataaataatattgtctcaaaaggggacgtctttcaaactctaaaggttccaatgaaatgaatacacagtgagaggaggcgcagtatctcccagagtcagattgtattagwtaaggatcctttggttgtgaattatagaaacacactagaaggcccagcatggtggctcacacctgtaaacctagcactttgggaggccgaggcggtctgattgcccgagctcacgatttcgagaccagcctgggcaacatggtgaaaccccatctctactaaaaatacaaaaaattagccaggcgtggtggcacacgcctgtagtcccagctattcgggaggctgaaacatgagaattacttgaacccgggagggcggaggttgcagtgagccaagatcgctctgcactctagtggggtgacagagcgagactgtctcaaaaaagaattattaactatctgtaacggggattggagtagtgaaggattggccagtaggaagtaaagagaattttaaagagtatgggaataacaactagaaggagcagttactacctctagggctgagatatcccatccaagacagaaaccaatccccaatccccaccccaagggctgagatccagacattgttggagcaggtatggctgtggttcactggattgtaaagaagtccatgtggygctgtgttgatggaacttgctggaaatctaccctctgggatkcttgggaggtgtctgycagagtcactcctataaaactacctgtagtagggagtgccaggggaagctgctgctggcctttgsttgatgctggccaccatgcatggtaggagccagaccctggagaagccatctgtctttgygggaacctgatgctaaagaagttgcttgcactgcagacgctggatactggagargtttatctatagaacccaggtgttgcatgctgaaacatgcaggggatccgctaagcagagcacaccagaataacgaaaaaagaaaaatttctttctcctataatgtctctctagtgccctttactaacaaagtttaacctttgtcagctgacaaaggaaaaatattaagactgtccagctacatttttgcagagcagggaatgaagtttgagtttggcactgagaggcaatagattgataagtagcacaatcccaagtccatatccccagagaagggactatgactgggccagctggacctgccagtgccccctctcaattgctcagttacctttgctaggaatggaattgattaataaaaagagaagcagtgaacatggaaaagcaggtgcaggaaagtaaactggtcagctagccgcctacacactccagaggagagagacactttgtcaggagaaacaagcaatttagtcacagagaacttgtctctcctatcaatcagggacatttccccaggtctcatcatgatttgaaaaagtactcctcaagcctgtccatttccttttattcaaacacgctgctcaccaagaaaccttctgatttttcttcctgtctaccctagtaccagctggagaatagatattgggcagtggatatacatactatgctgtttgcaaaaggatrtcatccactgtgctctaataaattggtatttgatggctacagcrgccttggatggtattagtgagagtaagtctgtccccaagggaccactcttctctastacactaagaaaatccagtttctgacccagagaagctgagaaccaggttttggacttgagagactcaaccaaggcactttcctgaaggatctggagactgcaccctatacaacagcctgctagcacattccccagggaagaaccctgcagaacccataagtgggcattgataaagaatattctaaggccaggcatggtggctcatgcctataatctcagcactttgggaggctgaggtgggagaattgcttgagcccaggagttcaagaccagcctgggccacagaggaaaatcttatctctacaaaaaataaaaaattatctgtgatggtrtatacccttagtcccagctactgggaaggctgaggcagaagggtcccttgagtttgggaggtcaaggctgcaatgatccgtgattgtgccattgcacttcagccttggtgacagagtgagactctgtctcaaaaaaaaaaaaaagagtattctataaatgtctaaccaatagccattttctgattgctggactttaaggctatttccagcctttggctattacatacaacacagagatgaacatctttgtgattagtgttcatgattagtattctttttgctattttgttttttgtatttcaaatgttcccttaggatggatgatcagaattagggataaattgatatcawatcctttcctcctatattttttggggaaaagtaagaacatttcagagacacttgagacctactgcccaaggatttcagaagcmtattaccaattacagtcrcatgagaaaccatttcaggacatcctgacacacatagagtcttacagtgtaaaatgtgtgtatgtgtgtatacatatatacatggagacatatacaatctttctttatttgcatttctttcattacttttagggttagatattcatgcccatatttgttaattccttgccctcttttaggaattgtctattcaggccgttcacaattaagaagtattttatttcaatctctggggactgtcatgtcccagattctttatcttgccctcttttgaatagagaggggctctgttcccatcttcaagccctttggaaattctcatctgaattcaagctcctttgacatagractgggcttgggtagctaagagctttgatgagactggaaacaagtgtatgggagtcttaaagcatgcaaagccaggtgagcgttcatcctccagtggggaatgcaaaggcagatgagcgttcatccgcaggtgaggaatgcaaagccaggtgagcattcattttcaggcagagattgtttaaagggaagagagtggtctgtgtataattttcttttctctgtycatttttaaaaagatcccagagggaccctgggtgttttttttaactctttattgtgactcaaactgggtctctaaataaactcctcttaggaggcctaagacacatatctagaaaaaatgtgtcatttaaagtgcttttttgaagtcaygtgatgaattatcagagcaagaatctcctcactgcccactgagctctgtaccttctttggctcagatgtaggaaagaaactttcttttcttcctctctctatccctttatcccttctaagactgacacagagagcatggcttgccctgagaaacctgtaccccaggtgatcagtagatggcaagcgcaaggcaattacgtttgtcgacgtaagtgtggtgtggcatgtgtgggagtacaggaggtgacagcaattcattcacgtgtggagtagggcttagcaatggtaatcaaggggctttttggggaggagaggccattggtggtcaccttaaatgatggacatggtttggaaatatagtaaaggaatcagctaagttcctatcagtttctactcttgtctcactggtaccaccaggaatcctggttgtcagtgttgctgctggagacagtcacccatccctccgttacctatccatcatccattcatgcaagtatgcactcatacagccacctgatgtttcctttatttatttgctcattcttcccatgatccctccatctttccattcattctttcactagctaccaaggccctactctgtgcagcatgctgagggcacaaatattgacaagattctacatttcaagaagtacacagtctggtggttagctggacaacttaaacctaggtaacaatacagtgcaataaacacaccttatagaagtttgtttacagtactggatgtctgcctgtataaacgtccccttcccaaaaaggtcttacctgaccacacaatctgaaataggttcttratattattctttcttgtaatattcttttctttcagatcaattatcacagtttgttattatgtacttttttttttttttgagacagagtcttgctctgtcgcccatgctggagtgcaatggcgctatctcagctcactgtaacctccgcctcctgggttcaagtgattctcctgcctcagcctcctgagtagctgggcttacaggcacccgccaccacatccggctaatttttgcatttttagtagaggtggggtttcactatgttggccagactggtctcgaactcctgacctcaagtgatccacccgcctcagcctcccaaagtgctgggatttacaggtgtgagccactgcgcccagccagaagtgaacattcttgaccccactacaggtcagaactgaaatcagaaatctggggttggatcccagtaatctgtgttttaacaagactcccaggtcattctgatgcacactaaagtttgagaatacttactagattaataaatggtcattctaatgtatcttagacacctagatttgaacacagaggcaagaataattttatcagaattggggaatacttcatggagaaggtgatattttaaggaaatttccagctagataaatcatggaaaggcaattcaaacagagaactgtatacccaaaggcatgtagtcatggattagcatggcctttggagggatctataagtgattctatgggaaggtccatgcatggcgggaaatggtctgagatgaaataaagatgaagacataggcaggggttttggacgtcagttgttaagcggggagataacatgcatcggattactccactttacagctggaggaatcctgctcccaggctgaagtgtagtggtacactaccgctagagaaattcctccaccctacagcaaaagcctgtcctgagcaaacttccctgggctcactttccttttcctgcttttcctcctcccttcttctgctgctccctcttcttytctcctcccctatgggtgagacagcccagctgctgggggctaaccctacccttccccaacctggcctaactgctgatgtcagctctgtccaggctgttcgcagctctggagccaagcctggcccagccccctgctttagtgggaaacttgagatgctggtatgctcagagggaacactgtagatctacctagtaggagggttaatctgggatttccagggctctagagaaatagtcctttcccctggagacttcctgctcccagagagggggcagcagcatcagggccagggtttcttgggacccaggcttgcatcactcagtgccaccctccccaggggaacaggctccaagctgtgcctgctcctctctggtgactcacaacacgactgrtctccaagatctaaacctgattgtgcctggaagtgaagaagggtgataacacccttaataaaaatagatactatgcagtgaacacttagtgcttgctctaggtggagctatgagtcacctacacctgtagttctcagtgttatgtgatccagtgcccctttcttataataaatactttacaacaccacctttagcatacgtagataatataaccaaactacatcatgatttcataaaattaggccataaatgtcacagtgaaggtgaggtgaaataaaagaaacatataggccaggcatggttgctcacgcctataatcccagcactttgggaggctgaggcaggcggatcacttgaggtcaggagttcgtgaccagtcggccaacatggtgaaaccctgtctctactgaaaatataaaaattagctgggcatggtggtgcatgcctgtaatcccagctacttgggaggctgaggcaggagaatcgtttgaacctggaaggcgaaagttgcagtcagccgagatcatgccactgcactccagcctgggtgacagggcaagacgccatctcaaaaaaaaaaaaagaaaagaaaagaaaagaaaaatgtatagcacaaggttgtatacttcaacatgtaaatgcttggacagacccctcctagaagatatagtagtcatatgcttgtaccttacacagaatccctgtgaatgtgcaacagttacaagtgccaactgatacaggtctgttacatgactggctcaaataccaccagtcccattcccattcaactatgatttactgcaagagaactctcttactagagttctaaataagagtccaatcttcccttgatttacatggtgggctactatcagttttgtttgtccctccagatatgtgctccttccctttctactctgctgccagccctgggagcctgacccaccaaccatgttcacgccctctggtttatgagagccctggtaggagatggaccgagggaagaaaggaagattgggacatttatttctctggctacctccttggctatatacctcaaactgctgctatatatcactgctgctctcaagatggctgatatggtttggatctgtgtccccacccaaatcycatgtygaattgtaatccccaatgttgaaggtggggcctggtgggaggtgattggatcatggggatggatttctcatgcatgctttaacaccatcctcttggtattgttctaaaaatagtgagttctcatgagatttggtggtttaaaagtgtgtgtcacctttcccctctctctcttgctcctgctctggccatgtgacgtgcctgcttatgtaacacactgtatcagtctgcacttgtaactgttgcacagtcacgaagattctgtgtaaggtacaagcttatgactacttattatatcttctagcaggggtctgtccaagcatttacatgttgaaatatacatccttgtgttaaacatttattttaattcacctttacattaattgtgacatattatggcctaattttatgaagccatgatgtactttggttatattacctatgtaggctaaaggtggtgtcgcaaaatatttattataagaaaggggctttagatcacataacattgagaattacaggtgtaggtgactcatagctccacccagaggtggaaacagaggatcacttgagtccaggaatttgagaccagcctgggcaatatagttacacctcatctctacaaaattgtaagtttcctgaggcctcctcagaagccaagcaaatgctagcgtcatgcttcctgtacagcctgcagaactgtgagtcaattaaacctcttttctttataaattacccagtcttaggtatttctttatagcaatgtgagaacagactaatacagtggccatggtggattgaatgggggcccccaaaaagatatgcccacgttttgactcccagaacctgtgaacatgaccttatttggagaaaggatctttgctgatgtaattcaggatctcaagataagatcgtgctgtatgatctgggtgggccctgaatctaatcacaagtatctttataagagacagaagagaaatcagagaagaagagatggctgcatgaggatggaggcacagattggagttatgcagccacaagccaaggagcccttrgaagctggaagagcaggattcttccctggggcctttgaaaggaatgtgaccttgctttgattttaaacttttggcctctggaaatttgagaatcttttttctgttttaagtcaccaagtttgcagtaatttgttatggcagccctaggaaatgaacactttctgcaacactccgcccactctgcaacatacactcttcttccaggttctagtaatctcccacccctcactccctgggcatagtggtggtgatagctstgctcctgccagacctgggtttctgccatatcccttctgtcttccccatccttgtccacacccttggatattcctggactatttaatatatcttaaaaccacacagctgggtgtggcagcatgcacctgtaattctagataatcaggaggctgagacaggaagattgcttgagcccaggagtgcaagaccagccggggaaacacagagagacctcattgcaattaaaaagtaagaatcaataaattaaaagtcaattaaagccacacracaatattttgtgattatatgtaagrgttaggttctaggctcatgtaattgtaatgtcagacaaatgaatgatgaaccatatgaaaggtgtggggaacaagcaacaatttatcattgtgtgggagtgccctgtcacagtacctctagcatccctagccagaagggttccacaatcatcattacaactaaaaatggccctacaaacttccaatcccctgtcctcagagagtggcatcatcttattgtgaaccattgattatataatatctcgtttaatccttacaaccacattttgacatgggtaccatctctacagatgcaraaacagtcttaaagaggtcaagaaacctgcttaggtctgtctgaggtggacctggagttcagactcagttctgaggagacctaaggtctgtgtttctaattgcaaaactgtactttgggtctttgtcaggggagaaggtggtgagggctggggcagatacagtgctgtgggagatcaagtctaactctttgtggagaagaggggctccatcagagatgtgctagtctgggtatgctaggctatgtataagaacttatagcctcaaaatcttagtggcttaagagtaaagattgattacttgcttcagcaaaatccaatgcagatcttgatagggaactctctcctgggtgaaatcagagatttggccttcttccattaggaggtttcaccattctcagacccttttgcttccagcctcacaggtggaggagatagtgtgtagaatttttttttttttttaagatggagtctcgctctgtcacccgggctagagtacagtggcacgatcttggctcacttcaacctccacctccccagttcaagcgattcttctgcctcaacctccggaatagctgggattataagcgtctgtcatcacgcccagctaattttttgtgtttttagtagagacagggtttcaccatgttggccatggctggtctcgaactcctgacctcaggtgatccacccgccttggcctcccaaagtgctgggattacaggcatgagccactgcacccagcttaagtgtgtagaatatttcatggccaaatgtgaaagtggtatgcaactcttccacctccttccattggcagaactcagtcacacaacatacctacatgcaagggatcctgggaaacgtagtctatatctgttgaacacagcattgtctctgcagaagagatgttaaactcatccagtccctatagctggagcataaagaagggaagcttaagttcaagtgttttctttgctatttatctattgctatggtttgaaggtgtcccccaagtttatgtgttggaaacttaatacccaatgcaacagtgttggagatggggctgaataagaggtgattaggttgtggaggctctgccctaatgaatgaattaatgtcattatctcaggagtggattagttcttgagagattgggtctgtaagaaaagtgagttcagcacacttttgcactcttgctttcacccctcttgcctttccacctttcatgaggggatgatgcagcatgaaggccctcaccagatrccaacaccttgatattggacttcccagcctcctgaactgtgagaaataaatttctttataaactacccagyctgagatgttctgttatagcaatacataatgaactgagacatctgttaaatgaccatgctcatgtcctgccccctttaaggacctcagtttcctcatttgtcagatggttatggaggcccatccctcacagctgcatgatgaccagatgtaagaggagtagggtgctagttgaaggaaatcatgaagagagctgcccccacctgaggtctgtccttgtccaacagctctcctgactccactgtcaccttctgcaggcagtaaagcccagcaagatctcttggatcttgaggaggccaggctgcctcttcctccctgtgaagtctcaagcacccatggtatctctaaatactggcattattgggggaaaatggttcaggggagtaaacaaagaatcggattagaaactatcagaggcctctgssaagggccctcaagacccattggaggtgctagggatccaggcatcaatctaaggaaatgctagagctatggtcaaggagccagtgctggggcagggatgagtgatgctcgctccaatggacacccattttttttgtcttcctaaaacctcttttccaggaaacaactctcccatacccaaaccacaaggttgtagtgggagctgccatgtttstacaatatgaccctgaccctttgtcacttgattggtccagggtcaggcacctgagccatgctggaatattgaagaaagagagaacagagagctatattaactcccctccagctgattggcccaacaacatataacagttaggtgctcttggcagccatattttccttactatataggagtaacaagcagaagaatctggttttatgagagagaatgacaaacagaaagattcccagtggcatttgagtttctagttctactccattcctgaggctaggctataatctagtcccttgtctctatgagatgttccagtatcattataaataagttccccttcttgattaaactagtttaggtagatttttgttaattacaatccaaagatcgctaagaaatagtatgaactttattataagatatatttattcattcagaaaatatttgtggagcaactactgtgttctgggtacrgtacaaartgcttgaaattcactgatgaataggatagacatggtatctcccctcagggaccttctacttggaggtagaataaaagactggggcaggaacagatctcaaacaagtaaatttcaagggtttttttgtttttgttttttgagacaaggtctcgcactgtcacctaggctggaatacagtgacacaaacatggatcactgcaaattcgatcccctgggctcaagcaatcctcccgcctcagcctctcaagtagctaggattacaggtgtgtaccaccacacccagctaattttttaattttttttgtagagacaggataccactatgtttcccaagctgatcttgaactcctgggctcaagcaatcctcctgcctcagcctctcaaagtgctaggattacaggcgtaagccaccacacctgaccaaattccaggtttatgagaacatgtaacaaggttatgagaacatatgagctttggccaggtgaggtggctcatgcctgtaatcccagcactttgggaggccgaggcgggcagatcatgaggtcaggagatcgagaccatgctggctaacatggtgaaaccccatttctactaaaaatacaaaaaattagccaggcatcgtggtgggcgcctgtagtcccagctacttgggaggctgaggcaggagaatggcatgaacccgggaggcagagcttgcagtgagccgagattgcgccactgcactccagcccgggcgacagagcaagagaaaaaaaagaaaaaagaacctatgagctaagaactgaggactgagtgggagttgcgtagaaggagctgggaattcagatgtagagtgaggggagcatcccatataggaagaagagcatgagtgatgataactccatcattaagccagcatcttttgaagagagagcaatacttcagctgagttgggccagctgagagtcctggtttctcacattacccractttgggccctcagctaatacatcagtgaaagacattttctttttccccagaagcagcccagcagagaccactccatcctgtcctgactcttttccttgttgagccattacataaggagaaatacgaaacacttccagaaaggccttggcacactgaacatgatttgtatatcaatctctccctttcattcatgctcctgtcattcatgccataggaagaatgctagttttcttccttatagmcactatcccaccttccttactcctatattgggggcagcaatgtgcctagtcttagctaagactacattttccttgcagatagggatggctaatgagaagtaaggggaagtgattgggtggcgttttgagaaagctgtataaaggaggctaacttagctagcaagtaccacttcatctttccccccatcattcttcctttacctccctgggacatggacttgatgggtgaggccctagcagtcattttttatccgtgaggtgatcttaaggagtaaagtcatgtgccacagatagcagagcagaagacaaaataattctaatctggagaccttgtagatagagtccccatacctgcctggcctttcctaggagaaaactaagaccctgtcttatttagaccactgttgacttggatctctcttagtagcagctgagcaaaattcttcactgatataacctcaaaatcctcttataatccagtttctctccaccaaatagccccaagtcattcattcattcatcaattcactgattkataactattccatattctagaatcagatgagattatgtgggtataaaagcatgttgtaaataccaaagcattaaacacatgttacactgtgctataattttcattaatattatgacttattgttactccagtatcataatcaaggagattttagtaagtagtatgcaatttgctggggggaaactcctgttagtggtgtgaattattgaaaccagtgctatttgatgtcataaattaaagaagaaaggggtgatctagtacaagcacgtctcaaagtttagtatgcacagagaaaaacttgggaatcttgttaaaatgccgattcagattcagagagggtctgtggtgggccctgagattctgcatttctaaaaaggtcctaagtgatactgcttgccctgaacctttgaatagcagggacctaggagaccttccaggtgctggggaagaaaatgataagagaagagaaaggtaagcygaaagcagagaggagagaatttctgaaaatgggaaacaagaagttaytctgaagctttaccttcaagcaggttagtaacttaataaaagtcaagaactgtgcatgcataatttcatttaattttttacaattttaggtaaaaggaaatataagccttgttttacaattgagaaagtggaaactcaaagaagttaaaaatatacccatakgagtcaggtacagtgggctcacgccratagtcccagccacacaggaggctgacgcaggrggatcacttgagcccaggagttcatgacacccacctgggcaacgtggtgagatcttgtctcaaaaaaaagaacccaaagtcagcagtggcagggataggatcagccccaagcttttcagtgtccagagtgtgtattttttcctaagcaccttgagggaagcttgctccttttgctgaattcttcctcctcatccaggacatattggtcagaggagggcaagaccattgtagggtaccagacctactgctatttgaatctgcttggctcaactcttatcaaycctgaaggctttctgtggctgctatatttkgatttaaaacactggaagctgggttttgatggggccccaggagtggggagcaggagaggtttctgagggatgcttataagttttttgagacactttctgtgttgtaagcccagtatcacttgcagaggctgccatattccagagtagcaagagcacatcctggagatggggagctgccaaggtgagagcaacccctgcttgggctcagacatgggaccctcactttctccttggatacatgagaccattgaggggctaataaaacctgagattcgtcccagcaattggcagactggcaagtgccaggccctcgtgaggaccctcacttcttcccaagataggagataaatggacactttatgtccccgcaaagggtcagccactcagggaggatcctctgtgattggctgctggttctgctccccacagctctggtgtaaatctgggccatttccttctccagtttcccccatgtgattcgcctttggctaatctcactaccgtggggagctgggaaaacttccctgcacaataaatctttgattgggaaggtggttttatcatttgagaggaaagaaagttgaagaaggagaggacgtaagtgactagtgtgttcagggagtgatgtaagggatgtgaaaaggcagggaggggttcccagctgagcacaaggtgacaagaaacggataaacctgggactgcagggcggggttgaggaggtgccaaggggaagaatcccagaggcacatcaggaaagctagccaggggcctgagtgcagaaaagggcgaaagagctttcagatagaagagaaaccaacacacatactgtggttccctttcctccccagaggacaaactgtggtctgctttgacgtcagctatgcagatgtgctgaggctgttcggcatgttggttccaggcctgggatgcagccggcagcaccagaggcggggagggaggggacactaggtgcagcctctcgctgaaggatgcccagaggcaccccagtgtggagcagcccaamgggaaggacttaacagcatctactctggctgagcctaaatcatcctccagcctcctttattccaggttcccactatccccttgtttctgagacagcatcagcatttccagggctatgaaggccacagccaccagatgggctgcaacactgaatgacattggatatcccaggccacccttgctctgtctgccctggtcctaaaagtagagaaaagccaggaaaaccctccatggagcccacagccttcactgtctcctgatcaccatgtcatgctgctcaaagtggttgacagtacttgctccctctactttctcgattctcattctcccagcagtctctagtctagcttctgccctgccccttctactgaaactgctcttgctaatgtcatcaacagtctagggccaaatccaggggccacttctcaggccttactttttctatcagctattgcctgttgattatactctttttttttttggagacaaagtctagctctgttgctcaggctggtatgcagtggtgtgatcacggctcactgcagccttgtcctcttgggctcaagcgatcccgcctcagcctcctgagtagctgggactataggcatgtgccagcatgcctttctaattttttttttttttctagtagagatggggttttgccgtgttgcctagtctggtcttgaactcttggactcaagcaatccacccgcctccatctcccaaaatgttgggattacaggcgtgagccattgcacctggcctcaggttcttcctaactcaaagctctgccaactcctagggtgtagccctcaacctcctagtctaagacggtaccatctcatgctccaaacagcacaatggagggaggaaaaaagatgaatgtaaaggacatgatcctactttctctcaaagattcctagaagctgctatgtgacatttccactttttgtttttttttctgagtcgtagtctcactctgttgccaaggctggagtgcagtggtatgatctcagctcactgcaacctctgcctttcaggttcacgccattctcctgcctcagcctccggagtagctgggattacaaacatgtgccaccatgcctggctaattttttgtatttttagtagagacggggtttcactgtgttrgccaggatggtcttgatctcctgacctcatgatctgcccgccttggcctcccaaagtgctgggacatttccacttttatattattgacccaaactcagtcacatggtcatatctatctgcagagaggctgggaaatgtagtccttatttagctaaaaattggattaccatgaatgagggggagaaaagatacggagggatataaagaagctcatgtcagagcttccatgacaccaccaatggtggattctacggactggttcacataacatcccttcccatctccttccagtacattacagctgggatgtcacacttcctacactccattgcagctggcaatccaaatgagcttaggaattatcattctataaacttgcatgtaacttgaacctgaaactaagttaactggagagagagratgcaggtagggcattcattktgctgatgtggattgtggcagattgattttgtagtccccaatcagtactggtttctggcccagtagcttcctgtggcaggagtggtggcaggttctttcatgatcagtgatggcagaaccgtgatgattcttaggkttyacaattatttctggaagctccattttaagtctacccctccagccctgctagtaatgttgtaagacagaacttttcaaactttaatgttcatatgaatggcctgaaaaatctagataaaacgcagattttgattcagtagatctgccatgacatataagattttacatctctaacaagctctagggtaatgcctgatcgggaagatggatttcttagtaactcaagcctggggtgtcctctgctcacctatacctggtcataaattcctttctactttaactattgtattagtcagtgttctccagagagacagaatcaatatatatcaatatctactgtatctgtgtctgtatctatagagagaaactgtcaatggaaaaaaaaaaactctgtaatatatactatgttttaaagaggtttattttgaaccagtatgagtgactgcagcctggggaaaatacaaacccagagcctcgagtacgtgctcccaaggcagtcacaatgcaactctgttttatacattttggggaagcagaagttacaggcaaagtcataaatcaatacatggagattatactttggtttggcccaaaagggtgggacatcttgaagtgggggcttgcaggtcataagtagattgagagattctttaatttgcaattgggtaaaggagtaaggctttgtctaaaatcttggagtcagcatgaaggaatgtttaggtttaattttaacatacattagttaagaaatctgctaaccatcatgggatgctatgccagagtcgggctgcaagagcaagacatgatacactgggtcagggtgacctgtacggtctcttattcctacaaacagtccattctgtcagccttatggtctcaattttaatattaatgctgatcwgttgttctgtctacattgcaaaagagagggggtataacgaggcttgtctgacctgtcctgtcatgactgggaactccatttttaaggtttttctggggtcccgttggacaagaggggatctgttcagtgggctggggggtttagggttgtatttttagtttacattgacatatgagaggagcatcattcgggggattgtctcatgtgattacggaggctgagaagtcctgccacaagctgtctgcgagctggagaaccagggaagctgttggtgtggctgmgtccaaatccaaaggcctcagaaccaggcaagctgaaggcataattcccagtctaaggccaaaggcctgagaacccaggggcctctggtgttaagtcctggaatcaaaaggctggggagcccagagttgttgtccaaggagaggagaggaagagtgtaccccagttccagcagatagatgaacacattcaccttttctctgtttttgttctctctggattctcagcagattggatgctgyccccccaccttaagggtggatcttctccacagaattcactcagaatcacacacttacacatcccaaaataatgctttaccagatttctaggaattttttttttttttttttttttgagacrgagtctcagtctgtcgcccaggctggagtgcggtggcgcgatctcggctcactgcaagctccgcctcccgggttcacaccattctcctgcctcagcctcctgagcagctgggactacaggctcccgccaccgtgcctggctaattttttttgtatttttagtagagacggggtttcaccacattagccaggatgatctcagtctcctsacctcgtgatccactcgcctcagcctcccaaagtgctgggattacaggcgtgagccacggcgcccagcctctaggaatttttttaatccagtcaagttgacacctaaaattaactgtcattactacctagtgatggttcctgattctcctaattctacaatggtttcttccctttctctcttcagggatcttcttcctatgtttgtcccttaaatattgatgtatgccaggactcaagcttaggatcattstagaaactcttccaggatgatctcctttattctcctggctttaatcactattaatcycaaattcatatctataatctatcctctttcctaagccccaaattccagtattcatagctgaccagaactgagttctacagatgagcagtgcgtgaaagaaaggttctgtggtcaaataagcttgggaaatgctggatyaaataaaawgaaactggtttccttgctgaggtacttctagaactgttaaatgtgctaatatgcattgcggatttctaagaggcggcatgtagtacctagtgtttcttaattttgtttgacatttatgttggacacattctacgtgttttcataggttctcttagcctgcctaagtcctggatcctagccttttgcatttccttaactgttgccactgcagccaactctggagttctgtggccagccagctgctgccaggagccgctggctcctccaagcatcttgcatcatttcccagccctcccttttatatcactcttgaggctctggatttgtgccttcattaaaaacatcagcatataaccattgccccaggctttgttttctagggaaactgaacgaccctcaacggtcccccaccttttttcctgggatattaatatttcctggaactaaggttcctagaacgtagtttagaactatatttccctgtatgcaccttagattcagcatgcccaacaatgaattgcagtagtccgttctcacactgctataaacaaatacctgagactgagtaatttataaaggaaagaggtataattgactcacagttccacatggctgaggaggcctcaggaaacttacaatcgtggcggaaggtgaaggggaagcaagggccttctttacatggtggcaggagagagaagtgcaagcaggggaaatgccagatgcttagaaaaccattagatctcatgagaactcactatcatgagaatagcatgggggaaactgctcccattatccaatcacctccctcccaccacatataggaactatggggattaaaattccagacgagatttgggtggggaaacagccaaaccatatcataaatcaatcctgggttcccaccattttctaatgtggccaattcacaaagttgcattacctatctggctctggaaggcacttgcctaagtgacccttggtttagaacttgaggtctcagagagtgtcttcattgttttaccatcttagccccagaactattctgagagacagaacaagtatgttcctatttcactgacaaggaaacagtaaaaagggattggcctggatgacacagttggaagtagtggagccagggctctaacccaagtttccagcctcccagtcctggccttgtacactgatcaggcctgtgtcttcacgtccccaacactaaaaggacacagtgggctttcatggccctccctttgcccccattttcctggctagatcttcagagtagcaaatgctagcactcttgagttttagagacttttaaaaacaggcacatttccgagggaaaatctttgcacatgtttttcccagaaagaagaaagtgtaataatttgttgtctgaactaaggacattatggttttgagcttggccaaactttccttcttcaggtgtgaaaaaaaaaaagagtaaatggaactagatgtgtggagcaaacttcgcaacctttgggggaaggtctacacttaggggttaagcttctttccagattccctgcttggagaagctgccttcatagagggcagtggttcttaaactttccttttggttacttacttgagaattgactaattgttgtgaatcctcttcctagaaaaattcacttacaaatgtgagggaataaaacaaagttgcttggtatttcctttatgtttggtattctgaaatttgatcatagttaatctgggtgtaagtcttttttgttttgttttgtttattcttcttggtctacagtgggtcatttcaatgtgaaagcttttgtgttttttcacctccagaaaatattccattatttatttctttatttttcctcctccatttcctctgtttccttatgctggaattcctgttaaatagtatgatagaacttctggattcatcctccatacttcctaatttttcttttatacttctcacctctgttctttctaactgcattttatgagaattttttttttttttttttgagacaggctagagtgtagtggtgcaatcttggctcactgcaacctccacctcctgggttcaagtaattctcatgcctcagcctcccaagtagctggggttacaggcatgcaccaccatgcctggctaattttaatttttagtagagacggttttgccatgttggccaggccggtctcgaacttccggcctcaggtgatctgcccgcctcaaactcccaaagtgcagggattacaggcgtgagccaacacctggccgttttttattctcctgaatttcttagctgcttgatctttcaactctattattcactcttcagctgtatctattttgttattaagcccattaaatttttatttgggaaactgaattctaaatcgatctttagttcattccattttttaatttattttgagataggatctcgctctgtggcctaggctgaagtgcagtggcaagatcagagctcactgcaacctcgaactcctgggctcaagtgatccttccacctcagcctcctgactagctggaactacaggcacacaccaccacacccagataatttttaaattttttgtagagatggaatcttgctatgttgcccaggccggtctcaaactcccagactcaagcaatcctcctaccttggcctcccaaagtgctaggattacaggcatgagctaccatgcctggcctaattccttttagcaaatgaaatatcttttcacgtatcttgttgagatattaattatgcttaatctaaagacttgctctgctagtactcattaattctcattcttaggtgtttgtttttcagatggcagtgtaaggaactaaaattaattttttcctcaactctcataaattcttagttggaatgaacccctataagaaaagacagattaatgagagaaaaacaaacaagtgtattagcatgtatattttgtatatacatctgaaatacccagggaatgaayaggcctcaaagaggtggcttggaattccagttcatatagcatcttcaacaaagaacagtaaatttttagagaagtggcaagacaagggaaaagggcattgaacttctaagggcwgcaaattgtgggacggcaaataagtgkcagttacaggctatttagtagagcttgctacgtagattcctttggtgccatctccaggctgttaagctctaaagttgtctctggtggttaacttttgtctttcctgacagagagggtaggaagacacctttgtctttgtaaatcttcttctctagtgccttcaactcaaaataatccttacatcagagtggcatgttttggggatggcatattctggtttcccacagtggatttttaattttttatttttgagacagggtctcactctgtcgcccagactggagtgcagtggtgagactgtggctcactgcagtctcaaactcctgagctcaagtgacccttctacttcagcctcctgaatagctgagactacaggtgtgtgccaccacacctagctaataaaaacaaaattttgtaaaaatggggtctccctatgttgcctaggctggttgcaaactcctgggctcaagcgatcctcccaccttggcctcccaaagtactgggattataaatgtgagctactgcacctggcctacagatggattttgatggctctgtttcatagtgttaattttacccaactgtttagtaactctagatatttgtgttttttgtttttgtttttctttttgagacggagtaacgcttcattgccaggctggagtgcagttgtgcgatcttggctcaccgcaacctccgcctcccgggttcaagcatttctcctgcctcagtctcccgagtagctgggactactggcgcatgccaccaagcccggctatttttttttttttttttttttttttttgatacggagtctagctctgtcgcccaggctggagtgcagtggcatgattttggctcactgcaagctccgcctcccgggttcaagtgattctcctgcctcagcctcccgagtagctgggactacaggcacccgccaccacgcccagctaattttttgtagttttaatagagacggggtttctccgtgttagccaggacggtctcgatatcctgtcctcgtgatccgcctgcctcggcctcccagagtgctgggattacagggaggagccaccacgcccggccccagctaattttttgkatttttttttttttttttttttagtagagacgggtttcactgtgttagccaggatggtctgaatctcctgacctcgtgatccgcccacctcggcctcccaaagtactgggattacaggcgtgagccaccgtgcccaatctgtttgatcatttttaaattgtgcatttttttttttttttgagacagggtctcactctgtcacccaggctggagtgcagtgacataatcatggctcactgcagccttgacgtcccaggctcaagtaagtgaccctcccatcttagcctcccaaagtgctggaattacaggtaggaggtattacaataatgctgggattacaggtatgagtcactgtatgaatctagtgcattcttgttcttgtctgttctgtttccggagcctgaatgtcataattttgtgggagctgctgggccagtggcktgcccataatcccagctactaaggaagctgagacaggaggatcacttgagctcaggagtttgagatcaacctggacaacatagtgagatactgtctctaaacagaaaaaggaaaaggaaaaaaaaaagaaagtaattttgtgggaagaagaatgtgttgattggacgtatacatggggcacktatgtcaggaagaagagaatccatcatgtctttcagcacacccagtttcttactccagtggggatagttgctacctggggcattcactggtttggtgcggagaaaatctccactgcagctggctgattagtacaagtgtcagaagtaaggggacagttggcacaaatactctagatacagttgctcaattaagcaccccaaggagtagcccaaggccctcttttctttgtatcaaacaactctgacattagggtagagttctttcttaactctatttctatttttgcacttttgaaatagtcttctggtgcaggactttttttgcactactatcaatcttttccttcttacctgccttggtgttaaacttaaaatgatctgtattctccctcctttccaaaattataaatttcctattttcttattttactatttttatgatttcatgttttacattcaaatctttaagccatctggaatttattctagtgtcagccatgacttggggccctaacttaattttttctaatggtgagtcacttgtacccaccatgtattccatgtgtgggctttcaaaatgcagctcaaccctaagagctccataaaagcctaggagttaagaatagaaacgctaggactataattcattcggctcctaatttctgctccattactgctcactttaggactctggcaaatctcagtgctccttagggaaaaagctctgaccaatgatttaaggctgggaaggctgaggcagagagaaggatttgcagagaaccctctagaggagcttcatagttgctgtgttcyagccactgggcatggccttgtgggaaacagtggttcagccttacaagaagctgcaggggactcaagctctactctataactgcgttttctttcttcagccccaagtctttttcctactcactcaaagtcctgctccaagccagtgaggcttagatactcctcttcctgggtccccactgcatttttgcatgtttctctaaagctatttttgtaattgttgacatgtctgtcatggattaatgaattagttgataaagttatcaggcatgaagggtgccatctgccaggtgcaggaggaaaaacacaccaaaggatatggagttgctgctgcctctgtagaccccctgggggggtcatggcacagtggtgccaccatgcccagctaatttttgtacacttttgtagagcagggtttcaccatgtttcccaggctggtatcaaactcctgggctcaaccattccacccacctcagcctcccaaagtgctggggttacaggccagagccaccaagcccgactttgaagtttaatatattttaattcaatctaccttataaattaacaaatcaagtcatctatatmcttatttactgtatggtttactgatgagtcgtgggctaagagaaatgaattaaaatttccttctattattatatttctgtttctccatgtagttcccattttttgctttataaattctgttgctatattttatgcataaaaatgcatgacatcttcatcgtagctttcagcctttatcattacaaggtgttcttctgtgtcttgttttctgatttttctttttttttggtgaattcaaccatgtctgatattaacattgtaacctctgttttctttttcttttcttttttttcttttttttttttttgagacagttttgctcttgttgcccaggctggagtgtaatggtgcgatcttggctcactgcaacctccaccctccacctcccgggttcaagtaattctcctgcctcagtctcccgagtagctgggattataggcgtgcgccaccacgcccagctaattttgtatttttagtagagacggggtttctccatgttggtcaggctggtcttgaattcccaacctcaggtgatctgcccgcctcggcctcccaaagtgctgggattacaggtgtgagccaccatgcccggcagtaacgtctgttttcttgttgcatgtatttgcatgtacggcgtttatttttgctttctattttttcctatccttttacttttgatctttctgagaaacactgttttagatgtatctcttgcacatgacactaattgcattttattttgtgactccaggagttgtttctaaaaagtaagattactgggtcaaaaataaagaaagcttttgtagctcttaaccctcatgaccaaataaattgtttttcacaggttggaccactttagcttgtcaccagccatttagaagcaagccatttccccacccctgccagcacgactattatagtcctgcttaaatttttaataggttaaaatgggacctcactgttcttttatttgctttccttggcttcatcaaattttactttaagtaagttaagatggaagaaggatggagaagtcagcacgaaatgtcccttttcagatctctgccatgagattgatgggtggtggggtttcttattcctgattcccctggtgacactgaatcaatcacttcccacaggctcctcagcccagcccttggctgttcccaggagaattatctttgtcccttcctcgaatctctgcaccttgcttttttccctcccgtggtgaataggcactataacacaacaggaagatacaggggaagatcaattgaatgaatttagatccgaactccatctctgctaaccatttattagctagctatttatcaactctagccatttggccaggcgcgatggctcacgcctgtaatcccagcactttgggaggccaaggtgggtggatcacctgaggtcaggagttcaagaccagcctagccaacatggggaaaccccatcactactaaaaatacaacagttagctgggtgtggtggcgcatgcctgtaatcccagctacttgggaggctgaggcaggagaatggcttgaacccgggaggcagaggttgcagtgagctgagatcgcaccattgcactccagcctgggtgacagagcaagactccatctcaaaaaaaaaagttctagccatttattaattgggtgatctatggcagttgcttaaccctctctgtgccttggttttctaaggtaataattcccaaggataataaagattacaacagtaatacctattggagttttgcaaggtaattaacatacgtaaaagacaggagcctctggaaattgctccttttcccactccaataatgaggttttgttggaaggtatttccttcttacatgaccctgcttctttatctactgttcttggtcctaggccagggacaggtccctgacacaaggagactcaatcagagtcttttcctgggacctttgtcattgggacttgagaaagaaagcctttggtgcctcttgggtggaagctctcaaatgtgasacccaggctactggcagccgtgtttccagccttgaggaagccaggctgccagaatgaggctaatgggtggagagagaagcagatgctagagtctggtattgttggaatccctggttccggctacccccaaatgcatcctatgagccagccaataaatatctgattttccctaagcttgcttgtgttgagtttctattcacttgcaaccaaaaaagagctttagctgggtgcaatggcatgtgcctgaactccagctacttgggaggctgaagtgggaggattgctttagcccagaagttcgaatccagcctggacaacatagtgagaccgcctgtctcatgtaaaaaaaaaaaaaagaagagttttaatatacctctcaagacatcttaggatagtaaatcatgaagtctcctgtctgtctgtccaggtctctctgaaaagccaaacactctgtgcaagtccgtctctgagacacacatacacatgcatgcacacacaaatagaatgacagcagctcccactccaactggagggagctgtggctccttctctgcctgggctgcctgcacatgcctatacttctccacacacaccaaaagacagctgtgtcaatgcccaggccacgggaactccacttgctaaacagaatgttatcccggaaatctgtgcccttctctgtatgcctcttgtccttttttcactgccctattcagtaacttcacaaatatataatgagcacctgccaagaaccatgtcaggcctggggcaacaaacagcccctgctgtcaaggaacccgcaggcttgtggggccgtcatgctatcaaaaggcagctccaagagagacagtgggatgagtgtcaaacagatgtttcagccaagtatggcaggagctcagaggaggcctcatcacttgttgcctgggacagacgtctggctggtctgcccacctcccaccccagccctccctgtgcgctgctgccagaatgtcttcctgaacacagctatgtaagtccctctccctctgcaagcctgagcccgcattccttagcttgacaaaatcctaatccagatattgcttcaacctattttttcagccacaccatccrctgttctccattcacaaacctcacccacaagtctaaagagtaaaaagtaaaaggatcastttgcaaaaatccactatagatgtacagattgggtgtgtgtgtaggggaaacagcacacttgggatgcatttgcagaccttgttccagattcaggtctaacgtcacccccatccccaggaaaccttccttgcttctccaagtgaaattaacctcttccttttctgaatctatataaccctctctgtacacctctgttagagcacagattgctcctatctttttaggagtgcacatattttttaactgcttgtggagacagatggtgtcctatggagtatggtacaaagtagggattcaaaagctgtttgctgactatttggaaccatgtgaaacaccatttgccattcatcagatggactctggctgctgaagtgcccaagttcctgtcatgagctggctttacctactcctttgcactccaaggatgatgttttcactcctgagctgatctcctgtattgttacctctgtctgatctgtcatttgtcatcttcttgtgaacctgtggccactgaagtttgaattcccagcctctctcatttattcctttattcaggaaaccattrttgatgcctcattggtggccagttcaatgctcactatcaggaacacaaggatggtgtcctgccctgggatccctgacttgggaagggtagggaagaggtagagggaagacaaagacatgagtgatgggatacaaggagaagtgatgtggcccgaagagaatagcagggagagtgctgagggggtcacagcagaaggcttgggttggggaatatgggctagggaaagtcgttgacacacccacatccataccaactaaattctctcttcccctacactccttagcgtattttaactgggcccttgattgccacagctgcaagctctggcctcccaattccaggacctgtgctgatggagtcaggaaacatttgaatagcctcggtacagcttattctaccgccctccccaaccctcctgcccattctctcccatttcatcccacacaaacacacaaatctcaagagctcaacactaatccctcccagacctgggatctgggatgcyacccactggactctcttgaatcacctctgctgcagttcatacccaggacactgggctcaggaaaccactcaggctcctgagctgtatgggggacctgcttttcctgtccctagggcttggggctcaccacacacatctgtgatgtccctaaattattagaggggctctagatctactggccaatttgctaaggtgctttgcctctgtctctctgggttcccggtcccaccctaggcacctcctccaccttcctgcgtgcaaccactcccctcagcaaacgtgtgaggctgccagaccctgctgaagagctgtaggccctgctggcaggagacaggctagctccagagagttggctggaggggaatgcagcagatcacatttcttcagctcatgccaaatagtattcagatgtagcttttcagacagacacaaattgctcatccaataaacacagaagggctaatcccagaacatttatcaacgtggggaaagatgagagaaaggacagtcacaagaggcctttgagagccgactcagtgtggctggcgcagaggaggtggtgagacttccatgcacttctggggttttctccttaaagggcctgaaacccagcaccggggctttgggatttgctgtcgttgggacatacaatgcccgtattagtgtatacacttctctgtggtgaacagcaattaagaaatctatgtgggccaggttgcctttgtgagcagacagccctcacccccatgtgacaattgtcaggtgggagagctggctgcaaggacttcatcagctgcccccactgtgcatgcataaaatgtgctcatgcctcttccgtatttccagggttcacaggggacagtccctcctgagctggaacttcttgctgacaggtgtaagaacatggggaccagagacgcagggtcctctgctcgtatcagagtgctggccaagcaactgaagtcctttgacagcccctttcctgctaggcccttctaactagctccatgagctttccccctccagggattcagcctggagattacagaaatcgggccctggtctaacaccagagagaggaaggactaggtgaagcctctgcaggcagcctgggtcctcccactgcctgtgcagaaactgtgccataccactggcactctgatgtgtacccaacagagtgggaggtgggccatgggaaggaggaggcaatgactagattagggtaaggtcatgaaagtaactgctgacttttatatagtcagaatattttgaaaattaaagctgagagaataaaactttctatggggccaaactacagcctcagctggcagggactctgtggccccagagcttgatgggaacaaggtgctttctggcatatggctggtcctgacacaatcaggaagtcgaggggaattcccaggcaatactcccatgatcccatgaggcacatgtgctattttggatattactttccagataagacacagtgaagttaggtaacatgtccgggtcacccagttcaagactgggaggcttcagaatctaatctgactcatactgcacacaggtctatggagagatatgggggtttcaggaatatccagttgtgtgggactccttaagagggtagagtttggaggtctggggtcctcagggttgggatgctgtcttcagggcacaatgctcaggcagtttccactgaggacctggggtctctataattagggtgactaaccctaccagtttccccagaactgagagggttcttgagatttgggacttttcattttataactgggatggtcctgggaaaggcaggacaagttggtcgtctacctggaacaaaaggactgggcacagatcatcgccatggacttcgggacccacctgcagctcagccaagccacacatccccaggctggggacctggggagtggcatgctgattaggaaaatgggcagagtggcagccagctgggaacagctcccccagaccgcaggcagcagtaaagcagggctaccrtggccccagagcttgactggaacaaggtgcattctggcatggctgatcctacacaaacaagaaggttgaggggagttcccaggtgaggaattcccggcagccagggagcaygaaccaggtggcttccactctgcctgcaggaaggaaatttcttttctggttcctgaaacttcactcctatcaggaatggcctctctcctacctacccacctgggggactcacactgacctgcatttctaggctcttaaccttctctccctctctgactttgtcctgcttgttgtagaactgtgtttattcatcagtctctttcttttgtttttttgtttgagacagagtctcactctgtcgccaggctggacagtgcagtggcccgatctcggctcactgcaacctccacctcccaggttcaagtgatcttcgtgcctcagcttcctgaatagctgggactacaggcgcccgccactgccccaggccaatttctgtatttttaatagagaccgggtttcaccatgttagccagtctggtctcgaactcctgacctcgagtgacctgcccatctcagtttcccaaagtgctgggattacaggtgtgagtcaatgcgcccagccagtctctttgcttttgcagatctgaaactcactggtacaacacttggacgatttttaatataaggggattgagttctaaggcacagaaaccatgggcagaaatgctaataggcttcaggaaagaccagaatgggggcaaagaagcytcaggaatatgggtatttctctttcatttctatgtccacttctctgtctgtggtctgtttcattctctcagctttctttgcttctctgtgcattggcagaaggtggaatgtttacatcatctcaattccagccacacccaggggccgactagctttccggaatagcaaatctaaattctcaggagaaatcatctrattagcccaacttgggtcacatgctcacccctggcccagacagctgtggctggaggctggggtcaagcagtatcaacatggctacccaggacccttcctaaagaggggcaagtttgtggagaaaggagtcaccctgagctggctagacatgtttgctctctatcatatatgtttcctgaactggtaggtaactgtgccttctcttcccagagtttataatatttcttttgtggctccctggtggttggcttgatgttagtctcattctggaatatttaaaaaattaatttggataattgtgggaagctatttaacaagccaggtcttaaacagtgtggcccattatctctaccttatacagcaccctatcattatctcctttgcatgatggtttagagcgttgcagctcaaagtgtgatctgtggatcagcagcattggtattgcccgagagcttgttggaactccagaatgcagttcctaactacttgaacagagtctgcattttaacagctccccaggtgatccacattaaagtttggtgagcacctggaggaggttcttgtcttttctctcctattagactgaaaattctgagggcagggactgtatttacaaacctcaattgtccacttcctatgtgtaaagtaacttgctttgtcttgcaggcgacagagcttatcaaatgcagttatgagcgaattttaagctcaggatagtggttgaagagggtaaattaattacagtagtccacccttatccttgggtatatgttctcagacccccagtggatgctggaaactgctgattgtattgaaccctacatacatcctatgtttttgtgtgtgtgtgtgtgtgtgtgtgtgtgtgtgtgtgtgtacaagagtgactttattttattttgttttatttttcaagattgatgacaattctttttcttttttatatttccttttttattattattatactttaagttctgggatacatgtgcaggatgtgcaggtttgttacataggtatacatgtgccgtggtggtttgctgcactcaccaacccatcacctacattaggtatttctctaaatgctatccctcccttagcacccccaacccccagcaggccccagcgtgtgatgttcccctccctgtgtccatgtgttctcattgttcaactcccacttaacaagtgagaacatgcggtgtttggttttctgttcctgtgttagtttgctgagaatgatggtgtccagcttcatccatgtccctgcaaaggacatgaactcatccttttttatggctgcatagtattccatggtgtatatgtgccacattttcttttttcttttattattatactttaagttttagggtacatgtgcacattgtgcaggttagttacatatgtatacatgtgccacgctggtgcgctgcacccactaacttgtcatctagcattgggtatatctcccaatgctatccctcccccctccccccaccccacaacagtccagagtgtgatgttccccttcctgtatccatgtgatctcattgttcaattcccacctatgagtgagaatatgcggtgtttcgttttttgttcttgcgatagtttactgagaatgatgatttccaatttcatccatgtccctacaaaggacatgaactcatcattttttatggctgcatagtattccatggtgtatatgtgccacattttcttaatccagtctatcattgttggacatttgggttggttccaagtctttgctattgtgaatagtgccgcaataaacatacgtgtgcatgtgtctttatagcagcatgatttatagtcctttgggtatcatcctatgttttttttatttgataaccaaaacagctactaatgggtagctatctaatgagcaggcaatatacacagtatggataagctggaaaaaaggatgattcatgtcctgggtgggatggcaagggacagggcaagatttcgtcacactactcagagcagtgtgcaatttaaaacttatgaattttttatttctgaaattttccatttaatatttttaggccacggttaacctccagtaactgagacatcggaaagcgatggataagcgggtactactgtacatgttatctgaattttcctttaatcctgcaggaggtggagggaagttgggggtatagatgaaataaacatggctaaatgttgattttttttttaagtggggtgatgggaacttggagacttacactattttctctatttttgtatatttttaaaattttccacaataaaaattataaggaatggctgaagacattgtaagagatcatctcgcttgtcaaaataagttagtttcctagccaaatgaagtaaatccaaggcactaagagaatttccaaatgaaattgctcaatccttgtcagagacttttggaggatgaatatagcggggagaagtttggaacattagtcctgtgtaaatgattttttaattttgcaaaaggaggagtggtaatcagtttccttctgttacttcaaatcagcttatggggggaaaaaagggaggagtaattcaccaggttacataactggtcagtccagggggagtctgatacagcataccagggcgtaaccctctagcttcctttttggcttatttctcagataggctctttccatataatggctgtaatgagatggacagcgtacctccaaaattcatttctatccgaaacctcagaattgagcttatttggaaatagtctttgcagatgcaattagttaagccaagatggggtcatactggattagggtgagcccaagtccaatgactggtttccttataagaggagaggacacatcaacaggagaaaatcataggcagagagaaggccatgtgaagatgagggcagagaatagaatgatgctgctacaagccaaggaatgccaaggatggctgcgagccaccagaagctagaagaggcaagaaagaattctttcttagagttttcagaaggagcgtatccagcctgggcaacagagtgagaccttgtctccacaaaaaaaaatttttttaaattagctgggcatggtggcatatgcctgtggtcccagctactaggaagggtgacagagtgaaaccctatctaaaaaaaaaaaaaagaaagaaaagaaaaagaagaagaagcctgtccctgctgacaccttgatattttggacttttagcctscagaactgtaagagaatcaatttctgttgtttgaagccaccaagtctggataatttgttagaggagtccttggaaactaatacagcacccttgctactccagactggccattccagaggaaaggaaaagccttttactcaacatttgcagcagaagtcctgggagaagaagggacattgctcattagtccttcttgggccacatgttgatccttgaacaaatcaactgtggccagaggggtatagtgctctgattggccagatataagtcacccaggccatagcgaccccgtagttagcctgtcccaaccacatagggaagagtgggagtctctaacagaaggagtaatgttgaagaggaggcacaaaaaatcaatacctgtccattacaggaagacgttgattctgcaaactacactcttatctaagaatagtttgtgtgtgtgtgtgtgtgtgtgtgtgtgtgtgtgtgtgtgtaagacagggtcttgctctgttgcccaggctggaatgcagtggtgcaatcacatctcactgccacctcaacctcctgggcttaggcaatcctctcacctcagcctcatgagtagttgtgactacagacacataccaccaccamgcctggctaattttttttatttttaatagagacaaggtctcactatgttgcccaggctaatcttgaactcctgggctcaagcaatgctcctgcctcagcctcttgaagtgctgagattacaggcgtgagccattgtgcctggccaaggatagacttttaaagatgtaaaggaagtggagatttctcagaacaagccagagcaaagactatcacatttctttttttaacaggtccctaaactgccagatcacagtgctgcatttgatagtctgttggcaaactgggtcggcctttaacaatctatggcatgttattcctgtgactaaaaaggaaaatatgggttggatgatagtacaattaaagggaaattgaacttttttaaatgactggaatgaacctttgccattatacttgtcactcaacaggcaatcccccatcttattttggaaaattttccagtgtatatrgtactggagggctcaatgccctagctcccaccatggaggcagaaaggggaagattcgttcctcccctacctagcagctagggctcaagcatgtgaattggctcggtcattcccactgcagactctgaattcttaggagtgacgctaagaggcaggaatggtgtcgaaattattcatggaggcagcagcagcatgaacggtcctgtagcagtggtgttaaataatcatgggcaatggtggccacggcagagcagtgttataattgactgttttaatagtcaaaaactctggttggtacatggactttatttaaaggattcaagtcaacttataggaatgtttccactgttccaggatgctgccttcagccctgtcttttagtttaacatgaacataaaaaagtgaatgttgtttcggaagacattgatgaaagtatgatattggaaattgcggagatgatggtcctgctctattctgttgcttagaccccggctggaatgctgcattcagttatggaccctactaaatgcccaggtagtcaaagcccaatcaaagacgaataatcgggacagggaaggaactcaataaggaagcatgaagaacaatggaaatggagctgggcatggtggtgtgtgcctgtaatcctggctactcggaaggctgaggtgggaggatcacttgagcccagagttcaagaccaggctgggcaacatagtgagaccccatctcttaaaaaaagaggtagaattgataggtagcctggtgaggagttgtcttcaggttgggagaaggtacatggctgatctctttaaacaacagaaagaccatcacgtggaaaaggattcagtttattctctggctccaaggaacaaacttgatattactgaggaagttatagacatggattttagcttaatgcagatgctcctttacttacaacgggcttcatcccaataaactcatcgtaagttgaaaatattgtaagttgaaaatgcacttaacatatctaagctcccaaagatcacagtttagcctagccttcctcaaatattctcagaacatttacattaacctatagttgggcaaaagcatctaacacaaagcctattttaaaaatagaaggttggtcttcatatgttgctagcctggaaaagatcaaaattcaaaatttgaaatacagtttctatggaatgcatattgcttttgcaccactgtaaaatcaaaaagttgtaagtctaacagtaagtcagggactgtttgtataagaaggcttaatagttggttcagtgatagccacaagggagcaggctgcctcatgacatagcgagctccctgtcactggaggtgtgcacacaaagccaaragaactctcagagagtgtatggtgtgtggaaatcctcactggatgaagttagggtcgatgtccttccatattctctctgatgctgaaatctgrtgaagtccatagcgcaggttgggaagaacaggaaactggaggaaaagagaccagatttattacaaattgtgagctgttctggagtacaattcccagccaccattctagctccagaaaaagaaaaattcatggagggttgcattattcccaattcttcaccactccctatatccagtccctttgtcatgtgactttgaagtttctcccactagaggcagaatatgataatgttgggttggccaatcaacttgttttggytcatagaatgtgggtggaagtgaccattccaaccacaggctttatgagatattggggctttttgttcacccatcttgtgccatgtgaaaaacatgcccttggtgggcatcacagaagaaatagagacacatgccatagactaacctagccaacctgcagagctactacatccttaagcagagctgtccccgccaatccatggacacctgagagagaaatacatgctttattattgtatggcacttcaatttggtcgttatttgctaagcagcattattatggcaataactaattagcaattagttatgggatattccaacaattttaagatacagcaattgaaggcagttgccaggcttctgttggcctttctaggatctgagaaagcagcacttgaggcaaataacctatcccaacagactgtagacatatccygtcttgggtatagatgttgctggaaatggatgaccaaagtcactgagcagggcctggacccagtgccatggcacctgtgtacaggttgggataaaggggtgagaggaggaagcagacccacttcgggtcatgagaacaagtatagttgagcactcagaacaaaatatagatggtaatagcatcctgacacgcagtttatttgtgttgtgacagattgaagatggccacaaattctttcctacatctcttatcaatttgtgaagtctatttcctctccccttgaatctaggttagtcctgtgacttatgtggaccaatagaatgtagctatgtatcactgtataacttctgagccttggcctgaagagatcttctgggccaggcacaatggctcacgcctgtaatcccagcactttgggaggctgaggtgggtagaaagcttgaccccaggagtttgagaccagcctgggcaacatggcaaaaccccatatctactaaaaatacaaaaattagctgggaatggtggcgcacacctgtagttccaactactcgggaggctgagttgggaggatcacctgagcccaagaggtggaggttgcagtgagccaagatcacacaccagtacactccagcctgggtaacagagcaagaccctgtctcaaaaaaaaaaaaaaaaaaaaaagtcttctgtttcctcctatgcattcagaatgctccttctgagaacccagctgcaatgctatgaagaggcccaagcaactctgtgggggcccacctggaggaggagaagtgagacacctggctaacagttccagctgagctcccagttggcaactagcaccaacttccagccatgtgagtaaggtcatttgtacctccagacattctaccaccccactcaacactctgtgaagcagaaaaccactgggttaatggttaatgcacataactgtaagaaataataaattgttgttttaagagattcattttgggtagttttttttgtttgtttgttttgcatagcaataaatcaggcattggcaaactttctgtaaaagatcagatagtcaatattttaggtcttgcaggccagatgatctctgttgctactacttaactttgccatcatagtatgaaaacaaccatagaaaatacacaaacaaaagaacatggccgagttctaatacattttcacttaccaaaacagacggtgggctaggtttggccatggaaactagtttcccaacccctgcaatagataattaaaacaaattaacacccagaagtggggagcttccataacaaaaatctaaaacatataacattgactttggaataaggaagcttgcggagtcctgaagggtaggaaggaggatgacaacacagcgaggaagttgttgggaaattattcaggacctaagtgacatagtagtaacatgtagtaacatggataagagaaaataattgaacttgccgccttggtatggagatttctaggcaaaatgttcaaaatgccaacttactccctttrgctgcctgtgaaaaagtacaggaagaagaaactattttgtttcaagcaaaattttgagaaactatagagggcccagggcattrtatacrgccagaaaaaagaaatgctcaaagtaaattaaaacctagagggaatattaattctaagaccttccccgtaaaatggggccttaaggtcacggatgtggctgtaagacttttttgttgccgtttctcaaatgttatattagttattttttgtactctattagtatattattggcatatagtaatatatgggtagcaatttaaaaaaaaatgttagatttgggggtacgtgtacaggtttgttatatgagtatattgcatgatgctgaggtttgggcttctaatgatcctatcacccagcaggtagtacmtgatrggcagtttttcaactcttgtccctccacctctgctggagtccccagtgtctactgttcccacctttgtgccgagtgtactcaatgtytagctcccacttatcggtgagaacatgtggtacttggttttctgttcctgcattaatttgcttaggataatggcctccagctgcatctatgttgctgcaaaggacataattttgttcttttctatggttgtaagactgttgagatctcagaaagccttaaaacagcgcctcctaaacctctcatgtagactaaagtgcttctaagagtcttaaagttttggttcacagcactgtaattcacagcctaaaggagggaagggcttatcttgagatttgggggtatggtttgagtaaaaataaaattaacggaaagtccacagttttttcccctacaagaattgtaccagtgtaagcagtagtggcttgagctaaaacagacaaagatagttcaacatgaaaagagcacaccgggtacccagtgaagcatcttgaacaagttaccggactgtgaacaaagcctatttcttttggaaaaggaggaatgactcaaaggatggagccaagagctccatccaagggtagagataagagccacagagaatcacattccctgcccctggagcagggggagctggtgacaagtgcatggttagttctcacatttgctaatggctgttatgtgcctcttattaatctcctattctaaatgggagtgtctattgtggttttcttgtccttgtatttccattatatgttagacgtgtgggggaaaagtcacttaagtaaaagttgcgagtttagtacaaataatttgtttagactacagtcatacgttgcttaatcatggggattctttctgagaaatgtgtcgatagtcaattttgttattgtgcaaacatcaaagagtgagtctaaatccagatggtacagcccactatacatcwaggttatatggtatggcctattgctcctaggctacaaacctgcacaacatgttactgtactgaatactgtaggcaattataacacaatgataagtgtataactaaatatatctaaacatagaaaaggtacagtaataatacactgtaaaatataaaaaatagtatacatgtacagggcagctttattataatcttatggacccatcatcctatatgctgtccattgttgactgaactgttgttacgtggcacatcatggtatttgagagtaaatttccgatatgatgccctattactccaaaacccttttgtgtatatttccagtgtaaccacaatataatcatcaaaacaggaagttaacatggctacattattatcattttatgcttagtccccatccaagtttcactggtcatcccaataatattcttttttttaatttttaatttttttagtgacagggtcttactgtcattcaggctggagtacagtggcttgatcatagcttactataacttcaaactcctgggctcaaatgatcccctgcctcagccttccaagtagctaggactacaggtatgcaccaccatgtccagataatttttaaaatttttcatagagacaggggtcttgctatgttacccaggctagtatcaaacttctggcctcaagcagccttcctgccttggcctcccaaagtgctgggattataggcatgagccaccacactaggcctccaattttatatatatatatatatatatatatatatatatatatatatatatatatttttttttttttttttttttttttttttttttaagacagagtcttgctctgtcgcccaggctatagagtgcagtggcgtgatcttggctcactgcaacctctacctcccaggttcaagcgattctcctgcctcagcttcccaagtagctgggattacaggtgcacaccaccatgcccagctaatttttgtatttttactagagacggggtttcaccatattgtccaggctggtcttgaactcctggcctcaagtgatctgcctgtcttggcctcccaaagtgttgggatttacaggcatgagccactgcttctggcccccaataagatatacatataattttgagacggagtctcactctgtcacccaggctggagggcagtggcacgatctccgctcaccrcaacctccacctcccaggtttaagcgattctcctgcctcagcctcctgagtagctgggattacaggcatgtgccaccatgcccagctaatttttgtattttcagtagagatggggtttcgccatgttggccaggctggtcttgaacccctaacctcaggtgatctgcctgcctcagcctcccaaagtgctaggattacagatgtgagccaccatgcccagagaatattctttataataggaggatccactttagaatcacatgttgcattgtttttttccttcagtttttcatttttccaaaaattacaccaagctaaagcaaagctctagttgaggtgggtgtgttgtgtagacgttagcagtactgccctcactacatgctctttggacagtagtgcaaccccaagaaaaggatggttagttatttctctttattttccttcaattgtgatgagaacattttctcagtctttgactatcatgaccttgacattctggaagatttcaggatggttattttctagaatgtctcacaatttggatttctctaatgtttcccattaaaattattagcatttcttaaggcagtatttgaaattaggtaaatatattgctactcatcaaattccatttatttatatcattatggactcatagtttattttgttcaactggtaatagtttctatcaatatttattttcattctcaaatttttccatatttggccaatgggagccccttcaaactgatttctgtgtctttttgacataatcttatcattctttgagttcttcctcactttctgacacaagagtttccaggttcatcttgtaatattcctagccagtccctggaatcagcaatcagccttttctccaagaatacctaggtccttttattggagaatggtgtttagaaaccaagacttggctgctagatgtgctcatggccttgggaaatttctgctcccagacaatacacacacacacacacacacacacacacacacacacacaccattcttatttcatctatcactatattgaaaataatgaattcacaccaatttctcaaatttaaataatgtatcaaaggattcattttagttttctccctgtctatatttgtaactcctctgactgtcagaaacttgggtaactctcatctatatatagttgctttttttttttttgcttttttttttgagacggagtctcgttctgtagaccaggctggagtgcaatggcccgatcacggctcactgcaacctctgcctcccaggttcaagtgattctcctgcctcagcctcccgagtagctgtggattacaggcatgtgccactaagcccagctactttttgtatttttggtagagatggggtttcaacacgttggccaggctggtctctaactgctgacctcaggtgatctgcccgccttggactcccaaagtgctgggtttacaggcgtgagccaccatgcccgaccatatggttactttttaatcagtgttgctgtgttcaacactctcttcatcacatcttggcttcaacaccctgtactcggttgccctacttcacaggagacttcctaccatgctcaggtcctgaggccctttttgctctcctgggctttgaccctctttgctgggctgctatcctccccacccccacccttacccctccctatcatggttgggctttgacaccctgtctatgctgtttggactcttatgttgctcaaccctacctagtgactttttaactgaatttctcaggaaaagggagaaaaaaaaaaggaatgaggtaatttgtctttataatccacaggtccctcttttatctttattttttagagatgttacccaggctggtctcagactcttgggctcaagtggtcctcccacctcaaccttccaaagcactgggattaaaggcgtgagccactgcacccagctatccgtatctcccrtccctgaacctgaggaatatacctgtgaaactgtgtcccaaagagttaaagaaaacaatgactaacagaaattcctgagtttgcaggatggcagataagaaaagaaacaatgtgctgaaatgccaaaactccctctgcttgagataaaagaactggctgaaatcagttggaacaaacagggcaactgggctgttcacagaaagagctttctggtgtcacaacccaaatttccaccacgtttcattctaaatccccctgaattgcacatgtgaccagtgaagaggcatgaagaaataattgtgcatgactgaggactttccagacctcccctttccttccaccagttacttactaatctcagaatccaccccccaaaatttttctgataaaaacactaccttaaagccagcccagggagacttgagccagcccagggagacctaaagtcaccacagggagatttcagctggactcttctatctccttgttggcctacctgcagtacaaagcttttcttttctcaaaaaccaggtgtcacagtattggtttctagaacattgggcagtgagtgcttttgcgctttggtcggtaacacctggatctgatttagacaatactttggacctgaagtcttaattagttgaacttttgggggattttaagaagacactaatgtattttacctgtgagaagaatctaaataatctgtggccattgggcaaactactgtggaataaaggtgcctgacaattctttgtccctcctcccatcaagaggtggagtcagccaggtgaaatggctcatgctggtaatctcagcactttgggaggccaaagcaggaagactgcgtgagctcaggagttcgagactagcctgagcaatatcgcaacatctcatctctactaaaaattttaaaattagctggacgtggaggcgcatcccggtagtcccagctactcgggaggctgaggcaggagaatcacttgagcccaggagtttgacgttatagtgacctatgatcacaccactgcactacaggctggttgataaaggaagatcctgtctaaaaaaaaaagtaaaaacaagaggccgagccagttttattccccttgaatctggcctgccctataaacttgttttaagcaaaagaatgctttagaagtgatgctaaggctgggctttcagggatctccwtcttctgtatttttgaaatgctcctttttggaatgcttcctctagtttgtgaggaaacccaagcagccacatggagagtcctttgtggagagatccaagtggagaatgaaggccccatgacccaacccattctgagtttccagcccccagacagccccaactgccattcacatgagtgaagccattttggaacttccaactgtgccagtgcctcagctgacaccatgtgaggcaaagctgcccagccaactgcaaaactgcgagaaattgttgcttcaaaacagtaagttttggggtaggtgttacgctgcaatagatgactgaaataactgtctaccatgtgccgggcactatttgatgcccttctgatccatgagggtaaaaacagaaatgtaacctggcaggtgcagaagagggcgccataggagggcagaggaaggccagctgcagggagaagcagggagctggtgattctgggcagatgagcacatggatgggccaacggccaagcccccatgccagcttttggccaatcagcactgcaacttcctcctgcatttgtctcgccggatgggattaatttttcacctgacgaagtagagagtggaaaagagctggagacagtggggagaaaggttgcctgggtctgtctcactagcaccagttaatgtctggactgctggacaatgttgtcccaaaggtttctgggccatctgtattatttgtaattgactgcttctaggtgcctgtggatcaggggcagctgagactagtgctcaggcctcagtggactctgcaagttcctgagggataggcaatcagcaagtgttgttccttttcctcgatttctggccacgtgtgtcctgggacaggtctgtgattcttaataacccccgcagtcctgtctcctggctatcatctataccaatggaagacacatccccatttccccctccacttaattttcagttgcaggactaatctgacccaccctcactcattggccaggccgactttacccctagacacaggatgctggggtcagcttcacctttaccaactccttggagaactccactttacgttctaaactaagttagcaataatttttcccttctctccttcccacatcattaagatgatcacagtatttaaaaagtattttaacaaatatcggccgggcacggtggctcacaactgtaatcccagcactttgggaggccgaggcaggcagatcacgaggtcaaaagattgagaccattctggataacacggtgaaaccccatctctactaaaaatacaaacaaattagccgggcatggtggcaggcacctgtagtcccagctacttgggaggctgaggcaggagaatggcgtgaacccaggaggcagagcttgcagtgagccaagatcacgccactgcactccagcctgggtgacagagtgagactccgtctcaaaaaaaaaaaaaaaaaaaatctaggggctgaagatacagtagtgaacaagagagaaatttcctgttctcatgaagctgattttctaatgagggaggcaagacaacagaaaataaatgcataatgttgggtagttgatatccactctgaaaaaaatcaagcaggttaaggccgggcgcggtggctcacgcctgtaatcccagcactttgggaggccgaggcgggcggatcacctgaggtcaggagtttgaaaccagcctggccaacatggtgaaatccgtctctactaaaaacacaaaaaattagcccggcgtgatggcaggcacctgtaatcccagctactcaagaggctgaggcaggagaatcgcttgaacccgggaggcagaggttgcagtgaggtgagattgcaccattgcactccaacctgggggacaaaagcaagactttgtctcaaaaaaaaaaaaaaaaaaattcaagcagtttaagcagatttgggcaggaggccattctgcataaggtagtctgaaaaggtctctgtcataaggtgacatttaagagacctgaattgaatgaaatattggggacaagtgtttcaggctaaatgaacagcaagtacaaaggccctgaggcaggaagaaatatggcaagttcaaggaatagctatcaggctagtgtggctaaggcaggtccagcatggtagagtgacagatgtgggtggggagggaaataggaaccagattgaacagggtttctgtggatttggttctgaacaaaatggcatgatctgatttatgcttacaaagatttcctggatgctctgtggaaaacagactagggaggaggaatggaggaggtggaagcagggtgaccaattagtagctgccatataacccagggcaagatgatggtggcttgatcgaggatggttacatcagagttggctggtggtgaatattgatgttttgaaggtagcactgacaaagctggctgagggcttgcaaatggcattgagagcaagagaagcacatcaaggacaccttttagattctggggaactgaataaacaatagtatcactctctgagggaggtaagaacgggagtggtgtgtaaggagtaggttgctgagggcaagatgtattgtgtttgagatgccagtaaaataagcagttgaatctggaggtcagggaagagatctgggctggagacaaatcagtgatcagcatttggatattataaatcattccgaggcagtaagtgtagacacaaaagaacatcatggactatggctggggccttcagcaactggggaagaagtccagagaggagacagaaatggccagtgaagtgaggaagatcagaaggacctggtgtccaggaagtcaagtgaggaaagttgattctgtatgatcacaaccaaagtgtcaactcataagccttattttctcatctgtgaaatggacaccgtaacaccacctacttcatggcagatagtactggcacacagcaaactctcaaaataaggtagctactgttattccctgctggttggctgccagagccctcaacttccctatccacattactgacagcacctccatgagtctttctctggggtgaggtgtctctgctcactcagggcctgaggcctctgggtcaaatcgaggtcaagtggcttcaktgcctaagtctctcacccacacagccttcagcccttacttgcaaatcaacaaagggtaaacctgtagaaaacatgggtttcggagccagaattctgcctcttgccagctgtgggctcttargaaagtttcttaatctgccggggccccactctacgacatggggagaactgctacttcatgggacagtgggtagcccagtgtagactgtaacgccggctgatctcctgcacgctggcctgggagttagaggcttcttgctgctctcctcttcaaagtatacaggactcccgccacacacacatctggaaccaagctggtctgagagccccttatagcccaggctacctgatggggaggcacagaagtggcaacccgtccactttctttgccgcaggaccccccgttaagcagcggggtccagccgggctgagttagggagggggtttcgaacgtgccactcctcgcccggcgtcgaagcccgtttcctgggtaacctttttctgcctctcttcctagcccaccaaggcccactggccagaacgccgccgcggccccaaaccactccagataaccacccgccagctgtcctctccgttctctccgccgccgcgctgcaggcccaggctcgcacccgagtcccttcgcaccccaggaagtggcgcggcctgtcgagggcagcgtggaggaggaagaggaggcgcggctcaacgcgaccgaagctccgccgcaaaggctcgggaggaagagggcggtgcgcggccaagcgtcggagctgcagtcatactccggggaccccacgacggcgccccgcccgctgcccaccctcccgaggccccgcccagcgcgcccatcccgccacgggctgccccgccttcccgccctcgtccagaaaaccccgcgcccggccccgcccccgccttcgccggggccccgcccctcccctctccgccggcgcctcgggcggcttctcgccgctcccaggtctggctggctggaggagtctcagctctcagccgctcgcccgcccccgctccgggccctcccctagtcgccgctgtggggcagcgcctggcgggcggcccgcgggcgggtcgcctcccctcctgtagcccacacccttcttaaagcggcggcgggaagatgaggcttcgggagccgctcctgagcggcagcgccgcgatgccaggcgcgtccctacagygggcctgccgcctgctcgtggccgtctgcgctctgcaccttggcgtcaccctcgtttactacctggctggccgcgacctgagccgcctgccccaactggtcggagtctccacaccgctgcagggcggstcgaacagtgccgccgccatcgggcagtcctccggggagctccggaccggaggggcccggccgccgcctcctctaggcgcctcctcccagccgcgcccgggtggcgactccagcccagtcgtggattctggccctggccccgctagcaacttgacctcggtcccagtgccccacaccaccgcactgtcgctgcccgcctgccctgaggagtccccgctgcttggtaaggactcgggtcggcgccagtcggaggattgggacccccccggatttccccgacagggtcccccagacattccctcaggctggctcttctacgacagccagcctccctcttctggatcagagttttaaatcccagacagaggcttgggactggatgggagagaaggtttgcgaggtgggtccctggggagtcctgttggaggcgtggggccgggaccgcacagggaagtcccgaggcccctctagccccagaaccagagaaggccttggagacttccctgctgtggcccgaggctcaggaagttttggagtttgggtctgcttagggcttcgagcagccttgcactgagaactctggtagggacctcgagtaatccactcccttttggggactgacgtgaggctcccggtggggaaggagactgacctctcggttcacgtgtcttgccatagagccactctcctgagtgggtttttctcctgatcgtttgggccaagtgacttctctctgaacctcatrtttctcttctgggataataaatggtcaccctttcaaggggttgttttggaagatattgtgaacaatggtaaataagggcttaattaatgagggtaagccctcagtaaattgtcactgtgtgttcatttcttcctctgtgtggatcgtgaccgagagcccttccccctagcctcctcctggtatgggtacccaaaacctaggtgagcagggatctctcccaggggcagagagcttgtgtactctgggtgctagagggctaaaatataaccagtcaacaccacgttgcccatttctggtacttccggtagcagcctgagtctcaattatcttgcccagatgatctgaactctgacctctagcctgtttcagcataggcagagagcttgagtaggtgagtttgcattcctcatagcagctggctgagcctagtctggacttctctttgacctgtaacctacaggcccacaggcccaaggcaaccacaggttgcttccagggttaccacacaggtggtttctcatttctaatgctaggttttagataattgttgtaagtgaggggccctggcaggcaggatgacatcctgccaataggagttttctgtcactttcccacagagccctggctactacatactcttgctcaatttcgccagtaattgcgtcaatgtgttcatatcaagtttgggaagaacatcttggaattggtcagacgtgaactgtggtaataatgggggcttgtttttttaagcagataattaaattcctttgcatttgatgattattctgggaagcagactagtcccataaaatgaaatggactctgccttgctgctaagtgtctgacttgagacatgctatcgagtttctcaaaatctcttccttgtgtaaaatgtggttgtcgatgattaccttacaggggtttttttaagactaaatgagatcgtgtacattaaatacaggcactcaggctgggcatggtggctcacgcctgtaatcctagcactttgggaggctgaggggagtggatcacttgaggttaggagtttgagaccagcctggccaatatggtgaaacaccatcccatctctacaaaaatacaaaaaagttagccaggggtggtggcatcgcagctactcaggaggccgaggcaggagaattgcttgaacctgggaggcagaggttgcagtgagtcaagattgtgccagtacactccagcctgggcgacgaagcaagactgtctaaaaaaaaaaaaaaaaaaaaatacgggcactcaatacaccgtataataataatatagtaataatatttgcttaggatctttaaaaagtttcattttttcagactcccacagaaatggctctgcacagcagagtgaagggggagagagactgagtctccaggccagaaaaaggccaggttttttgcttttgtttttagttgttgcctggatattgcacagaaagaaaaaataattagcaagttaaacaaaagtaccgcaaagttgattacattggtatttgagtatcacatcttctctcagaagcgtaagagacaaggtcgtgaccatacctctgcttagttttgttttgtaatggtgttgctagtgatcggcttgtcaccagttactggtgtttctaaatggactataattggctacttgaaaggacttcctgagaaagaacattttggaggacgaggagagagtgccttctctattttggctgctttcatgtgacatgcaagagaccatgacgtttaggctgctgctgaggcagccccagaaatgggggccgagaggtcttttcttcattttaatagggtctgtaggtttgggtggttaggtacagttctcagaatggaggttcctggctatgaggccttgagaaagctgaaagtctccttgggagtgtgtgggtggggggagtcgagcccatctgttcatgggcaggtgtcagccaaagcccttgcgggtggttttgaggttggtgggagaaagcatccgtggggtttagagttgtggccttttcactacttgcagttcctttccccgacttggctttactttctggtgtccaggggtctgggccagatgctgagattcctctcagctgacwggtgtgggttatgggcaaacccttccctggaggacataaggcaccggattggactgctgatgggttgctgttggagttgtcagggccttggaatagtcttcagatagacttgggttagtgtgacctggggcaggctgcaggtttggagccatagtaccccccgcccccacaccgggcaccctgctctgggctaatgtgaggcttgcaggagtgagtgatgcagtgggaaggggggcctttcctgaggattctacagctttctccagggaatcctcccaggtagtttaggcctgcaggtgctatgctatccttctttcctaaccctgtctcaggtcctcagcggggccatgcggcatccacttataaccctgcagcgaggccctcttttctggccacctgggtgtttgcctgctgagatgggaggaacagtggccttgggcttcttcccccgtcatgtttatctctgctcagattgggcagcagctcaatgggacttgaccagctgtggcactgccagtctgaagatgagtagggtgatggggggaggtgggcagtacctgaagctgaactggtgagagaggcaggctggcctgggggctcagctggggyctgggatggttggtacagtcmcctcaggggggtaggggagtgagtgttagactgcttaagcctcagaggccgctcttgcccacctatgctttgaggagatcctcttcatttgttcaaagggaagactctgatctagagatgggcacttggaccagcaaacagcagctacaggtagccagggcacccgaggagcacttgctcatgagccrgtttccctggtttttatgggggctgtygctgagcgtctgccagggtttgtgtcctagcacttgctggtctttgctgggctctcagctctcaggtgtttctctaccagcacgtttccccctccctcatatgcacacatgtggacacaagcaggctgcccaggacagagtgtactttgaggcttgggaaaggactctctctcgcccttttggggatgagccttggaacctcatcaccttccggcttggggtggagcttcatcctgggggttgaagctttaggctcagataactagtcttgtaagccagttttgtcctgttgtttttttcgtggaaaataatgtattgacgtatacacagacattctttgtctaacagtctgagattgagaaataccctccatgactatttggtttgctttcatggtgaaacttggtcgctttcttagacacagcctatggcaataagagtgatccctggctgctgtaattcattccagactttgagcaaacacaaggcaccgcctccacctgcagtggagcctctgatgaaccaaatggaaactccttggggaatggggagtaagagccaaatgtgggattggacttaaactgcagcttcttagaactgtagcattccacgatgggattgtctagtgctcttcctggaggttactattcaatagttggctagtgcacaggttcaggggtgacctgatatgccctagcgtttcagaagatccctgcaaggtgtgtcttttggtccatctgaagggtcttgtatggtgatcttgtatggatatccgtgacggctaaggcatctgataacttcattccttcagttccagcagtgttcctgtattatgctgggcactagagctacaaagaagaaaacaaagtgcctcctcttcaggaactcttaatttaggcaggggaggcataattgaacagtgctgaggtcatctaggggaaccaaagtgtgtatttatccccttccctatcactcccctccctccttcatttcttcctttcttctttcagaaactccaagttcatatcaaaattctccagccctggttttatttggttgtgtgaaaattttcctctaatttctgaagctatgcattagttctgctgagtaatctttaacttgctgctttataatgattataatgagatatcactgggtattatggtctttgggtagcagcagggtagggatttccaggctgggactaagctaatttatgggttgggaattatggggcagttaatagcaaggcagtccaagctttccacagattccaccctagggaccatccagacttaaggaacagggccggcaggctcatcccctttgcactcagctgggctatgggtgtgtgtttgtgaaagaggtttattcagtagtcatacctgctgatttccctgctatctgtttacccagtgcctcctgtaccttgtttcttactctttgttctctgctcttactatgaagaagcagagactggaattctgcttgaacccacatctacctggaaattccagtttttcttgtccagtggagcagcaatccagttgttttaggacaaatggtctgcccttgaagcttaaatcctttgagggcctggcatggtgacagttttacatttggctttggtatagactggtgtggtccctgggcagtgaggtcactgtaaggccagccagccagaccctggctcctaggggaattaacaaggcatgggattagactcacagggtccctcctgtccctaaacttggtaggggttcctgggagccagactgcgattaagattgtagagacctgagacctgagttgtaggggcctctgtgttgatctgggccattgccgggtgagctgaggcggtcactagctcaaggagtgatctcaggatattgttctgtaagtcagagacctccaggttggagagtggggcttgggggtgggggacagggtttagtggggagctggttctgggtgaatgtggcctaaagggatttgtccttagaagacagaggggtgagtcacacactcagtgcttcaggttccactttgcggcttggcctcagcccgccccttccctgcacaaatgaaggccaggggctatataattggctgttgctgaattctttggcagtgattttaaagtctggtctgggtgtgttatgtagmtgcttctctatccactccccacacccgctgcttctccagagcccctcacaaagcccaggcrgagagagagagagagagagagagaatgacttgcctcacagagatgttggggatagggataggggtatgggtctttgcttttgccttttgaggggggataatctcttccttcattttaaaagtaaaaagtaatgcaggctcattgaaaataatttgaaaagttgaaagagatataaaagcacacccaaattcctatcacccaaaagaaacataccggcatatttcctactagtctttttcatgtttaagaatatagctgatatatttttttttctttttctttttgagacagggtttttgctctgtcacccaggctggagtgcagtgatcacggctcactgcagcctcgacctctcgggmtaagcgattctcccacttcagtctcccgagttgctgggaccacaggtgcacaccgccatgcctgactaatttttgtattttttgtagagatggggttttgccatgttgcctaggctggtctcgaactccagagctcaagtgattcacctgccttggcctcccaaagcgctgggattataggtgtcagtcaccacacccagtgttatagctgttgtctttatagatgaacagatagattgacatagattcatgtagatagcctggtgttcagcatttttcatttaagattctgtcacagacttgaccctatacctttaaaaatcacaaaggcagtatcatagtctgtcagctgaatatgccataacttaaaaaaatcattcaactgttgctgaacacacacatatacatatatagtttttgttttttcttagtgatgtgtgatgcttgtgcagaaagctttatgtactttttggatggtttctgtaggagagctttctaaaaaaggaaaaaaagtgttgaatgttttttgagaagggctagattttcaagccagtcttacaaaaggayagactcattggaaattccagatttgcttagtgctggcagatgagtatcacttattgctgaacaatgtgtctagaattctgattaaaaaagaaactaggtccaggaagtgcctgggggcaggggcaaagggccaggctgcaggataggctcttaggatctggctgagcagaaatctgctgtgaacagaatcggtgggggtgatgctttctcagtaacttctccatttgtttctttagcagctaagtccctgtgctggacttctgtggactactgtggctctggggctgtggttgtgggtgaacaacagctagctaaaccagtgctgttgacatcattgagatgtgacgcacaggaaggtgggagcaagcttgcaaatcagattctgaaacatatagcacagctctcccacctccaggtggtcctgagatctagggaggagccatagtgagaaactttaggtttctaggaattctcttagggagaagctctcttagggagaggcagaacctggttctcagttggggctgattcaggtgggttagatcaataaagcctcaggccagtgtgccaggctattcccaaggagtatactttgaagttactccctttagaatgtcctcagtggagataaattctctctgaggagcagttttgtctgccggggtcatttggcacaaagcctggagtgctagggcgaggttgcactgagggaaggggcaggattatgtcagcagtgtgacggatacagtgtgaggtcaggctccttcctgccccaccacgggggcctagaggtcatggggagggtccctggcaggggattcaatcattgcttggccccatgacagagtatattctaaaaatgccttaagtttttttctttcaaagtttcttcctgttttgcataatggccttttgcctttgacatcctgaaaccgcagagctgtcattggtgttgcaggacactgccagcttgaaaaaaatcaacaacaaaaaaagaaacaggaaaggatgtggagttcagggtgcggcctagggaagctggtatttgcgttatgggattgtggggatgtggtattaaggtgttgggtagcgcctgacatttagaggagtactctgggcagagtccctgcctgcccaagaataggtagaattgagtcttcacaccaaagtcaggagagaccccctccccccaggaagagaatgaacagggactcatttcctcattcagcaaacttttattggtaactacactatatgaagtgtgagagatagacatgaacaagagaggcccccactcttgggcagtcccttagtagtagtagatagactctggcaatatggtgtggtcagagagaggaagcctgggtgctttgagggtactgaggaggtgcagggagccaaatgggtggtctgggccagggccagagtcagaatgaaggacctctcttccagacgttgattttagcatctctgtctctcagtatgtttgaacagtctcccttattggaagggcaggagtctactgctaaaagtaacctgcgatttcctctacttgctgtcatgtggaaagaatactaaagctgaaattccaaaagttgcacacctttaccagcagggcaggagaggaaaggaaatggaggcagagtgagctgaagatgataaaagaaagagaaggtggtgcagtttggactgttatggacagaggaagtctgagggtagctggactgagggatcaaagggaggcagttgaaagggaagagagctgcagagagggatttcttggtctgcagagggtaggagcaagccttgaaggctgctggagtgaggattccgagcyctggtctttattctttttctaattcattacatcattttaggcaagtcctaactcctttggtctctgttgtctttctgaaatttgagtgggctgggcctgctggtctttagcctctgtctttctctacctcctagattccagtttggcgagtgggggggaaaacctggttgtatatgcaacgtgaaaggcctctggaattccttttgaagctcactacccatgaggcttctgctaaggatttcatcatgtctgtctaagcagacataaaaattttagcaggtggatgacccgtagaaatggcacaaggaatgtttctttctgtcacactgtggtatttgatttaagaaagttgttatcctctctgtgcctcagtgttctcacttgtaaaatggcaataacagtatccacctcatagatgttatgaaatacaggtagtagccacgaaagggcttaaaacagtgcctaacacagaataagttgtgaatatatgttatttattattggtagtataatgcttatttgtgaagattttggcttttgctttataggaccttttttttttttagttgaaaatacaatgttaccatgttaaatgttaaaaaaaattctacttaccattgtaacagaacatgctcccacttctgtaacagagcttgctattacttttcaaatgcatacatattccaatgcatatattccaatgcagttgtagagtgaaactgtttgcatgcagccatttttatccaacattatcttataaaatgttatgttgtttatgattatcctaattatcttttgttgctgtctagtatccttatagatattccattagcatacactattccaggtttcactatcgtmgataatctagatatgaacatttttgtagtgtgtagctctttgcttcagttgaattactttcctgggataaattcctggggaagaatttctaggccagaggatatggtcatcttgacaatactgattcacattgctgcattgctttccaagaggtttggaatcattcacaggttctaaattggaaaatcctggcttttgaagtatgtggattctaagggcgatttggatctagctggagcctcacactgacacttccagccagtktgtgtgtgtgtgtgtgtgtgtgtgtgtgtgtgtgtgtagttccctatgctggacaccgtgtgtgtgtgtgtgtgtgtgtgtgtgtgtgtgtgtgtagttccctatgctggacaccatgtggcctttctggacattagggttttcctgtgattgcctcagagcagttcctgttgaattcactctgtgtccacaaaaggagccttactgtggctctttcaacacccacctacctttgccaagttggtttacagaaagtaagaacattctttccttcttccttgatatgtggcgctaaacctatagcatggggcaggctctggctttaaaaacctgacttaaaaataatggtgttgatcaaaaagtttgtggatcagtttttggaaacactgcatgtagccatccatagaaacttatattctgttgggctagcctgggcgcctgatcatttaactcatgtggatgaacttctatgtaatagccctggtgtatgggatccagaaacagggccctaatgaagaaaggcttttaaattatgttggataaaaataagttgttacaatagcccaaagtctgcaaatatgaattgccagttctgtccttgtagtcatccaccatgtgcctgcatcttttgtagactcttgtagattcagaagcccactgaattgcataaatgatggaatgattttagacttagtgatttcagtgactaaaagtttacagatcctggccgggcacagtggctcacacccgtattcccagcactttgggaggccgaggtgggtggatcacctgaggtcaggagtttgagaccagcctggccaacatggtgaaaccttgtctctactaaaaatacaaaaattagccgggtgtggtggcatgcacctgttgtcccagctacttgggaggctgaggtgggagaatggcttgaacctgggaggcggaggttgcagtgagcccacatcaggccactgcactccagcctgggtgacagagtgagactctgtctccacctcccccgccccccgaaaaaaaaaaaagtttacagatccagcagatggggcatattcaatttgtgacagccactcccttcaccttatagctatgtcatatgtcttcttctcctttgactgcattctgcagcagtcagttgtgacttaatatggcactctgggcccactgaattaggtcagagctgctagtagtatattgttcctagagacctagggcaagattttcttactacataaaatgagggagataatttcttacctcaagatgttggtaagaggagtgaatgaggttagttatatggtaatatcagtactctgaatgtcttttgatcaatgcctaactcatcttcttgggcacaaaaggcatacagtcagcacccttaggccacatataaaattcctccaaatgcaggttttcatctgccttggggcagagtcaagagaaagaagaggaagaggcgtgaggctctgaccacaacttagggacagaatatagcccaaagcgagtaccccaggccacaaggagaaggccgctatcttgttgaatccacagcactggaaacttggagtgtgtgttcccctgtgtcagttacactggaattttatggctgctcacattcttcccttcaggtggacgttgttcatcagtatcctgggcaagaggccatcataaaccacagacagctgagtgattaggaagaggagctgaagagggagcattrgatgtttgattgagtcttaggtgagaaagtatatcattaaaacaaaaagatagatgtaggcgggctcagtcttgtgtgcctggtgtgttggtagaaaaactaaagcacaagcctgtagataacctgctttattctacctcggggctggtgttggaatccaggatgccagaccctaaagtccagctctctttccaacctactgaataatccgagagaaatcatgttctctctctgggcctcagtttgcccatgtataaaatgagatgaaggattggctgggatgctctccagagtctcttcctgcctggagttctgacgtagccatgtactcctgctcagcatcgctaaatggctttgtggtaggaccattgagtgctgcctccattagggccagctatgtaatgctggggtggctgtcactgggccctaagagccaggattggtcttactggagaaatccacatccacctaaacttaagacccaggggtgtccaatcttttggcttccccaggccacactggaagaagaattgtcttggaccgcatataaaatacactaattatagccgatgaggttaaaaaaaaaaaactcaatattttaagagagttcatgaatttgtgttgagctgcattcaaagccatcctggccgcatgtggcccatgggccatcggttggacatgcttgctttagacctcccagcaattctagtctctaaacaggaaatcaaaagtcaagatgaatagataagttggtcagtgtgaaaaagtaattggtgggagccactgtagatgcagggttctaggctccatcaacaaccacctacatcactgaacaaaagataatgcttgttcagcacttattacatgccaaccatggtaaaaatacttcagatgcattgttttcatgaactctcacagcagctctttttcttgcctaaatgccccgttagaacctccagtacaatgttaaatagatatgctaagagacaacatatgtgtcttgttagggggaaaatatccagtctttgactattaagaatggtgttagcagtgggtttttcctaggtgccctttatcaggttgaggaagttcctttctattcctggtttgttgagtatttttatcatgaaaaggtgatgggttttgtcaaatgcttttctgtgtctgttgagatgatcatgtttttttgtcatttattctattgatatggtatattatacattgatttttcagatattaatcttgcatacctgggataaatcccacttggtcatggtgtataattctttttatttgttgctggattgagtttgctagtattttgttgatttgtattcataacagatagtggtctgtagtctttccctccctccctccctccctccctccctcccttccttccttcctctctctctctctctctcccctcccctcccttcttttcccctcctctcccctccccttccctttcttctctttcatagttgtttaccactgtcagaaaaggtctgttcgttttctttcgtcgtgagatctttgtttggttttggtatcagggtaatactgcctcaaaaaatgagtagggaagtgttccttcctcttctgtattttgagagagtttgtggtcggtttttattaattcttctttaaatatctggtagcgttcaccagtaaagccatctgggcctgatgttttctttgtggaaaactttttgattcctaattcagtttctggttataggtctattcagaccttctattttttcttaagtcagttttgatagtttgtgtcttccaaggagtttgcttcatctaagtcatctaatttgttggcatacatttcatagtgattccttatgatcctttttatttccgttaaagttggtgtagggatagtccctctttcattactgattataataatttgaattttctttttttcttagtcttgccaaaagcttgtcatttttattgatcttttcagaggaccaactttgagttcattatttgttctctttgttcttatttttctgcttcattaacttctctaatctttattctttcattctgcttgcttttggttaagtttgctttttctggtgtcttaaggtagaaggttaggttactgatttgagatttaaagatcatgctctttaaacgttttgatagatactgtcagtttgccctctggctttttctcattaacagtgtataggagtgcttattcctcacactcataccagccctgggtgttactaacctttatatatttgccagtatcatattcagacatagtatcttgttttaatatgtttctctgattactgatgaagttaagcaaattttcacgtgtttattggccatctgtctttcttttttcatcctttctttcaagatgggagtctttgccatgttgcccaggctggactcgaactcctgggctcaaatgatcttcctgcctcagcctcctgagtagctgggactataggcgtgagccaccatggctggcttgcccatttgtatttcttatgtgagtattttttctttttttttgaagtggagtctcactccatcccccagagtggagtgcagttgtccgatcttggctcactgcaaccaccgcctcccaggttcaagtgattctcacaccttagcctcccaagtatctgggactataggtgtgtgccaccacacctggctaatatttgtatttttagcagagatggggtttcaccatgttggccaggctggtttcaaactggcctcaagtgattcacctgcctcggcctcccaaagtgctgggattacaggtgtgagccactgtgcccagctgactttttttttcttttttttaacccttttttttttttaccctttttttggcccatttttttttaccctttttcttttaacccatttttctattagttttaaaaatatgtttgcaggagctttttatattgtggatttttcttgtttattacatatcatttgtaaatatggtctctccatctgtcactcttctttatctctggtttctttagctatgtagaagtatgttatgttatgttatgttatgttatgttatgttatgttatgttatgttatgttatgttattttttggagagggagtcttgctctgtcgcccaggctggagtgcagtggtgaaatctcggctcactgcaacctctgcctcctgggttcaagcgattctcctgcctcagcttcccgagaagctgtgattacaggcacccgccaccacacccagctaatttttgtgttttagtagagacggggtttcactatgtaggtcaagctgatctcaaactcctgatctcaaatgatcctcccaaagtgctggggttacaggcgtgagccactgcactcggccagaagttttgaatttttatgtgtttaaatctatgttttcctttatgacttcaggttgctttcatacttaagcaggtcttcaccatcccaaaatgataaaatttttctcctgagttttcttctaagttggttctttagaagccaccaacttggcttcgacagcaaaagatgaacagaatttctgttcaactctcatgctgcaagaagctttatgtaatactccagggaccctttaaggtcccagagttttcctccaaatctatcagtgattctagtggctaagagtagaaatgtgaaaatttagccatgtgtgctgatagagctgtagtaatttgtaagctctgaagttctaaggagtcaggggagaagggaaagtaacatttattgaacatctattagctcaataagaacatgcgataagtatgtatatgtattatttcacttacatctgaaaggaaggcataattatccccactccttagagaaggaaattggagctggctacatttaaagtagtcctgacaccagagagatattgccaggagtacttggctggctgagtgcccagatggcccataggagtagtgggccctccacagtccaaggtctggttctaggtngagagagaaggatgtgctcgtagtcagcaccgcagctccagaaaatctgctggggctccaaaactgattagaggggcagctgactcagtaataaaactcccaggagacttacttacatactggaatgcaaagttgcagctttactgggaagattagaactgttattgagtagcttagaaatctctggctgaattcactgcaagggaagccgcaggataagctaactgctggtgagtcagcagtcagagcagggaagtgaatttaacattagatgggtcagtctctcgtggctgatgaattcatccccacaatactgtacacctgccttagggacctttgtctggactaggggttggggtccccctcctttgtacagccctggaaggacacatccagctccatccgccatctctcccttacttatttccttccttccttccttctttccatccagccatcaagcttcctttcatggccaataatcatcattggggtctactcatggactctcttgcctcatgtatttgttttattttgtcctcattcccacttctatttcccaggtatatcayaggcaactattctaacgtatttatagtttgtgtatctgtttttgctcttgccaaaatggaagccactgctttatacatagatgtattcttaactttaaaaaaaatttttttagattaacctacaataaaattggctttttggcatatagtctataaattttaacacatacatatttttgtgtatctaccaccacaatcaggatacagaacagttccatcaccccaaaaaaatccctcttgtagtcacattctcctcccacccttaatcccaggcaaccactgatctattcttcattactattgttttgtctttttgaggatgtcacataaatggagtcacacagtatatatacatttttttaaacatatgtaaatggcattttatagctcattttgattatatgtttttcatccagttctgttttttttttttatttttaaaaagtttgacataacttcagacttacagaaaagttgttagactaatacaaagaattcctggatatcctttggagtccctaaatgttaacattttactatatttactttttccttctctctctctctctctctcgctctgtgtgtgtgtgtgtgtgtgtgtgtgtgtgtgtatctacctgtagatagatagatattaatataattttagatagatgtatctagatctctctctctcatatatrtgtgtgtgtgtatatatctatatctatatctatatatatctccttttacccttaaatattcagtgtatatttcctaacaacaaggtgatttaaaaatatatatataaacatagtataattaacaatcaggacatcaacattgaaacatttctgctatgtcatctacaggccttaggaagactttgtcaggtgccccaataatagccttgatggtagaagaaaaccatgtgttgtattcagttgtcatgtctcttagtgtcttgtaatctgaaataattcccaagccctttggatttcatgacagtgacattgttgaagagtacaggccagttattttrtagaargtctctcagtttaggtctgtctgatgtttcctcctgatcagattcaggttattcacttttgacaggaataccactgaaatgatgctgagttcttctcagtgtaacgagatctagagacacacactgtcagtttgttccttattggcagtgtgaaccttgaggatttcattgtagtggcatttggcattactccattatagttactattttaccattttaaattaaaactatctggccgggcgtagtagctcatgtctgtaatcccagcactttaggaggctgaggcgggcaaattgcttgaggtcagaagtttgaaaccatcctagccaacataacatggtgaaacgccatctctataaaaaatacaaaaaattagcctggcgtggtggcgcatttgtagttccagctactcaggaggctgaggcacaaggcttgcttgagcctgggaggcggaggttgcagtgagctgaaatcacgccactgcactctagccagggtgacagagtgagactctgtctcaaaaaaaaaaagtaaataaataaaaaaaatttttaagtatcttatgggcatatacttgtcctgttactcctcaaactttcatccacttttytttttttaaattttttttcttacctttcatcgttttcttgatatccactgggttttagcatctacaaatgattcttgcctgaatcagttattatggtagttgatggttttctaattccattattccttctatgtttgttaattttggcattcttctataaggaagagcttaccctttttccctattaattaattcatatattaatgcagacctatgcattcttacttcattaaatcataatcctttactatcattatgtattctgatgttcagactatcccagatttagccaataagatccccttcaggggaatggtctttgggattcctctttagaggttcctggttcctgttttcttttgacatatcctattactctttgagcatttttttttttttttttacttttaggcacagcaagaagttccatggtcctcttgttctttccccaactcagccctagagtcagtcacttctccaatgagctctagttccttttagtagagaatcataattagaaaacaagaatcagtgccaagtgtgcacctttgtttttaaggtccatccacgttgccgtgtatatgtccagcatgttgattctaactgctgaataatacctcatgattgtcatccatcccagtgtttctttttcccttctgtaatgagggactcctggactgcctccagcattaccttcacaaatattgctgtgaggaaaatccttaaacgtttcctttatgggcaacgtgtgagcatgtttatgttgattcaggggtgccagacacagctccagaatggctgcctcagtttacatttccaccagcagagcatgacaggctctgtgtctccgtgaataatcagcattaaccagcttcctattttttgccaaactaatagatgtgctagggtaactctttgttttaacttgtttttctctgattaccaatgagctggagcatttcttcatatgcctgatggtctttgggattcctcttaggtaaattgcttattcattataatcctttgcctgtttttcactggagttcttatatttttcttgaagatatgcaggaattccttatacatcctagatattaatcccttcctggtctcagacattgcagatatcttctgaatctgttatttacttatttatttacaattttttttttaagagttggggttttgctctgtcacccagactggagtgcagtggtatgatcatgactcattgtggcctcgcaatcctgggcttaagcgatcctcccacctcagcctcctgagtagttgggactacaggtatgcaccaccagacttggctaattttattttattttttagagatggnagtcttaatatgttgctcaggccaatcttgaactcctggcctcaagcaatctttccacctcagcctcctgcatctattatatatatgttcactttgctcatgctgtattttgttgcaacataaaactatttttcccattgttttgtgcagtctctcaccagcactcttctttttctgtaactgtgttaatgccctttgttcttccatatgttaggtatgctggtatagttgaactctgctgactctcctcagtaaacagtctctttttatgacaccttatcctctactgaattctctctatcaagaatgacttggccgggcatgggggctcatgcctgtaatcccagcattctgggaggccgaggtgggcagatcaccygaggtcagaagttcaagaccagcccggccaacacggtgaaaccctgtctctatgaaaatacaaaaatcagctgggcgtggtggcaggtgcctgtaatcccagctacttgggaggctgaggcgggagaatcacttgaacctgagggggaggttgcagtaagccgggatggcacattgcactccagactgggtgatggagaaactccatctcagggggaaaaaaaaaaaaaaaaagaatgacttgtcttcctcttagagtgtgaggtctacatacaaatattattcttgtattcagcaaatgtatgtcataggcctagtgtgtgttaggaactgtgctgtcaccaacaaagtttagagaggttataaaacttgacygtagctttttagaggtggaggagtgatttgaaacctaggctgtaattccttcctcctgtgattccttcctactgtgttgccttcccttgaaaattgcatttgggggccaggtgtggtggctctcgcctgtaatcccagcactttgggaggctgaggcgggtggatcacctgaggtcaggagttcaagaccagcctggccaacatggcgaaaccccgtctttactaaaaatacaaaaattagctggatgtggtgtgtggtgacatgcacctatattcccaggtactcagtaggctgaggcaagagaatcacttgaacccaggaggcagaggctgcagtgagctgaaattgcaccactgcactccagcctgagtgacagagtgagactctgtctcaaaaaaaaaaaaagaaaagaaagaaaattgcatttagttcctgtagactgtgtgtcaaatgtctaaatctcttctaacaaatggcctaaggaggtgcaaagcgaagcatcctcaccagcatcctgacttggcagtgaggcatgggaccctggagggagtagtggtaagtgtgactctggarttcttcctgggctacttgtcagtgactggctccagattgagaggagagcccagaggacacaggtggctgccccagcctggaggtgaaagtcttaaaataaaatgccagatgcctagaccattctaawcctttctkagaagctgaaatcatcccttctggaagcgctctagttctaaaaggacagatatacagcaagatcttcctggggctaatatggagtttataggcaagtaggcctcagaacctttccctggtagtgatatctgtgggcaggcacagtttccacactttccagaaattccagcggaaggagtgagaaggaggaatctgcccttgagtgaggaccaaagaaagcagaaattcctcttgggaatttttcctccagagaccaaacactacttgggagcttgtttactgggctttaaaagcttgtgacccccagtcactctttcttgaccccaaggctttgcatttctgtggcttccccactggacagaagtggaactgtcatgctgcctgttctggggtctcccagaggtttccccatgtcctctccttgcttctactgccccacagaattggggatctgtgaccacatatggtatagaattaatgcttgagaatggtttagttcagtgatgtcaaataagattcacttttatgccacctccatcagttgaaggcccccctggcccctaaattggaaaagattctgagacagaatccccgtgggtacagcgcagggacagtaaaggcacgtgtgctgtgatttgctatccactgtgtggatgcatccaggaatatcagaaccctggaagattatttaaggggaagttaggacagcttttttgccaatccaagggtgttcttgaggaagtctgtcttcctgtatggccttcagtttctttcctgtgtaaccatggggccaacacataattcccacagctctattggcccttgtctgccaggattctctagggtctggttcgaggtggatcctggccctttgaggtggcagaatctgatcatggtgctgtttccttagatttaggccttgatacccttggcgagagcatcctgggctgagtgaccacctgaggtttttctggtgattttgtgacccatgtaaaactttgagctttgggattattctctcaaggaaatagtgacatttggtgaagagcctgtttggtgtggctatgtgaggcttagccaagaaaatgcaccatttttattaggaggttaggccatccgttgccacaaagtgtcagatgctaggcctagagcctggagaaaacttattttaaaattgatggggtgctggaggggttggggggtggtggctgtagctcatgaatcaggtgctaaacctagaaacaaaaggcctcatgtggcagactgtttctgagcacagatgaatggatgagcaactggcgcaactttgcccagttggtccagcttcccacttggccacctaggcttgctgtgaagacctcgtctggcagaaatgagagtgtttttgccccatcttgatcttaactgtaatttaagactaaaatcttagattctaaaacatcaaaggcaagatggctcccagctctgtgagctcagcttctcacctcttagttgaacaagtgcagtgtgggtcaatacatgattgctgctcttgctgccaggaactgtcccagcatagaaaggaatgggacacaatccctgccrtcaagattctaagggaggaagcaggcaggtcgactggtgcctcatctctgcagggctccagccaaggtttgtgaaggattttgcaggcatatggagtggggactgattgatcccgagaggggactggggaaagctctgaagaggggatgacatttggtttgaactccaaaaaatggttgctttacctgtttcctgaagtttttgaggtggcttataagaacatataccataaaaaggaccaatataaatttaaaatcagaaaaagagaaaatgggctgggcatggtggctcatgcctgtaatcccagcactttgggaggccaaggtgggtggatcgtgaggtcaggagatcgagaccatcctgcctggccaacatggtgaaaccccggctctactaaaaatacaaaaaattagctgggtgtggtggcacatgcctgtagtcccacctacttgggaggctgaggcaggagaatcgcttgaaacctgggaggcggaggttgcagtgagctgagatcgcaccactgcactccagcctgggcgacagagtgagactcctcctcaaaaataaataaataaagagaaaatggaacttagaaaattaagaggaagagtgaaaaggtagatatttagtcaggcacagtggctcatgcctgtaatcccaacactttgggaggccaagacaggaaaatctcttgagaccaggagcttgagacttgcctggcaacatctcaggtgagaccttatctctacaaaaaatttaaaaattagctgagctgtgtggctcgtgactgtgatcccagctactcaggaggccgagaccacagcccaggaggatcgcttgggcccagcagtttgaggctgcagtgagctggcaccactgcaattcagcctgggctacagagcaagacccagtttaaaaaaaaaaaaaaaagatattcaaaccatgggtcccaacgtagttattatatttgaccatttgcaaaagctgraagcaaaacatgttacacattttcagagaggaaaatacacagtagttcctgagtgtaagttgtttttcttgacctcattcttaaattgcttcatgagggtgggagggaagtggtagttaataagtgaacctgtaaaccagcgtttctcaaaatgtagtccagggaattgcatcaaaattgcagttacctacagtgcttgttaaaatgcagattcctgggcccctgccccaggcttatcaaatcaatctggtgagtaggactcaagaacctgtaaattcacatacttctgcagatgattcttcttgcactgcacagcatgaaagcctctgcaatagacagaaagctaccagcattgcgaaagcaacttgagtgcttggcctttgaaggttgagtgggactttaatgagggagagagtaaggcatgagaaatggcagttccactgaggtcagtcagtggttcattgctgacgaagtcacttttaagtcatgttttagaagaactaccaagtgtggcaggtcaggcatgtggcaggactgtttctgagcacagatgaatggatgagcacctggccccactgtgcccagttggtctagcttcccacttggccacctacggtctgctgtgtggaccttgtctggcagtctcctttaatttattttttattatttttttctttttgagatggagtcttgctttgttgcccaggctagagtgcagtggcatgatctcggctcactgcagcctccacttcccaggttccagcgattctcctgcctcagcctcccaggtagctgggatcacaggcaagtgccaccaygcccagctaatttttgtatttttaatagagacatggttttaccatgttggccaggctggtctcgaactcctgacctcaggtgatccacccatctcagcctcccaaaatgctggaattacaggtgtgagccaccgcacctggcctattttttttcagcaaattctttgtttttctctctgttcccaaatgcagggtactgagaccacagatgtattctgtttcctgttgaaaaaatgtttctcacttagctgggtgtggtagcatgcactgcagtcccacgggaggctgaggcgagaggattgcttgagcccaggagttcgataatcatgccattgcactctggtctgggtaacagagcgagaaactgtctcttaaaaaaaagaaaaagaaaaagaggtcctagggaaagaaacaaatagtggcttggatggtgagttggtggaaagaacagtgggtgttgggggtgttgaacttgtgtttgtgtgtggtgtacccaagacatatcatgtcagcattaagaatagactattcctgttttctggtcactgagttgtatgttttgacatccttattttggaagatacttccttaytaggaatgggatagggagggggtcacctttcccatctgtgggtcatattttaaaatatttattgttcaagtttaaagatataaccaaaggtataaagaaaaataccacaaacatctgatttaagaaacaaaccagccgagcgcggtggctcgtgcctgtaatcccagcactgtgggaggccgaggcaggcagatcatgaggtcaagagatcgagaccatcctggccaacatggtgaaaccccgtctctactgaaaatacaaaaattaactggtcatggtggtgtgtgcctgtagtcccagctactcgggaggctgtggcaggagaatcgcttgaacccaggaggcggaggttgtagtgagccaagattgtgccactgcattctagcctggcgacagagtgagactccgtctcaaaaagaaaaaaaaaagaaagaaatcatttcctacaccttcgaagccttcatgagttagattttgaaacagtgcaaaatgcttcacgtgagaatcgagagtcccttctggtggctctccatcccctgctcttctgtcaggttttcttgtaggtttatggaaacctttgttacttgtgcaggtggcagagaagcagagaggatagctgcrcgccacccacacagctaggatttattggcgtactcccaygtgcatggcagccaagtggacacaactctgtgatgaatcctcccaagagaactgaggggccctgatggaggagctgcttctttgcaaagctttccttgactctcttcctgtcccctagttgattccccttctgtgctagttttagcttrttgtttgttacctgtcacacttagcagtactgttggctttgctggtctccttgactactgggggtaaagaccttttgttgttgttgttgagacagagtcttgctctgtcgcccaggctggagtgcaatggcgtgatttcggctcactgcaaccttcacctcccaggttcaagagattctcctgcctcagcctcctaagtagctgggattacagctacaccacacccggttaatttttgtatttttaatagagatggggtttagtagagatggggtttcaccatgttggccaggctggtctcaagcccctgacctcaaggtgacctgcctgtctcagcctcccaaagtgctgggattacagacatgagccaccaygcccagcctcaaagacctcttctttacttgctcaccctgccgcccactcccctaccaacccctgcatgccctataccacctggcacatgatacatactaactgggtacatgtttgaatatgaatggatgtggtgctgtgaatgcttaggggaagtgggtgaaatgcttaagaaccaaccttgagtggtctgggaaggcttcctgggagggtggtgtttgagctaaggccaggcagctgttagatttgttagaytgaagcccttgcagacttagagagcttgtgctcttcccagaatgacgggtgagccacgtacagtaaatggtgcttctcatttctagcccaaggggcctcaaggggcaccgtgatttcacgagaatgctgcaagcaaatcttttctcaagctggggaatttggtggtaatgcctggctcagcttgcgstgcgcacctggcctttggaagattggtacagagagaagcggcccatccacatgagcctgtggaacagcactggtgggggagctgatttgtgaagaggggctgtgcagtgtactgtcaggtctgagacccaggaagaaattccagtatcccagctctcagaatcacagagttctaggcactgcctagttccacgtgttcccaaatgtttcctgaatacttggatttcctgtccagagaattttcaaaacaaacttagaggcctgacccatggctgccaaggaaggattttttttttaaattaaattttaaaaatcagtccagcatgaaaatctatgatgatttcataagagaaaggacattttaatattcaaagagtaagaagcacttaatcttggaagaaagggcattcctatactttgattacctttagtttaatkaaaaaacacctacatggtctttacttctgtgatttcattcctgggctagtgaaacattgtcacaataaagcatcaggccaacgcttctttcgacccactggccaatcagttgacaaacagtgactagatgtttcagcctattttgctgaggctaaaggattgaactagtgcttcagccagcatgaaaaccagtcaggagtccgtgctggtgttggcttagattagcagggcctttgatggaggggcatgtatgtgtttgggtttgctgtgccaggcaggggagcagtggaatttgtctgaattgagctcacacattgaagttattgagcgacttacatgcaaggccatgacctggactcccagccgagaggcccacgtggcggggcttgagctgggggagccgaggacagcttacatctgctcatctgcttacgtaaccctgcctcccagcttccagagccaagaaaacacacaagccagcccagcggggccgagagcctgtggtagcacacgccatgcgccgcacagcaagggcgccttggctcggcttgaggcctgtcatgaagccctcagccctctgcctcctcccagagcttctccccaccaccccaggcagtggctctgaaacctggtcgcaggtctgcatgattctgaacagaggtagtcgttgccttcctggagtctgagctctctggagtttctcactgggacagagccaggtgtgtagcagagcrtggtccctgcagtatggcaggaggtgtgcagggcattcaggaggcctcctggctggcactcgacccaattagtcattcaacgccaggtctggggctgctgtctgttgtctcaaaggtgtgagctgcaagatccttasagttgtggagaaaaaattgccagattgrcaagaagggcaggattgggggtcaaggtgtctcagtgtgttggaagcatgatgggggttgtgcaaggggcacagcgagttcagaagggagcaggagagtgagaagaggctgttcagtgataaagctctgcacagagccattggaggagcaagctccttgaccatccttaaaccagggtaattttcatttaggttctgccacacgctcagcagggarctcctggaaggcaggatttgtcttgtccatcctccctccctacctcaacccactcctccttgggctggcacacagtaggtacccagaaagtatcaattgaaacaaattgaaagtggtcttgatacatatcacagggcaagtttgcagttaacagacatttcagagtaaagactctctggcttggtgctcgatcggcttctgtgggttgtcagcatgctgtggacagccccggcatgggagcgagtgggcgtgtgtgtgtgtgtatgtgagggtgagagagcgttagtgtgtgtgttggggttggggagagargagggggaatagaagatggaccacccgggtatcagcttctgccctggggagatggtggtgtcagttgctgagggaatcctgagaagcaggtctggctgtaggtggtgatggtggtggggttgcatgagaatccatttggggcaggttgaatttgaggtgcccatgacatatggctagccatgttctgttggctgtgaggtcaggagagagacatgagatggaaacagaggtttgggaactgtcatgtgcttaaaccaaagacctgggtatagggagagtgagaagagaagggggcaaagatggacatccaagaaagaagctgagaaagcctaggaatttgaggtaagaggagacgtaggtaaatgtgacgcttggtgatcaaggcttctttccacctctcctatgctggacactcacgtctcctgtctgcttggaaattcatgctgagggcagggaaggtgggagcaaggatttgtctaaagatcttgctttggatccctgcactcctcctggtttaccaagtgtcactggacacgtcagggcgttctgagaccttagagagcatccagtcctgtccctgcagtttacaaatgaggaaaccagtaccctgagagtggctgtactatccactctcaggataccaaagatcatctggaaagtcactggtggagctggacyggggcccaggcatctcttctcctgtccrgggctcttgacttcaggaccacctttctgaaacccatgatggggcaacaccaggacactttccagcctgcaggtgtctgtcccgcggaagcgagccaggccacrtgtgaattcctgttttctgggtgggtttcagaaggtacgagcaagtcggcagggtgacagcccaggtgcttcttgggttccccaaaacgcggttatgtttagcagcatcctcagaaccaaaggtggggtgggggctgcagatgttgtgggggccctctgaagtgaaaagagccctgtgacagatcttttcttcatgtttttcacaagttcactgtgcagcagggcccccccagtagcctttgcccagggttgggtgttgggcagcccaggcctggctgaccttgtggggaagggtgtgaatggtgggaatccccgagggccctctttgcccgaaagccctaagccttgacatcagatgcccatcagatggtccatcggagccctactacccagcttgcccagtgagaatcatctgggctccttgttaggtagccatttaggtccttcccaaaatccacagactctctaagggaagggcccgagatgctgtacttgtactaacttcctcaagcaattcttgtgataggtttgggaaaaacttgtccagggtgaccactgactgagtcctggtcttctctgaagagcacagtgcctgctcactttagggcaccctgggaggtgggagctggctcagcaggcagtcttataagggactgagcttcaaggcctctgtccctccaggagggaggtgcatgaccagagagggaggcctgaggatcttcttccctgccccagagggtctgctgcctgagctctgtgatagcgcagagagtaaaaggatcaagcttgattgaggcctatctctcaatgcraaagtttgctagttaagaggagagtgggaagggcatttctggcaaagagaaaagtgtggacaggcatggcttaagggatggggagggagacagacagagctgagggtgaagggccttttgctcagctgtgggccttggccttcccttgtgcagggacacacagccttagagccactggaggttttagtgggaaagtaatatggtcggggctgtatctcagaagaaaacaaactaatgggaacaggtcctgtgatggtggacctgggtcagctacggagggagggaagatgtgagatgtgtactggggaagggggtggaagtggcagctatctggtgagaggaagcaggcccacagctttttttctcaagctgttgaattcagaagggcgagtgattccgggagtagggggtgcttggagagccacgcgttattgataaacagggcaggctgaagcctgctcactggccctgggcgggttctcaccagcatgtttcaggttttgatctgtgcttgtggttggtgttcctacctgttctctaggttccttcctttgttcttgtggctcatttgcttcacaggtgaagctggttacactagagtaacagttcccaaagtgtgttccctggaaaaatggttctgtagccaaataagcttgggaaatggtgggttaaatataacgaagggggtttttcgactgcacaacttctcagagcctttggtgtgtgtcgtgactttgcagaagcaggatttaatacgcagcattcccgttcttatttgaccacgagwcatgtttttccattaagcatcttgctgggtctgatgttttctggaacccattttgaggcggtctggtctgcagagagtatggggagcctgggttcaagtcttggctcttgactctcagcagagccttgattccctgtgttgcctggactgcaccacgtgtaccacatacccggtatgtgacgttttcctcatccctcttcccacctgccgttacctcacaatccacaatctgcacctcatccatttttcttctgaggcaagcactctcttactaacttacttmtctcatctgcatccatgttcttctaggccagaaacttgggagtcatccctccctctttgttacttcttcttcctctttgttactttatcccctctgttactaaacattcttctgtgtttccagctatttcttttattttccctcggtctcctttggggtttctttgcctccatctctcccagaccttggttcaccttccatcgagtcccttcctgggacatgggcactcatgccactcctgctaccttccacttcgaagctaactccctccacactgacgtccccaacatgcatgcatacacacacacacacacacacacacatacacacacacacacacacacttccccagttaggctagaatcagagagatgatgtcagccatttgtccaaggccacgcagctgggaggtcacagagctaagtctcaacctcaggggttttgagaaattgccttctcatccgtgatcactgatttctacaacagcctgtcaggaagtctgggtagaaattacttccattttacagtggagtcagagcggggagggtcctgggcaggcgagtgcttcacagagtgaccaaccatctaggtttgccccacactgaagggggtttctggggatggttggtcaccctaatgctggatgtggtgcctgatgctgggcaggagggccctctccgtggccacgttgcctcccaggaggagacatttcctctgcagctgcagctgcagcctggccatctgatgcagcctgtggagcggtggcgagtcctgtggcctgctaacttctccctccctccacctctctagtgggccccatgctgattgagtttaacatgcctgtggacctggagctcgtggcaaagcagaacccaaatgtgaagatgggcggccgctatgcccccagggactgcgtctctcctcacaargtggccatcatcattccattccgcaaccggcaggagcacctcaagtactggctatattatttgcayccagtcctgcagcgccagcagctggactatggcatctatgttatcaaccaggtgaggcctgggaaggtggaatgagagagggtgtgtgtgcatgcagatgtgtatcagatgtgtgtgtaatgagggcaggggaaggggagtgatttcacagayacctggcacttacagcgaggaaccagccccccagccaccaccagtgcagatgaggtaaacgccaaacagtgtgcttgcctattgctgtcaactctatagccaagggaaatgctggagtgttttcgttgttctgtttttgttttctggaagtagccttccagcaagattgggaaaaaagacaaccctaattattccaaagtacacactgattattccctggctttgtgtagctgtgtattttccttttaaaaataaaaccaccatttagatgtcagacttttaggtaacttcaaagtttatccagtcagtcagagygtgtctcctggggcacctggagacagtgcccttagttcaggtcacatgcctacatgccagcccctggtgaaatatctggagaagtctgattcgtgggccatctgagagttatgtggactgggccgagtctgagaaaaagtttctcactgctcrtctgatccatatgtgttgggctttagccctgcttaggaaagtaatgctaaggataggtcaactttcatcaccatggcatggagaatcagattgatctaagaggcatctttattgaaataaatttttcagtttatttgaggagcattattttcccaagagtataactttgatatttcaagattacccctaacacttaaattcatgtttttagactataacctcctaggtgcaatgacacatctaacttatctaagcacccagtttcattgaaattcatttgaagagtctgagtacgcccatttctacaaggcccaatgtccatttcatttcgagataaactctgctttaggtaggaggattgttggcagtttacggcttccatcaaggtcaaggaactctgtgcaccttccctatgaccccaggggaagcactcgaggactgctgtggcattgtgctgcatcacttgctgcagggagattctgaagaagtgtaaggtctcagtcctgccctgtcccgaagcctccaacccacttctggcaagtgggaccttcccagggaacaatttgttaacagacccaaatatcctgtgattggatggtggctgccaaatgctttggaagctcagaggaaggagagagagcaatggcttggaagaaccaggatataaactaggttctaaagtctgcagggagatgggcttctcagctggggccagtgagcagggaccttaaggcagaaaggagccttgcatgttcctggaaattgagatgcccactggggtaggaaagcaccagaagctctgggrccaggtgtcagagttaagcctgtgaggcaggagagagcagaacaagccctgttacaaggaaactgaagcaggagagcaggtggtgggcaaaccccttgaggctgtttgaattcttcggccaagtgaggtacagaccagggccctatgaacacctgcaagcaagacagccacgcagttgtgggtcaccttggaagaatattggagaatgcaagagagaacaggtaaatgtcctgcaaaatgcgggtcactttaacccaacacatattcatttaagaaaagctctgtgattgagaaacatttgtctgatgccagttagcacataccaatgacggcaagattcaggagcctgttattaaagcagtggcagcgagcacctggaagaggcggccaccatcaccaggagccagcagggatgactaataagccgtgccagctgcatctcgtttctctcttgacagttgctatgccagtagatgagggatgtactgtggatacaatgctgtcatatcttattcagcagggcatctgatagcatcccacaaatctgcctgagtagaagacagacagctgtggtctgggtgccatataggtaggttaaaatatatatttgggcctaggcgcagtggctcatgcctgtaatcccagcactttgggaggccaaggcaggcggatcacttgaagtcaggagttcaagaccagcctggccaacatggcgaaaccccgtctctactaaaaatacaaaaattagctggacatagtggtgggcggctgtaatcccagctactcgggaggctgaggcaggagaatctcttgaacccaggaggcagaggttgcagtgagccgagatcatgccactgcactccagcctgggcaacagagtgagactctgtctcaaaaaaataaaataaataaataaataaataaaatatatacttgggtaaagaggataaaagagttagcgatgatgctgaatttttgaactgaggtggctgttttcaaggaagactggagggtgggatgctaygtctagatatgttgcagtttaggtgaatgtgagacttccctgttttgaagtcaaatattggaccagtaaaatctagccatcagcttaaattcctatgatacaatttacatactccccaggctcaacacagtagatttctgaatgtcctctgccagctacatgctcctgcccacctcaatccgagtagatggaacaactaaccaagccagctcagaccggtggcacagctgtgctggctaacactgggcaccacctaagagagtgcttctscaaaagtgtgcttccccaaatggagcgaaatacgcttgaggaatgttgggttgaaccatgtaaagcaggtctcattcccgcagagcctttggtaccccggtgtacactgtaaccccagaagtgtttcctgagcttgcctgacgagacaacttttccaagaaccgtctcaagtgatgagtgttttgtgagtcacactttggggaaagcgggcctaagttagcatctcctcccagctgcctccctgctttccctggaacactaggaactgcccgtcctccctccctccctcctcttcccacttcacaacttagcatcaggaatattttagttttggtttttcaaacatatatacctccttttttcttatcttgtcaatatcatcttttttttttctttgcttttcctcatacttttttttctcttcatcctttccttctccaagggttaactttccaccttaggagaatcttttctgctttttctcccacttccccagctactctcttatcatctgctccaatctcaccctaattgatcattttgggaaaatatggtcagagtccagataactaagttgagaaatgcttaaactctgccatacctttccagtaaagaatattacctaataaataataaaatggtaatgggaaacctgaaccctgaaaaaaaagaggtggaaggagaaacatttggagcacatcctgtctacaaattaggaactgcctgtgttatctgttttatggttatattctagaagaagaaagggattttgtagcacctggttttgacctttctgcactgtttgttgagcaaataaaccttatgggctgttagccctctttatagcctctcagcttatccctggctcagacaccctgctgtcattttgacttttcattcccacacacacatacacatgcacacacatgtacacacacacacataccatttaagattagacagaagtaatgctcaaaatggagtggcttctgagacatttagtccaagggttcccaaacaggcttttcagtatcagatttctttctgccccattgaaatgctacacaaccttccgcttacagcaggtcacaagggtttcattctacttgaagtaggggccatgtcccatttccacttccttggcttcccattcagtcactgctaggatttgcctagacccctgaggccagacaatgtagaaacttctgctccatgtcacaggtgaggaaacaggctcagagagggacaggctccgaaagtcacatagacaacagtagggctgcggctcaaaccccagcgtctgactccaggtttagtgccttctcagggcatcagtgacactcctcatggccagggtgcccccagtgttgctcacagtctggtatccagggctgagagtgtgctgtgtgctcagactgcctgggttcagtcctggcactgccactttacagtcagtgacctcaggcaggttacttaagctctgcaggcctcagtttcctccttggtggggagggttatgaggcatccttctcatggtaaaccttcagtaaataccagccgttactaggagggtccactcctgcctctccactctccattcatcctgcctgtttcctctgcctgcttcctctgcctgcttcygtggtggtgaattcttcatggctcccaccgcctcctgctgcacccccactcagggcccgcatcaggacccttcctcctattggtttgaactccttggagtcagagggtaatggrtagtggagtgagccaggtggcagaatctcagaggccatcccgggcctataagcctcttcaaaatagggccacgtatcaagctttacacacaggagtgaactttcacaagttgttatgactcayactctgtctatagtaagctgttaaccactcccatttggcttatgcctctgtaattattgtactaacttatatcttaaaataaggatattgaaggaatgagccgggagaggctttcctggttgagatatagaagaacaagagttgctctttttcttaaggtctctcctcccacccctgaccttagctcaccagcatgggagaatactatttgactccttgtactctgagacgtggatttcaagatatagcattccaacttcaacggcagcaagaaaagaagcaacagaaggagaagacatcatagcaaacagggatgcatgctgcatttcctaatactcaaacccggaaacgagacttcactcaaggtgaagggagggcaggtcaccacctggtagcactagccctaaattaaggaatgcagaatgtttgtgggattgcccatcataaaaattacaaaatgagtaaggaatgcaggcacagctggccaggtgggtttgtcacaaccatggcagccctttgccccacagccagtacacagaactggtctctccaattccgattgcatatcttctggcacctctgttcctctccctcagctgcccaggatttttctggttctgaccatgttacttcctcttttaaacctgttagcatttcacgactgcctacaggcaacggtctaaatggtcggaaggcccaagcttagcatccgagaccctgacctacctccagccacttcctcctcctctccacttcactggactccccatctccacccagacacctctgttctcmcctcygtgtgcctttgcttatgctgtcccctgtgttcctagtgtgtctctggctatcttttaagcttccctccccaacctcattagttctgtggagcccctggaatagagctgacttctccttccctgctgctcccaggctgctcagaactttctggaaagggatgattatctgagttccagcctcaccccagcccccggactctgagtccctcatgtctgcctcccttctttctcyctgaccacacagctggtacatagtcagtacagacgcagtcagtgagtggagcacggggcttctctccaggattcctgcccctttgtttatccctagtctcaggactccctactcctggtcttctgcctaaatctgtgcctcttggaagtgaagcctccgttcccagtggggccaggtcctgacccttgggaacttgcaggatccctcccttgggcctctccccgaagcttccagctcaatgctgaccagagcacaggctgcctgtgacagtccttggggtgacctcccttatcaggaaaaatgcagaaaacctattaataccttagccttgtgattgttaatggtcacaaaactcctttagggtcctttggactcagcacctttatggtctcactttgaattttgaacctcccacctccccccatcccccagagtaaggcaaatggtcttctgattgttcctgcrgagggaaggctccacaggtaagcacacgatggccaggaagcagagctggagcctgcctgaaaggctgtggagaaatggagggagggctgccctgaggactctgtctggctttgaagttttctactgtttccttttcttctgtgcactgttttaggatgatggggtgatagttccaggctggttgaggatggatttggagacagtcctttgtaccctcagtgagcaagagtatctgtcaccctacctcagcagttgtctctgtcactggtccaagcagctggttcctacacaaggtcaagatcaactggggagaagcagactcctgggtctatcccattagtgaggacagctgcctgggcttatggcctcattggtttggtttctatcttgatcatctctaccatccccccatcccggccttccattttctacctcagctgtcagtgcacagattgatgtgtgtgggaacggagcttgggaggagtggggtagggctggtcctgtcctgtagcctccccttccttygggcacttggaccctttggagcttgccggggtggggaatgggagtgggaaggccagggagtgtctctgcaccatcactgtttgagtgttgcccctttgctgtgtgccccacctagtctatgtgtgtctctgttctctggggactcaatttgctggtgaattgcttccatggacattgttctgggaaaygccattttttctgctcacccatgactctgtgacaaggaatgacagcttattaggaatttgtttttgcattggaacagtggtcatcagaatgggccccttttcccttgcagctttgacatttgcctctcttttcctcacctctctcccttgcatccacccttttctctttttcttcttttttgttttccttctagcaggggccttttacctttacttgttaatcctgtttgtagcaaagcaagtggaaggaggagttcctctctgatctgcttcttattctccacctaccttctcttctgtactttccgcctcctagagagagagagagagagaggaatgccgacctaactacygctgccactgctgctgccaccaccgctgccaccaccaccctggtaatgttcacatgtcctcaaatcaacccagagccagggccctgctggtcagggggaggctatgtaaataatcccatgagtgtgccatcctcaggccctggggtctcctaggcaagaccagggcctctgtgggctctctcggaaatgctgaggttgctggaagccagcccgtcatacagggtctgagagtttaacttcttttaaattaaaccacagttgagctcatgctgtgtgtgtataaacttttgtatcctgctttttccttaaattctttatcatcagcatcttcccatgttatttcatagtcttcatcatcatcactttccataccttcatagtagttgatcgtagaattccatcataattaacttgtcttttctctcttagaagtcccttaggtaatgtccaattttccgtgagtgtaagtaataccataatgaacatcttggagtctgaagtttattctgtgttggtttgttccacatttaggatcattttcccaggctagattttcagatgtgggattatgggttcagatatggtttacacatttttatagttcttaatacagatggccaaattgctttctgaaagagaagcttttcttaagtatttttctccaacttgtatcttaaacatcctgaacatgcttagcaccactgtcttgatatatctgcggaaagccacgtctccacttttcagtgtgtcgggccctgggagaggcaggcatcctgcgctggctccttggagctgggtttaaaattgtctcctctggctgggcgcggtggctcacacctgtaatcccagtactttgggaggccgaggtgggcggatcactaggtcaggagatcgagaccatcctggctaacatggtgaaacccygtctctactaaaaatacaaaaaattagccggkcgtggtggcgggcacttgaaaagtcccagctactcgggaggctgaggcaggagaatgatatgaacccgggaggcggagcttgcagtgagccgagatcgygccactgcactccagcctgggcgacagagtgagactccattttaaaaaaacaaacaaacaaaacaaaaaaacaaacaaacaaaaactgtctcttctgtgctcacttcacccagaatccctgttgggctcttcaaggagctcagttctctctgaaagcaactttatagcctcagtccagtctgtgttcctgtgtggcaggggtcaagggtatgctcactcttgagagtggtgtctttggttgaccaagaaccactcccatagcctggtccctaacccttgaaggcccatctctctcactcactggggtgaagagtttaaatctcagatccaagttttgttgagagctctgagctaccatattgctatggttaacaatagttaacaatgttaacaatggttaactatggttaacaatagttaacaatgtttaacaactagagcccagctgggtgtggtggcatgtgctaacagtcccagcttctcaagaggctgaggtgagaagattgctggagtccaggagctcaaggccagcctgggcaacatggcgagaccctgtctcccctgcaaaaaaacaacaacaacaaaagcaaaactagagcccaactgctgtgaactcatggctgagtagatattattagccctccacaaactcagcatttgtataatcccaggctgtttccagtaattctctggggatcatctcccagcctgtccactgttccaggatccacacttaggcctataggaatgccccgtcagagcttctgctgccgctgatctgttactgtttcatgcarcccactcggcctagttccttcctcttactgtctcagtgggcacagaaaagcatacagagggtgtttcagcaaacattgccactggctgcagacctgcccccggatctgtcctgttgagagcttagtgctgcgttcttgcatggtggggaggggtgtggctctgtgatgagccagggcatgtgtataggagcaacagtgtctctcttatcacgtagaagttctgactcattgcgagtcttggctttgggttaatggttccagccatgttgctgctgtgtcttktggtgcaggagaggctgggcacagttggtccctaagccattatggataagggatgtgtctgctgatatacacacatggacctgacatccagggaaggcagggtgattggacagaacagttcttccagaagctgttggracttggacaagagtggcccttggctttctgtagttggtcatctgtcccctgttgcaatcaggggaaggccacacttgccttccttaaccacagttaggattttcttggggattagaccagattctagcacctgtcctgaacctctcgccccgcccctacaaaggctgcttgcaagtgtagtgcacatacacagggagcaggtggggcatggaagtggaagtggagcccctgcctttggcccttgggggaggcactgtctgcttacccacggttgttgcctcataggaatcatacaacagcttcctaactggtctccttgccttcagttggattggggcacaaatccctccttgacatataaaccatggtttaaggctccctgtggcctaaataaagataaagcttaagtatcttaacaagcacctaacccttctccccagcctcggtgatttggctcatcgctgccttcatgtttcattctggcttcactcattcggaatttcttgtagttccttggctgttctyttttccttaccgcctttacaaatgctctcaccatgcatgcttttctctgctcctacagatgccttctctcccagcaccgcctccagagtctatgtctggtcgattctgtctgctgtctccagtccccatcttgtggcagtctctgctcaatcatttggggattttatatgttttctggcctttcttttgggggcctgtcttctccttctaaaagcagccagttgacctagaaggaagggataactgtaactcttgtctaccaacataagattaggcccaccctttaaaagctgcgtctttgaaagggacacctgcacccagcatgctggcttctcttcaccaagcgtgacttcctacgcatttcacaggcctccagaggtccccctgactctcttctgctgtgagaaactctaatcatgtaagccacaggctaattcccttgagccttaaatgtttttagtaatttcccattcatcagagaagcaggatttgggaggaattttgaagcaaacactacagaaggcagagtctccaggtaggatatctaagagacatttggaatggtctgactgttcaagatggatgggaaagcctcttcctgtaatgatagtagccaacatttgttgtcaggcagtggggccccayttttgagatggggtctctgtcacccaggttggagtgcggtggtgctgtcatggctcactgcaacctcagcctccccgggctgggtcttcttaattctgaaaaacccagcttttaaagggtggacctaatcttatgttggtagacaatgttgtctcatttaatacaatgcacatgctctccccataacacaaaagagggaactgaggcctggaggtgtgatgtaccccaagtcacatagctaataaataaagaagccagcattcctgggattaaaaatgcatgtgtctgtcactgtggtgtatttggtgcttgatcaatgtttacttgagcaaatggaggggcagaggtaccgatgagtgtgctcagtgaggagggcaggagtgaagctgggcgtcttcccgcctcttgtgagtggtggggcttggtgagcttgccagggcctgtctttcttatcaaagaaggtgtgtgccccagtgttacagcatttcacccaaagcagcctagaaaatgcttgacttttctgtcattccggggaggacactttcctcctccactgttctgctggcctggtgtacccacggcccctgatagrtgatagcacctgctaaagtgcaccatgcccttccgtctcactgcatcccacagatgaggccaggctgggatgagggagaaagggagggatatatagttcaggttattttggaaaactgcctgaccaattttaagtctgggccggacactggggcatctcaccacgttgaaagggccgtggcaccccgggcggtgaaaggggctggaaccaggtctgcttcttgggcttctcctccagggtgccattgctcatgggccttggctgcagaggtgctcattcgtggttccaaaattccaattcctgggagaggaaaaatgcttagttcagtctcagttaggcctctgcttakatcaaacagccaaggccagtaggcccagtcctatggtagagacatggcctcaaagagccctctgcygcagttgttggggagtgtaccaagagaagggagcattgtcctgggctgggcagccctgggggtytagtgcatagatgtagaaaggctctgttggtatacctccctttgcttgttggaaagtgctcaacggggctgaattgtgtttgacagtgtaagtctgggytggggtgagggttgttacaagattgtcaagatgattaaatgaaatgccatttgaaamacttatccatgccttgtgtacggtatccccaccagtgaatattcacagtatattataataattccaacaacttcataattttcatatgcaatttctaaactttgaacttttttttttttttttttttttttgagacagtgtctcgctctgttgcccaggctggagtgcagtggcgcaatcttggctcactgcaacctccacctcccggcttcaagtgattctcctgcctcagcctcctgagtagctaggaatccaggcgcccgccaccacaccsagctaatttttgtatttttagtagagacgggctttcgccatgttggccaggctggtctcaaactcctgacctgaggtgatccaccgccttggccttccaaagtgctaggattacatacgygagccactgtgcccggcaattttttgtgtttttagtagagatggggtttcaccatgttggccaggctggtctcgaactcctgacctcaagtgatctgcccgcctcagcctccctaatgctgggattacaggtgtgagccaccacgcccagcctaaactttgaatttctttgaacccatgacttacacagaattagctgaacgcagaattccaaatcaactcagcctgtgggacagccaaaaaacacagtgtgcctttgggctccttcactcaccacgcggggttagaaaactttgtcagaggctttaaaaaaggagctcttgtgtgtaaaatgtttccttgattctctttctggtgcctctctttctctaagtggtttgcttccccragttccccacctgagtctgggtggctgtggcacatctgtgcattctgtacgcacacaggcagccttttggagtgccagtttccaggtcttggttttatttatttatttatttatttttttgagatgggggtctcactctgccgcccaggctggagtgcagtggtgccgtcatggctcactgcaacctcaacctccctgggatcagttgagcctcctacctcagcctccagagtactagggaccaccatgcctggcwaatttttgtaattttttgtagaggcagagtctcaccatgttgctcaggctggtctcgagctcctagactcaagtgatctgcccaccttggcctcccaagtgttaggattacaggtgtgagccaccatgcccagcccaggtcatcttttgagggcatgkagagaagactttgagcatcccacttttgagattgtgtaccagtcgcaagcccctrtgacacactttttccccaaagtagagggctctgactatgttgatcccaagagagatgggaaagagcattgaatgaggattccaaagtattgggccttagttcgtttcctcatgttggtgttgtgaagattctkgttaggataacagcatgtgtgcaggaggctttgtgaactgctgagagtgaggcgtggcaatgtcagtgctaggtttgtccttactaacctggggccatgggaattgataagaccagattcccaactctaccccacaatgtgatccctgtggtgacccctcacagggctctttggtcgagcttcccagaagggatcaccatctgccattgtatgttgaaccccattcattcattcattcattcagccaaccagcaactatttgttgagctcttattgtgtgagaagcagtcttcaaggaactgggtgaataaaaaaaacaaaacatcctaaccttcattgagcttacattcttactgaaagaaaacaaataaaacatacatgtaatcctagcactttgggaggccaaggcaggcggatcacttgaggtcaggaatttgaaaccagcctggccaaygtgaaacccatctctactgaaaattaaaaaaaaaaaaaaaaaaagccgggcatggtggcacatgcctgtaatcccagctactcgcgagrctaaggcaggagaatcgcttgaatcctggaggcagaggttgcagtgagccaagatcataccattatactccagcctcagtgatgaagcaagactccatctcaaaaataaaaaataaaaataaaaatatgcattccctttgcaccagcacacttggtgcctggggacctcgtggttggcaccctgaagcaggtgtccctcttctgtcttgcacaccttgcttctgtcctggtgtgtatggcatggccttctgccctccatggtgagcactgtgagggcagaggttgagttgggtttgctgtatttctcaggtgcctaggtttgtgcttgacaggtagatggaaggcacacaatgtggtcatcaaacctcagtcaaccatataaggaaggtagaagtgaaaagtcccataggtacccaactaatgtcaccagtttcctggatacctttcctggagtttatttatagtgtgtataaataaatgatgtatgtgtttaaatgcctttttcacctttccttttagagctgcctctttttaacagttccattccattgtatggatgtactatgatttattgaaccagttccctactgattattctgttttttgcagtcttttgttatgatgaacattccacagtgacaatgttgttcatagtcattcacacacatgcaagtccttctgcaggatatatttctagaggggaattgctgactcagaggttttggtactctgtgttgattgtagagtgacggcagaaaagtgaggcccaagagyttcctagtgaccatgtgtagtggacaagtcaccagtccctgtgagtgtttggcccaaaggctttaaggcatttgatatcactgtttttgtttctgcaccaggcgggagacactatattcaatcgtgctaagctcctcaatgttggctttcaagaagccttgaaggactatgactacacctgctttgtgtttagtgacgtggacctcatyccaatgaatgaycrtaatgcgtacaggtgtttttcacagccacggcacatttccgttgcaatggataagtttggattcaggtaagagatactcagtcagaatctgtggtaaacatgtctctctcatgtgttgactasgaaatgcagtcctggcagctcaagagtgcctctttaagctctggagcagaatgcctcctctgagaaatgggtgctttgtattagttgagatggaaagargagaccagaaatgcctgtagtctctgcacatccagacaaaaacaaatttyccccccyyttttttttttgtttgttttttgagacagggtctggctctgtcacccaggctggagtgcagtgccgtgatcttggctcaccgcaacctctgcctcccgggttcatgccatcctgtcacctcagcctcctgagtagctgggactacaaacacttgccaccatgcgcagctaatttttgtatattttgtagagatggggttttgctgtattgcccagtctggtctcgaactcctgagctcaagcaatccatctgccttggcctctcgaagtgctggattataggcatgtggcaccatgcctggcctaagaacagtttttagcatttgggaggggctctcatctttaagctccaaatgatactgtattttcttgcttttttctttctcytgccccacaagttttggaaagtaaattggaatagttttcccccactgaattatttagcttgtatacctcagcagatgttccttggcctgttttgttttgtttttgagacagggtcttgctctgtcacccaggctggagtgcagtgacacaatcatggctcactgcagccttgactgcctgggctcaatccatcctgcagcctcagcctcctgagtagttgggactacaggcatgwgccagcatgtccagctaattttttatttttagtggagatgaggtctggctatgttgcccaagctgggcttgaactcttgggctcaagtgatcctctcacctcagccttccaaagcattgggattacaggtgtgaaccactgctcccgcccttggccctataagaaggaatgtgattctgttttccagcagggcacaaacttctgcttaaatacaaagcccaaatttttccaccaaaatgcccctagtgaagtggccagcccagatgcccgactagcgtattatccaaagcatattgtcattggtggaaaatggccttatagtccattgttttgtcttaaaagtaaatatataaataaacttgtatattgtttcctaattccgtgtttatattaacataaaagtgttttaaattacctgtcagtggccaggtgcagtggctcgtgcctgtaatcgcagcactttgggaggccgaggcgggcagatcacctgaggtcaggagttcgagaccagcctgaccagcatggtgaaaccctgtctctactaaaaatacaaaaattagccaggtgtggtggcaggtgcctgtaatcccagctactcgggaagctgaggcaggagaattgcttgaacccgggaggcagaggttgcagtgagttgagatcgcgccattgaacttcaacctgggcaaacagagcaagactctgtctcagagaaagaaaaaaaaaaacctatcagttgaataacaaaaccctttccttccttgctttaagtgaatctgaagatccaggagctgtgctgcaggtaccctctatgttgggtacccctggtttaggctgactagtacagtgtggttggctcatgtagacagcagaccctttattttagatacaactttttttytttttcttttattttttttgagacagagtcttgcttgtcacccagcctggagtgcagtggcgtgatcatggctcactatagccttaractccctggctcaagtgatcctctcacctcggctttcctagtagctgggaccacaggtgtgggccagcacccctggctgatttaaaaaaaaaaaaatttttttttttagagatgtctcactatgttacccaggctggtcttgaactcctgggggctcaagcaatcctcctgctttgacctcccaaagtrctgggatgacaggcatgaactastgcacctgctgagatgcaacagctttctgtcagactcattttattctcatcatttcttcctgtcctcccttgctgggagcatgagagctgtgatgggaatataggaatgtatgaagtccttctcccagatcaaaaatcctaacttcttgtcttaaagggaggaaaatttgaatgtaaccttacttttagactcttcagaaatccttctatacccttccgtccccgctttcacccttcctccctctccgtgtgtgtatcttcttctcttgaaacacrsaggtttataccctgacccctcttgattcatcccttgaagcacagtggtgaacaaggaaggggcccgtgatgccctaattctttgccacagcaccatgtttgtttcacaaggagcctggcaggtttgggcttggggcagatagggragagaaagcagcagagacagcaaaaccaaatcatgtcagcttggcatgtacttccctctgaaatagctaagaatccatttctgtaaaagcactgattatcagaaaaccttattggcctggccacctttggttcaaaccctcacattaataatgtggacagtagtatgaggtgtgccaaaggtggatgactcggcacctaagtgatgacacctaattacgaataggttcattaaagcagaccccctggggacctttgcttgaggatccttacagtcagaattcctgaatatatttgaaaataataattgcatctttattttcatatgttctgtatggtttggctgacttccccctcaaagtctgagttagagttttccttaatttatgtgatgggtttggtctttttggattccagaaagagctgggtgtggtttggagctrcactcagagtcacacaaaaccacagcctttagagaacccacaggaaggctttggggcacgtcctgattcttgacatttctcatcagtgctgactttgtatcccttaggagttcacaattcataaccactgaaatattaaaatacaaaaagttttggaaggatgagagcccagatgctctactacttgaaaatatgttaaaacataagttcatcattatacattttgctaaatcaggataaagtctgaagtttcaaagaagttttattttagcaaattttcagaaacactgcctcaactgttagggccagtgttctagtcagtatgcctttggaagcatgaaagctggattggtcgataggatgggtgtggaaggggggctgtgactgggtgggtacagagaggctctgaaacaatctcagattccaggagttcctggataaggacttcatgtgcgggaacagagcacaggagaagcagattcctgagccactcaggaagaactgggcctaggcctgctcttgtcactgactggctttctacataaccacagaaacagcactgtgttgtagaaagaggaagatcatactttttgatatctgtgtctaatttaaggtcatctgagccctgatagaaaagcaaaacagacaaaacccttgtaactgctccctcccaccccacccaccatcaaaaaagctttagagaggctggacatggtggctcttgcctgtgatcccagcactttgggaggctaaggtgggtggatcacctgaggtcaggagttcgagaccagcctgaccaatatggtgaaaccccatctgtactaaaaatacaaaaattagccaggtgtggtggcacacgcctgtagtcccagctacttgggaggctgagacaggagaattacttgaaaacctgggaggcggaggttgcagtgagccgagatcacgccattgtactccagcctgggctacagagcgagactccttcaaaaaaaaaaaaaaaaaaagatccggtttggtgtcttacaactgtaatcccagcactttgggaggccgaggccggtggatcacgaggttaagagatcaagaccatcctgaccaacatggtgaaaccctgtctctactaaaaattagctgggcgtggtggcaggcgcctgtagtcccagctcctcaggaggctgaggcagaagaatcgcttgaacccgggaggcggaagttgcagtgagcctagatcgcgcccctgcactccagcctggcaacagagcaagactacgtctcaaaaaaaaataaataaaaactctagagaagcaaaaagaataactttaaaagtgtttatgttctcagcaagctttattttggggatgtcagaacttaactaaccactgctccttctgtgtgtatgtttttcctccagcctaccttatgttcagtattttggaggtgtctctgctctaagtaaacaacagtttctaaccatcaatggatttcctaataattattggggctggggaggagaagatgatgacatttttaacaggtaatggtcataacttagatatctttctcctctgtcaaccttcacttccagttttttaaccaatgcttggttgttccccaaggactgaccctcagatgggatgcacccctagtcagcccacattcttaggtgtggcttcctacaggtcctgcaggtgctaaaagggatctgtaggaaaatgagtttctgagatttttgtattggcctggaaaaatgtcaaatgggaaccaagtgacggggcaagtttactttgacttgctgcatgccgttttgtactcaaggagtaaaccaatgtcctttgtaaaaatccctcctttcattatggtcccctttcactgtgaaacaagtttccttgagcagaatcctaactgtcttcacagaagctttgtgttatatttttattttggagtattttcacatatacaaaagagayactgtagtataataaacctttgaggacctatccagycccagcaaccattatggcmtggtcagttctgtcccatccacatcctggggctctttttaagctggtaaatcattatgatgtgggttgtcatttacagtggtaaaaaacatctatcagtagcatttgaaagaacattctgctcagtcctctggctgtagaggcttcaaccccaccagccaccgatgagcaccttctccctccaggagccagtctgagctcattactgagtttaatatcagaatacaccctggtgcagcctttctaaattgcagtaccagttaacagaaggtgtctgtcagagcaacacccaagtcattcaagttaccattgtgtgcaaacttaacagagacccamgtcttcaatataagccttgaaggaaactccagttttagtatgtagatggggtatcaagtgtgtgcacattgaacatctgctgcatacagagcactgtgccaggcaggcccaggacactgaaaacctggacatagggtccagacagaagcaagcctgcttccacagaggcactcctgggcagacactctggactgatatgacagtgtgcagggccgacaggataccacaggtctgaatggtcagaacagctggggagggagggagcatccgcaggcatctagtcccatgctaacgcagtggcactagaaggatgggtggtgtgtggagcaactttcttgaaagataaaggacctaacactttctatgcaccacttactgtgtgccaggcaaggccaggaatgtttaagtggtctgggatcagccagttctgcctcttaactaactttgctgtcctgctctccaggctttcattttggtcctcattccttttccttggaccaacacagaatcctccaccctgttctggctgcctctagtcttgttctcagccctccatttgtttttttctgccttttcccacatgttctgaagccctccattcgtatactactttccagagagacttccccatggctaaaagcattttggaaatactgtatattaggcccctttcagatactggcaaccgtttgtgggatgctctgagaaggcctctgtgacttagcctggcccttttcagcccatcacctgccacgtcctaccccagacccttgtcaccagtccccaggagcttacgttgctccctgagggcactaggcttgctctcacttccatgcctttgcctgtgccatcctggctgcccaaaatgctatggcagatacctgttcatcctcaactgggctctgcctaggcttgctccagcagaggttacaaactctatgcttcttcctctgtgtctccaacctcatcttcctcttctcacctccatcctggccctaaaggccctatgtttgaagcattcacactgtatattctgtggggcacacggccccagtgtctggcacatggtagtcaacaccacaaaccgcagaaccagttgtaaaaggacatggagtcggaatgtgagttttaaccagggtcatgctgggctgggttctggcatgatgctgggttgtgggctgagtgagaacagcaagggtgatggtggatggagcaacagtcttgcagccggggctctcaggccaagtgtatggcagctctgtgataatgactttccctttactctttgcagattagtttttagaggcatgtctatatctcgcccaaatgctgtggtcgggaggtgtcgcatgatccgccactcaagagacaagaaaaatgaacccaatcctcagaggtgcattctttgtttattcatactccttccccctttaggatgaggtaggctgcaggtccgaggctctgggcctagagggaaattgaggtggtcaggttacagtggagagggaggaggaagtacgtgtgatgatttcttcttaagatttttgttttaagacaatctccttgtgctcttttccttgtaggtttgaccgaattgcacacacaaaggagacaatgctctctgatggtttgaactcactcacctaccaggtgctggatgtacagagatacccattgtatacccaaatcacagtggacatcgggacaccgagctagcgttttggtacacggataagagacctgaaattagccagggacctctgctgtgtgtctctgccaatctgctgggctggtccctctcatttttaccagtctgagtgacaggtccccttcgctcatcattcaratggctttccagatgaccaggacgagtgggatattttgcccccaacttggctcggcatgtgaattcttagctctgcaaggtgtttatgcctttgcgggtttcttgatgtgttcgcagtgtcacccaagagtcagaactgtacacatcccaaaatttggtggccgtggaacacattcccggtgatagaattgcyaaattgtygtgaaataggttagaatttttctttaaattatggttttcttattcgtgaaaattcggagagtgctgctaaaattggattggtgtgatctttttggtagttgtaatttaacagaaaaacacaaaatttcaaccattcttaatgttacgtcctccccccacccccttctttcagtggtatgcaaccactgcaatcactgtgcatatgtcttttcttagcaaaaggattttaaaacttgagccctggaccttttgtcctatgtgtgtggattccagggcaactctagcatcagagcaaaagccttgggtttctcgcattcagtggcctatctccagattgtctgatttctgaatgtaaagttgttgtgtttttttttaaatagtagtttgtagtattttaaagaaagaacagatcgagttctaattatgatctagcttgattttgtgttgatccaaatttgcatagctgtttaatgttaagtcatgacaatttatttttcttggcatgctatgtaaacttgaatttcctatgtatttttattgtggtgttttaaatatggggaggggtattgagcattttttagggagaaaaataaatatatgctgtagtggccacaaataggcctatgatttagctggcaggccaggttttctcaagagcaaaatcaccctctggccccttggcaggtaaggcctcccggtcagcattatcctgccagacctcggggaggatacctgggagacagaagcctctgcacctactgtgcagaactctccacttccccaaccctccccaggtgggcagggcggagggagcctcagcctccttagactgacccctcaggcccctaggctggggggttgtaaataacagcagtcaggttgtttaccagccctttgcacctccccaggcagagggagcctctgttctggtgggggccacctccctcagaggctctgctagccacactccgtggcccaccctttgttaccagttcttcctccttcctcttttcccctgcctttctcattccttccttcgtctccctttttgttcctttgcctcttgcctgtcccctaaaacttgactgtggcactcagggtcaaacagactatccattccccagcatgaatgtgccttttaattagtgatctagaaagaagttcagccgaacccacaccccaactccctcccaagaacttcggtgcctaaagcctcctgttccacctcaggttttcacaggtgctcccaccccagttgaggctcccacccacagggctgtctgtcacaaacccacctctgttgggagctattgagccacctgggatgagatgacacaaggcactcctaccactgagcgcctttgccaggtccagcctgggctcaggttccaagactcagctgcctaatcccagggttgagccttgtgctcgtggcggaccccaaaccactgccctcctgggtaccagccctcagtgtggaggctgagctggtgcctggccccagtcttatctgtgcctttactgctttgcgcatctcagatgctaacttggttctttttccagaagcctttgtattggttaaaaattattttccattgcagaagcagctggactatgcaaaaagtatttctctgtcagttccccactctataccaaggatattattaaaactagaaatgactgcattgakagggagttgtgggaaataagaagaatgaaagcctctctttctgtccgcagatcctgacttttccaaagtgccttaaaagaaatcagacaaatgccctgagtggtaacttctgtgttattttactcttaaaaccaaactctaccttttcttgttgtttktttttgtttttttttttttttttkggktaccttctcattcatgtcaagtatgtggttcattcttagaaccaagggaaatactgctccccccatttgctgacgtagtgctctcatgggctcacctgggcccaaggcacagccagggcacagttaggcctggatgtttgcctggtccgtgagatgccgcgggtcctgtttccttactggggatttcagggctgggggttcagggagcatttccttttcctgggagttatgaccgcgaagttgtcatgtgccgtgcccttttctgtttctgtgtatcctattgctggtgactctgtgtgaamtggcctttgggaaagatcagagagggcagaggtggcacaggacagtaaaggagatgctgtgctggccttcagcctggacagggtctctgctgactgccaggggcrggggctctgcatagccaggatgacggctttcatgtcccagagacctgttgtgctgtgtattttgatttcctgtgtatgcaaatgtgtgtatttaccattgtgtagggggctgtgtctgatcttggtgttcaaaacagaactgtatktttgcctttaaaattaaataatataacgtgaataaatgaccctatctttgtaactgcaggtggtttctgtttgccaggtgtaagggttgtcatggctgtgggatggggtggggacagggtcattccctggtctgtgacccatacaaatacacatgcctccctggaatcagacatttccccatctgaacttcattctcttatctgtaaaatgggaataataacacatagggacttttttgaggcttaaaagtgacgatatatgtaaaacaatgactaatgcctcacaagtactcactacatagtagctagtgccatttcaaagtagaatttttttcccctagcagttcttgggccacattctgctattttcaacagataccaggatcattcagatgtagatctcagggccatttgcaccaggtgctcacagtgtaacttgaagggaattatccaaaatgaggtttcttgtcagtctcaggaaatgtaaccataagctctaaaaggtcttagtttttacccaggtgcctcctccttggtggccctgggtcaggctggttggattgaattggcactcctgaagaagggctgcaggaaaccagtgagcaggagagccacccttggcagggagctgcaggccctgcctgcatgtcactgctggagggatccctggtgacctcaggcctgtgcaaaggtggcctggggttcagatctggccttcaaacaggacaactctggtcctttggacaaaatgctgccttagagggtctgacaaaattaaaaacaaacaaaaaaaaacctgtttctttccttctcacacaccaccactcacaacacttcagttctgcccctagatatgtagggatttctccccaccaacaagcagttttctagtggacactagctgggtgtcctacagtttaactcaattctgacactgtctgcctggagatagcaacggatcccacaggttgagggctcagtctcacaagactgcctccactgcagatgccagtcacaagtagttggttgtgacctatgctttacaaaaatgttttttggatacagggccttgctgtgtcacccaggctggcctgaaactcctgggctcacacaatcctcccgccacaacttagaagtagctgagctgcaggtttataccactcacccagctatagttgtgacctatacttctgaccaaccagctataaattggggtttctatgagcctcttcttgggtttaatttgctaggtcagcttacagaactcagtgtaacacttaacatttactggtcttattataagtgatattagaaaggataccgatgaagaaccggatggagagatgcatagggcaaggcatgggggagggggagagaagcttccatgccctctccaggggctccaccctccagacacctccacgtgttcagctatctggaagctcatctgaccctgtccttctggtttttatggaagcttcatcacataggcctgatagactacatcatcggccattgccagtcagctcaaccttcagcccttttccccttcctgaaggatgggagtgggactgaaagtgccaaccttctcatcatggcttggtctttctggtgaccagtccccatccaggagttcactgagaatcatttcattaaaacaaaagacgttcctatcacccgggaaattccaagggattagaagctctgtcaggaaccagggtcaagcaccaaatattagaacaaaagattctcctagcataaatattagaacaaaagattctcctagcataaatattagaacaaaaaattctcctattgctcaggaaattataagagttttaggggctctgtaccaggaacccagcgcagaggccaaatatatatattttattatctcacagtgccacacaggactttgcaagctgtcaggtctgagtgagatggagcacaccagtgaaaggttaagttcaccctttcactgatgtgctccacttcactgagacacatatccacacagacacacagagacacacacatccacccagacgcacgcatccacccacacacctccacacatgcctacacactaacatgcataacacagctgacatatgcctatgagaggtcagaatacctggattcaaatcctgccactgcctcttattctgtgaccatgagcaaatgacttggcctctctgtgcctcagtttctcacaaaatgcctttcagaattttttttttttttttttagagacagagtttcaatatgttgaccaggctggtctcaaactcccggcttcaagcaatcctcttgcctcagtctcccaaagtgctgggattgcaggtgtgagccactgcacctggcccctaatttttctattatttgtttgttttttagagacagggatctcactatgttgcccaggctggattcaaactcctgggcttaagtaatcctgcctcagtttctggttctgtgtaatgggagttataacagaacctatttcatagggctgttatgaagattaagtgagttaataccatacttatgaagcacttagaacatgcctggctcataataagcacgacaagtgttatgcttgtttaattgtttgaaattcacgtgggcatatgtgttgacatatacagactgccatgtacatattgcacagatatacatatgcacacactcaggtgctggggatcttcccttttcctcttctggggcacacgtcttgaactttgctatgtggcagctgggtgagtaaacctcagggcgagtgactgctgctattctggagacacccaggacctcaccaacagtgtttcccccacccttccactccccacctgagtgaaggtgtttaggatggcagccttggggagggaaagaggtttaaccccctccccatgggctccaagggaccagggagggaggaaggaggaagagggccaaggacaggctcctaggctcagccatttcctcgagaaatgctctgtttctagtctcatacaggacccagaacaaccaagtctgagccaagcagagccccttaatcatgagagtaatcaccagatcccccacataccacctcttttccatgggagaacgtggcccaggtgccaaatcactggcctacagctgttctttggaggcagggccaaggggcccaaggaggcggctgcccctgggggtgaatgagtggcgcctccctgggcgagacatgtttgctgctctcgactgaggccagctgtgtgggggtggggggagaggggagggaatgaggatgatcacattgaccacattctgaaggttaccaagtttctgccacatatccaggctccttccctcttgtttcttccaggaggtgggatttcagacattcctaagggctggtttcttcttagaactggaacttcttaccatgccagaaaggaaatgaggtttgtctggctgagccggtcatggcaggcaagcctcatttccgtctttggcagtgtccccaggcagggaatgtggctactgcctttttctgggcttcaggacctgtacccaggctgtgaggcagaggaaccccaggtgcagaggaggttgttatgagtgacagggtcaatagactggaaaccagaggaacatgacaccccaaggacatttgccctgcagcgagatgtgttccagggtcaccaagagtagagacagggcacaatgatatcacggtgtatttggggagagtgagtgccaggtcaccaggcagggagcctggaaagacaagccaggaggaagccatacaatgaccattacgtgtggctgtctctgactccccacttgctgtgtgatgctgggcaagttggttcccctctctgtgtctctgtgtcttctgtaggaagtgccctgctgttgacttttcctcttgccctgcgactaaccttctctgtcttcttgagggaagtccatttatttctgggtcatcatttgtaaaagcagcaggatcaccccttcctgctctcctccctccctgcctccctcccagggcttcctggagcatcacggggtaagctattaaagttctacctggtgagggagggctggcatggcgttggagacatctccctcttgtgcccaatgccatccacgctccattgctgtccctcagaagtgcttctttgtctccatccttcctctcacctgctcttccttaacttccaaaactcaggcttcctgatcatcccctaccaagctcagcagggtcaagagtacccaggggcctgagggagaagcacagggatgcggacagggtggctgtacctctgctcagctcccaggagtaagaaatagggttaagaggagcgtgggagcaaactccctacccaggcttctttcagctgggccatctgtcctttgacaaagggatctaggatttcctgaccttaagaaggctcccttaagtggaaatgcagataaaaatcacaaagagatacaccaatttggatggttattattttaaaaaccagaaacacaaaataagtgttggcaaagatatgcagaaattggatctgatgttagtcattgttgattcagggtaaaagaaaagaagaaattggaatacttgtgcattgctggtaggaatgtaaaatggtggaacccctatggaaaatggtatggaaattcctccaaaaattaaacatggaattaccatagaatgcaacaagtccatttttagctatatacccaaaagaaataaaaacaggagcctgagcagatactagttcctagcactattattcacagtagccaaaaaaaaaaaaaaaaaaaaaacccacgagtccattgatggataaacaaaaggcggtatatacatacaatggaatatcggtcagccttaaaaggggaggaaattctgacatatactacaactcagatgaaccttgaagatattatgctaaccgaaataagtcagtcacaaaaggacaaatatcatatgattgcacttagacgagtcagctaaaatagtcaaactcacagagacagaaggcagaatggtggttgtcaggggcatggggaagggaaggggaatggggagttattgtttaatgagtacagagttttagttggggaagatgaaaaagttctggaaatggatggtggtggtgcaacaatatgaatgtactttatgccacagaactttacattggcactctgcccccgatgactgacttttcagttgctacctgttcccatttaaaaatggttaaaatgggccggcttggtggctcatgtctgtaatcctagcactttgggaggctgaggcgggaggatcacctgaggttgggagttctcgagaccagcctgaccaacatggagaaaccctgtctctactaaaaatacaaaattagccaggcgtggtggtgcatgcctgtaatcccagctactagggaggctgaggcaggagaatctcttgaacctggaaggcggaggttgtggtgagccgagattgggccattgcattccagcctgggcaacaagagtgaaactccatctcaaaataaataaataaataaggttaaaatgtggaggccgggcgcagtgagtggctcacgccagtaatcccagcactttgggaggccaaggtgggcggatcacttgaggtcaggagtttgagaccagcctggccaacacagtgaaaccccgtctctactaaaaatacaaaaattagctgggcgtggtggcacatgcctgtaatcccaggcactcaggaggctgaggcaggagaattgtttgaacccaagaggtggaagttgcagttcatttacttagcacgtcactgcactccagcctgggcaacagagtgagactgtctcaaaaaaaaaaaaaaaggtaaaatgatgcattttctgttatgtgtattttaccacagtatgaaaaaataagaagactcctgtggtgaaggcttcgcctggtctgttctgctctggaggtggcagcgcatggtggttagtcccagcatcttcctggagatttgagcgtgagacgtgctggctgtgtgggctgtgccacct

SEQ ID NO: 94590 - DNA, 125246 bp, Homo sapiens
ctgagattataggcctgagccaccatgccaagcctttttttttttttttttttaatttttaaatttttaaatagctgggactcctggagcagtacccccaagacctcatggatacgaagggtttccaattaattccaaaatttcacatatggtccaatttcatcatagtgcctaagaagttcatctgaatttatgccatattatccatagccagaattcagagcaattctggaatcagacaatttgacacctgtaaactgttcaagtctagggtctacatcaacaccccccaacttttttgagatggggtctcgctgggctccccaggctggtctagaactcctgggtcccggctaggactacaggcatgtgccatcatgctcagccccatgaacaacttctatatgtatagctctgcgtaaaaagaccattgtcaactgcacatatataagtttatttatttatttatttatttttgagacagagtctcactctgtcactcaggctggagtgcagtggtgaactcggctcactgcaacctccacctcccaggttccagcgattctctgcctcagcctcccaagtagctgagactacagatgtgtgccaccgcgcctggataatttttttattttttggtagagatggggtttcaccacgttggccaggttggtctcgaactcttgacctcaggtgatccacccaccttggcctcccaaagtgctaggattacaggtgtgagccaccgtgcctggcccctttattcatttcaagggctatggttcccgaaatgtcaccaagtttgttacattactgtccactttcttcatcctcttctctttttcttttcttctctttgcttttttcttcttatttttaagtcttctttcttttagactttacataagaatattctgatgaatgccagttgtggtggctcatgcctgtaatcccagcactttgggaggccgaggcaggccgaccacaaggttaggagttcgagaccagcctggccaacatggtgaaactccatctctactaaaaatacaaacagtagctgggcatggtggcgggtgcctataatcccagctactcgggaggctgaggcaagagaattgtttgaacccgggaggcggatgttacagtgagctgagactgcgccattgcactccagcctgggcagcagagtgagactctgtctcaaaaaaaaaagaaaagtattctgatgagacttctgaataagaggtggaagctggctcaggacaaaatatttgtgctagagcagaacgggcaggggaggaacaaaagtggaggcaggccaggtgcggtggctcacgcctgtaatcccagcactttgggaggctgagacgggcggatcacctgaagtcaggagtttgagaccagcctgaccaacatggagaaaccccgtctctactaaaaatatgaaaaaattagctgggcgtggtgacgcatgcctgtaatcccagctactcgggaggctgaggcagaagaatcgcttgaacctgggaggcggagatcgggacattgcactccagcctgggcaacaagagcaaaactcaaaaaaaaaaaaaaaaagggggaggcaaaggaaaaaactccctgaaagctcatacaatggcagggagtgaatgtgtctctcaggaatctcttgcctttttcacccaaacattaagccctcctcaatctgcttttggcttccattatagcctttgtttgggtttattcaggaaaactaactgttttgaaaaagcactataactgtgcttcctctggtctcacaccacactacaacaatcaacacagaagatttccatgatctggctgggcgtggtggctcatgcctgtaatcccaacacttttggaggccagggtgggcggatcacttgaggtcaggagtttgagaccagcctggccaacatggggaaactccatctctactaaaaaaaaaaaatacaaaaattagtgcgtgtggtggcatatgcctgtagtccctgctactctggaggctgaggcaggagaattgcttgaaactgtgaggtcgaggtcacagtgagcygagatcgcaccactacactccagcctgggcaacagaccaaggctctgtctcaatggaaaaacagaaagaagaagatgacttccatgatcccgaaatatatggggatttctccccaccaacaagcaagcagtcggttctgaggcagacaccagctgggtgcactccacttcaattctgacactctatctagggataccgccagatcccaagggttgagggctcagtccccaagacatcagttgcaattctaggcctccagaacttctgacggatcagcttcaagctggggtttccatgatcccttctttgggtttgattaatttgatagaatagctcacagaactcagggaaacacttatgtctactgattttttataaaggatattacaagtaacacagatgaagagatgcgcagggcgaggtaggtatgggagaaggggtgaggaccttccatggcctctccccatgtgccactttgtgtgtattcagctatccagaagctctctgaaacctgtcctcttgggtttttgtgtgtgtgttatttttgttttttttttgagaccgagtcttcctctgttgcccaggctggagtgcagtggcatgatcttggctcactgcaacctccacctcccggattcaagtgattctcctgactcagcctcttgagtagctgggactacaggtgcccgccaccacgcccggctaattttttgtatttttagtagagatggggtttcacggtgttagccaggatggtctcgatctcctgaccttgtgatccgcccgccttggcctcccaaagtgttgggattacaggcgtgagccaccgcgcccggccaatttttgtatttttagtagagatgggatttcaccctgttggccaggctggtctcaaactcctgacgtcaagtgatccgccagccttggcctcccaaagtgctgggattacaggcatgagccaccacgtccggctcttgggtttttatagaggctttattaggaaggcatgattgattcagcattgatcattgaccctctgccctactgagaagttgagggtggggctgaaagtctcaactcccattatgtctttgtctttccagtgaccagccctattctgaagctgttagtcacattagcatacaaaaaggcaggagtctggagattcccaagactttaggagttgcaggccaggaaatgggatgaataccagatatgtatttcacaacatcacacacacaaataaacaaaaaacactcaatgcatttcaagcagaggagaattaaatgtcaggaatgggtgcatacaaaaccactggaagaactggaagagcaaaaaccagggaataccaacgctatcttcaggtcaaccactgaagctctagtctagtacacagaaattcctgctggggaactgcaggacattcccattggtggatacagcttcycagctacctcaagatggggtgctggtaaggaagcatgtcatgtctgcagtggtccatgcatctgtctgctgcagtcagaaaataagaaaacagtttttacctttgttccatttcccaattctctctctctctctttttttttttttaggcagagtcttgctctatcacccaggttggagtgcagtggtgcgctctccgctcactgcaacctctgtttcccaggttcaagtgattctcatgccttagcctcctgagtagctaggactacaagcacgcccaccaaacttggctaaattttttttcatatttgtagtagagattgagtttcgccatcttggccaagctggtcttgaactcctgtcctcaagtgacctgcccgcctcggcctcccaaagtgctgggattacaggagtgagccaccgcacccggccccaattctcatatacatatatgtgtgtatatatacatgtttttttttggcagaaggcaaataacatccatcaccacggagccaaagggatctgggaattattgttccctggcttccagtccctctgatacatagaaacaacatagacaggaataggaataaatgcagattacctcctccctccaatccttccccacaacccccaccatctggcactgaggagatctcccaacttttatgaaggttgtaatttcaattccaaatggccgaaaaacttttcggagacattcagcccagccgtcctagctcaccacccgcctccgtctgccatacagacattttacctactgttctttgtggtgtattttcctgccctcttttccatctctactttcctgcctctctggatagtctgtgcctcctgggtacggagcccagaatctgttaagggtgattggaggaggaaacttagcagataagcaagaaagagaacaggttttattttcccctagtctaagtacaagtaatgttctgattacttctgtcctctcttccccatattagaacaactggaattttaaaagttcattctcttgctaaaactgtcatgagacagctggagatggtacatttacaaaaaatccagttctagatggctaactttcaaagtaagacgacagtgaacaatgtctatcttaatatcctttgtacttttgctgggcgcagtggctcacgcctgtaatgacggatcacgaggtcaggagatcgagaccatcctgcctaaaacggtgaaaccccgtctctactaaaaataaaaataaaaaatggccggccgtggtggcacgtgcctgtagtcccagctactcaggagcctgaggcaggacaatcgcttgaacccgggaggtggaggttgcagtgagccaagatcgcgccactgcactccagccagggcgacagagcgagattccgtctcaaaaacaacaacaaaatatcctttgtagttttacacacacacgtatatgtatatacagtacatatatttaaaaaaacatatacacacacacacacagttcttttttttttttttttcctgagtctcgttctgtggcccacgctggagtgcagtggtgcgatcacatctcactgcagcctgaaactccctgactcaagcaatcctcccacctcagcctccagagtagctgggacttcagaagcacgcaaccacgccccactaatttttgtattttttgtagagacagggtttcacaatgctgcccaagctggtctcgaactcctgggctcaagctatcctaccgcgtcggtttccgaaagtgttgcgattacaggcgtgagccatagcgttacatgtggtgggggggaagagagagaaagagagagagtgagaagaaggaggaggaggaggaggaggagaaagaaggaagaaagaaaagaaaagaaatatagagagggtgttcaaatctactgttcaagtgctttccatgtacatataatctctttttaaaatcccatccagctctgttgagatgagaaaactgaagctctgagaggttgagtaactttatcacgctcccgcaaagataaaagaaccgccatctgcccatattaatttccctgagatgaaatgtgacagagaaagatacctcaaaattaaggaaatggagagcttcgagaatcatcttccatctccgccgagtcccccaggaacttggcccggagtctttgggctgtcccacctgatcttgccccagtgcggctccacaccctggcgggcggcgtacggagcgtcccggcccccggcaccagccagcgtcggagtgggtaggactggagatggcagcctccggtccaggggaagcgggactccacggaagggctgggaagagggtaggaagagggggcgggggcgggaactgttccgccccctccccctctgtctactttcattggccaagggcttcctggccccaacccacctcccgcctccagggcgccgcttaaagtgtgcggagcaggtgccttgggtggagccacaactttgcgcgagtgtcttggttgagcgcagcgcccattcattgcccgcgagcgtccatccatctgtccggccgactgtccagcgaaaggggctccaggccgggcgcagccgccacccgggggaccgaggccaggagaggggccaagagcgcggctgacccttgcgggccggggcaggggacggtggccgcggccatgcagtcctgtgccagggcgtgggggctgcgcctgggccgcggggtcgggggcggccgccgcctggctgggggatcggggccgtgctgggcgccgcggagccgggacagcagcagtggcggcggggacagcgccgcggctggggcctcgcgcctcctggagcgccttctgcccagacacgacgacttcgctcggaggcacatcggccctggggacaaagaccagagagagatgctgcagaccttggggctggcggtaaggacctccacccggccctccgcggcctcccctccgccctgcccgggctctgcctgcgcggcctcccggctcctaccctgagctctgctgcgctccgcgtggtccccgcaccctgggtcccgggccgtggcgtggaagcaaattcgtgcctttggtcctcgtgccttcttacttcttaacagcttactttctcctgcacccagtcttcgtgcctcaaaagtgtacatttttaaaccacccccagcccaagtggccctgtggatggacctaaactttgcaagaggaggaagaccccctgattaagagtggrcttaccggttagctccggttgcaactgaaatccaaccccgagtggcggaatctccaccccacttcacgattttctttcctccaaatcattctggcttgctcagagttttccttttcttttaaaaagaaccctaattaggcgatttcaatgaggttcccacaaggctttgtagtcgcaaaacacagaggtgactcttttaactcagaggcactttcctctgccttgcgttttaattttagagcattgatgaattgatcgagaagacggtccctgccaacatccgtttgaaaagacccttgaaaatggaagaccctgtttgtaagtggccgggagggctcccttggacttagattattctggcctatttgtcttttgtggttccctgaaaatcgagctctggggtaaggattgctcaggactgggaatgtgtggattaaaataaaacagtggcgggtacctccggagccgcgggaaggtgggatatttggttctcggagcagacagttttgtgttaggagagagtcggtgttgtgcggttcttggtctttatcctagggcccccgcsagcttcccctgcgttttgtagcagattccccacttcccaggcaccctctcaccggccagggtgctctcatactttgggttgagaggtgtcattacctgcgcagacccggatagactcaaaggatctaggaattgcctaaggtcgtgcaactggggamgtgaccagacatctcgcctccctcccccasgcttctttagatcgcagtatcttccaattgttttcttacctcacgtccaaattttattatttaccaactgaaagacagcagtacttttcgagtccgaatggtttttcttttcttttcttttttttttcgtttttttttttttttttttttgagacagaatctctgtcgcccaggctggagtgctgtggcttgatctcggctcactgcaacctccgcctccctggttcaagcaattctcctgcctcagcctcttgactagctgggattacaggggcgcaccaccacaccaggctcatttttatatttttattagagacagggtttcttcatgttggccaggctggtgtcgaactcctgacctcaggcaatccgtctgcctcggcctcccaaaatgctgggattacaggcacgagtcactgtgccctrccccgaatggtttttctagaaaaacacacaaataagatttacatttgtttaagaaaggtcagtttagtcatagactttcttagaattttattttaggtttaaaatatttttaatggtccaagattgcttttcaggggtatttttatgtgggtatttgacttccatggggtgggggracaatccataagtcaagggcacaggctgagctcttaaaaaaaaatctcatctggttatctcactttcaatcatggagatacttatctctttttcttctagagtcaaatgaagagagagcagctgttttattttgttgctatgatagaaaggatctagtgtgcagatggcaagctttattttgtttgaaggtggacatttgaggtatggagcctatctgcttcaggttggctgctcaggctatgcygagggctgctgcctttgttggtttcaaatctgatggtcgttgaaaacctgcatgttttgctgaattgaactaattgagatttagggatggtcggagggaagccttatctatttccattttagaaaatcagaatcctggctgggcacggtggcaaatgcctataatctcagcattttgggaggtctaggcaggtggatcgcttgaggccagcagtttgagaccagyttgggcaatattgcgagaccccatctctacaaaaaatacaaaaattagccgggtgtggtggtgtgcgcctgtaatcccagctactccggaggctaatgtggcagaaacacttgagctgggcagtggaggttgcagygagccaagatggctccactgcacttccacctgagtaacagagtgagaccctgtctaaaaaaaaaagagaaaggaagaaaagaaaaaatcagaatcctaattcatttgatgtgtgaagagtgaagagttgtgtatctttaaagcagggtattttaggtgaatatttgaacaagtgaatcccttcctgagactttcaaagtcagggaatgtttaggttagctatttttataatawatatactctaaaataaagtgttcttttcagagcattagagcctgggaaacatggcaaagttgtgtatccttttttagtttagttcttggttccagctgaataatttgaacattaagggattctgattcttcactgtggaagtgggctcctgaaaagtaatttgcaacttgaatataaacttaatttttttattttttatttttatttttgaaatggattcttgttctgttgcccaggctggagtgcagtggcatgatctctactcactacaacctctgcctccccggttcaagccattctcctgcctcagcctcctgagtagctgggattacagacgtgcaccaccatgcccggctaattttttgtatttttagtagagatggggtttctccatgttggccaggctggtcttgaactcctgacctcaggtgatccacccaccttggcctcccaaaatgctgggattacaggcatgagccaccatgcccatgccatataaattttaaacctagcagcttctgtgacattttgagcttgttccatctagtttgggatgattcacgcagaaaatattgcacaatcagaagtccccccattccctgaaatggaccagttctccaacaaagcttgtttcttggaatagtgagctgggggtgttgggagagtggaggaggatgcatctgcaaaggatgaattttgactctgaggtgtgcacgtgtcatggtgaatgaatattctccaggtggggagagcaaattggtgcatgtaagctctggtagtakcatttccatttaatagtggagcaccattactcaaacttggyttcatgtgaatgcctgtgttcyagtgtagtcagaaaggaattctggattaaatatttrtttgccatgtacagagaaaactgtagtgagagctagttataggagtgttaaatgtcytcattgcagagtaaagattgtgatcagtttggaaatacttgggttacttattacacataactcagtaatctcagacatttatgtagtgcttaccatgtactggacactctttaacgtgctttcatgtattaatgtatattacaaccctatgaggaaaataccattaatacttctgttttaaaaatgaagaaaccgtgatattcagatgatgcatgacttgcccaaggtcatagctggtaagtgatggaggcagaattcaaacccaggcagcccagctccactgtccacactccatccactactttgctctctcttcattttgtcctttgcaaggtcrtgggtgtacaaagtggaaaacttctgtcctgactcacctggaatatccagtttacagatgtgcacaaacccagttgcactagaatcaccctgccatatgccaactgccccagtggaaacgcagcagcttcctggcagcacagacgtgggaacactcaagcctgctgctagggcaagggaaggggtcacggaagtgcaatactgaagaatgagcagtgatgctctgctagataaatctgggggaggctgctggaggtagtgggattaacatgtataggacasaatggccggacagaaccaggggaggacgggtggttcatcagtcactaaggatgctccccctcttcttggacaattcagaaagtgccttgacaaaatactttgatcatgaactggctgctaagtaagtcattattcagagaaacaagcaaagctattcagttcaaaatcctgtcctgctcaagtgaatcctgcattccccatccacaygcactcaacaacaacaaaaggactagaaggatatgtgtcactggcarcactgatttctctgaatggtgcccttattagtggttttagctttcctttaattactttgcagttttggaattttctgcagtgtaggtattcattttataattaattcaaagttaaaaattactttatgaccaaagccagttacttttagctatggtatgcctcgctgtgtagtcttttcagtgaattcatctcaaggcaactagactgaactagactgaactaatcrtagataaactgcagggattaaagtttacacaaaattgcacattgcttgtggaagagagaggagaaactaaaccctccaatgttcacattattcaactagaactgaggagatgagttgtcagaatgatggacttgtgccagctgaatgttccagagtgatttctactaaatggttaatggagggcagtgagyggagggagggagcattgtgtaatgcagctgcaggtgttggctttgtcaccctagttgggttgsgcactctcctgaactgaccccaggggcaactaggccgtggcagctgttccccaggccgaggccacgacttgtctttagccagatgatgcccattgccmggtcctgcctgtaggccccgcagtctgtgacaaggctttcctttggccattcccgactcattcaattcccagcttataggaattattatttcttctttaggatgattccaataaatttccattaaatgactgtaacagtaaagattagctaaatgagagaaacaaaggctgtaatgagcttgctgtagcaagggagtcagacttgcatattggcagaggagaggaaagctttattgtggaaaaaagggaagcctttaggtgtgttctgattggaggttgtttacaagggaagctgtctgaggatttactagaagtcgggcaactgatgtgattggttatgggtacatgtttggcttagcctggttggtcctatgttggaagtgggacaaaaattagggaagctatcwgttattaatcgagttctggccatttggggccaattgttagggaagttgttgttcggtttcctggattgtcactagagatagcaatctggctttctctgtaagtctaacttgtagcaggctggcttccttgattgtttattctaagtaagcgggttagtttcctggacaggtgtgggtgaaagttctatttttaaatrtggtctggtaattgtctatttgtatatgtagtccctcacagcagaatctgttttgtccatatatatatatatatatatatatatatactttttttttatggtgaaaagatatatatatatttagaattaggcagctggactcagtttagatgatcccaattttgttggcaacatccaaagcatcataatcaggagccagtcgaacatataccttcttctctccatcaggccgaatcagggtgttgcccttggccacatcawtgtcatagagcttcttcacagcctgtttaatctggtgcttgttgactttaacatccacaatgaacacaagtgtgttgttgtcttccatcttcttcatggcagactcagtggtcagcgtaaacttgatgatagcatagtggtcaagcttgtttctcctgggggcgctcttccgaggatatttgggctgtctctggagtcgcagggtcttggaccgccggaaggtgggtgatgtgcggatcttctttttttttgtggctatggacacctttcaacactgccttcttggcctttaaagcattckctttggcttcggctttaggaggggcaggagcttccttcttcgctttcggcgccatcttgtgaaaaagctctgtttttgtcattaattctcaataggcagattggactgtcaccttgttgcctaattgttaaatgtttactgactactattgaaagacactctgaggatatacttttttttttttttctgagacagagtctcgctctgttgcccaggctagagtgcagtggcacggtcttggctcaccacaacctctgcctcctgggttcaagcgattctcctgcctgagcctcccgagtagctgagactacaggcacgcaccaccatgcccagctartttttatatttttagtagagacggggtttcactatgttggtcaggctggtctcaaactcctgacctcgtgatctgcctgccttggcctcccaaagtgctgggattataggcgggagccaccgtgcccagtgaggatatacatttgaataaacatagtcactatctccaaggggcttacatcttaccttcttaatataaatagatcagacagacagttaaaaagttctaggtgccatgaaagctgtgggtaaaatgtcatgagcgttcagaaatgatgtgaaatgggatggaaagacagagttaagagttggaatatatcttctcaatgtaaagaagcaaagatgaagctgggagcagtgactcacgcccataatcccagcactttgggagggcgaggcgggtggatcatctgaggtccggagttcaagaccagcctgaccaacatggtgaatccccgtctctactaaaaatacagaaattacctgggcgtggtggcgcatgcctgtaatcccagctacttgggacgctgaggccgaggcagaagaatcgcttgaacccggaaggtggaggttgcagtgagctaagtcgcgccattgcactccagcctgggcgacagtgagactctgtctcaaaaaaaaaaacaacaaacaaacaaacaaaaactcaagcaaaggcagtaccttcactgagaaaaaggaaatggagaaatgcaatgtgcaagacataattyggcaagcacttgaatgttgttgcgggatcatccctgatggaatcttaaataattatgctatcaattatttgggggatattcagataaatgtcgaagtatatcatggtaaaagtggaggggtgaaaatatttgttttaaaagtgatgagattacaggctgacacctgtaatctcagcactttgggaggttaaggtrggtggattgcttgagccgagtagttcaagaccagcctgggcaacatcctgtctctttgaaaaaaaaaaagtaaaaaaaaatttttaatgtgttgagtcctaaaataaattatgatcagtttttcctttcttattaaaattagaatcccaaactagaaatctcagtcttggctgggcacagtggctcatgcctgtaatcctagcactttgggaggctgaggcggatggatcacttgaggccaggagttcagcatcagcctgggcaacgtggcaaaaccctgtctctactaaaaatacaaaaattagctggctgtggtggtgcatgcctgttgtcccagctgctcaggagtctgaggcaggagaatagcttgaacctgggaggtggaggttgcagggaagagaaggttgcagtgagctgtgattgcgccactgcacaccagcctgggcgacagaatgacttcatctcaaaaaacaagacaaaacaaaattaaaaaaccctcaatcttgataaagcatctttttttttttttgagagaagtctcgctcttatcccccaggtttgagtgcaatggctcgatctcagctcactgcaacctctgcctccggggttcaaatgattctcctgcctctgcctcccaggtagctggtattaagtcacctgccaccacgcctgtctaatttttgtatattttagtagagacggggtttcaccatgttggccaggctggtttcgaactcctgacctcaagtgatccgcctgcctcggccttccaaagtgctgggattttccaaagtgctggcattacaggcgtgagccattgtgcccggactttttwaaaaaaaaaaacaaacaaaaccagttctgctctgtcacccaggctggagagcaatggcacgatctcggctcactgcaacctccrcctcctgggttcaagcaattcttstgcctcagcctcccgagtagctgggattacaggcacccaccaccacagccagctaatttttgtatttttagttgagatgggctttcaccgtattggtcaggctggtcttgaactcctgacctcaagtgatctgcccgcctcagcctcccaaagtgctgggattacagtcgtgagccactgtgcctggactattttgggttttttaattttatttktgagrtggggtctcactctgttgcccaggctggagtgcagtggtgtgattacagctyactgcagcctcgacctcctgggttcaagtgatctcgcacttcagcctcctgagcagctgggactacaggcgcatgccaccatgcccggctaatttttgtattttttctagagacaatcttactgtgttgcccatgctggtctcgaattcctgggctcaggaagaaatccttccgactctgcctcccaaaatactaggatcataggcgtgagccaccttgcccgaccaactttattttttagagcagttttaggttcatggcaaaactgagtgaaagctacaaagatttcccattaaacccactgcctccacacaagcgtagagtctcccattatcagcattgcctaccagagcatttgctacaattgaacctacattaatgcatcattatcacccaaagtgttttttttttttttgagacggagtctcactatstcacccaggctggagtacagtggcacgatctcagatcactgcaacctccgcctcctgggttcaagcgattctcctgcctcagcttcctgagtaggcgagactacaggcatgaactaycacgcctggctaatttttgtatctttagtagagacggggktttcaccatgttagccaggctggtcttgaactcctgacctcagatgatctacccaccttggcctcccataatgctgggattataggtgagccactgcgcctggcctcacccaaagtgaagattgtttacgttaggattcagtcttggtgttgcacattctaggggtttagacaactgtagtataacatctgttcattattatcatttttattttaaaacattttatttttattttattttatttattttatttgagacagtatcttgctatgtcacccaggctcgactacagtggaatgatcacagctctgtgcaacctcgacctctccggctcaggcagtcctgtcacctcagccttccaagtagcttagaccacaaggagraccacagcacctggctaattttttaaatttttttgtagacatgggggtctcaatatgttgcccaggctggtctcaagcttctgggcttaaatgattctctcattttggtctgccaacatgctggggttgtaagtgtgagccaccacacccagatcctattattattattatttagagacagggtcttgcactgtcacccagactagagtgcagcggtatgactataacttactctaacctcaaaacatattcagtgctatcaaactgaaatcaattatactgtattataaatatagtgctattcttgagggctattatggtacataggaccatttgcccatacataaagtgccctagactgcttagcttttggtttttggattggtgtttgctatcacctttgttatcagtgggttattaaggtactattgccaaatctccttctacagcttcctccatctgcttccattctgcacttattgagagtcagatgtagaagataagatactgcttcaggcacttggtgtacaaaagtcaggaggtaaaagatgataaagatatccccagctataggttataacttataaggaaatagatattgaatagtttgatgggtctgcaaataggatggagacttcgtctgaagttatggcatgagcagaggcatggaagtgtggaaatacgtggttatttgagggacggtgaatagaccatgtggttagaatgttagattgcagagggacatgaaaaacaaggtatggggccacaatatggagggctcagagccaaaagggatttattttcccccctctaagtaatgggtagacaggaaaagttactatagagggaagtggaaggattgatcctgtgttttgcagagtgcctctgagatcagaggagagggagggggagaagcgggagagggaaggggagcctccaaactaatgcaggtctaactttggtggaaggggagagaagcagaatraagactgggtaggaagagtcttacagtacagaacagatctaagagagtttccatcaggcccacatggagtcctggagctacagctgcccatgggaggagtcttatatctccagagaatgaatgagtctgcattagttttccggcagagcttagtcactggcttcgggcagcccaggagaagcatggcgggtttttttttgttttttgtttgtttgtttgtttgtttgtttgagacacggtctggttatgtcacctaggctcaagtgcggtggtgcgatctcagttcactgcaacctctgcctcccaggctcaagcgatcctccctcctcagcctccctagtagctgggactgctggcgtgagctaccatgcccggctacattttgtattttttgtagagatggagtttcgccatgttgcccaggctggtcttgaactccgagctcaagcaacccgcctgccttggcctctcaaagtgctggaattagaggcatgagactcatggttttgggtttgtttgtttttttctttttgagacagagtcttactctgttgcccaggctggagtacagtggtgcaatcctggcttaccgcagcctccacctcccagattcaagattctcccgcctctgccgggcgcggtggctcacacctgtaatcccagcactttgggaggctgaggcgggtggatcacaagatcaggagatcgagaccatcctggctaacacggtgaaaccccgtctctactaaaaatacaaaaaaattagctgggcctggtggcgggcgcctgtagtcccagctactcgggaggctgaggcaggagaatggcgtgaacccgggaggcacagcttgcagtgagctgagatcgtgccactggactccagcctgagcgacagagtgagactccgtctcaaaaaaaaaaaaaaaaaaaaaaaaaagattctcctgcctcagcctcccaagtagctgggattacacgcctagctcatttttgtatttttagtagagatggagttttgctgtgttggccaggctggtctcgagctcctgacctcaggtgatccaccctccttggccttccaagtgctgggattacagttgtgagccactgtgcctggccagaagcatggtttttgtacagacgtggtggttgatccagagaggcaggagatgaggctgtcagtcagtttctagatggggtagtgatgttgatgtcattgattaacagagggggaacagggagaagtggaagaagagattgggtcttgcttgagcagaattgggtttgaggtattcgtggaacatgcatttggaaaagttgaagcaaaagttgcaaagtagagtctagagatccagagagagaagagatggagttgcagatttagtgagttttccgacaaattcatgagaattagtgaaatttcccagggatggagtgtggggaagaaagaaaagccaggatataaggaaataaaacatgcagaaggagagaggcagggcagtctgagatgaagtcatcmgaggcagaaggatatattttcaggcagggagttacggacccctgtgtcgtattctcgacctttcttaggcagaagagggaagaaagtctgcataaagacataaggatcctccgaggtgggaggagttgaggggctgcatttctgacgatcyctctgcatgagagacaggaaggctgagactgagtactagggaaaagtgaatttcagaagagctattgtgtgcatctgggtggcgaggacccttgatcggtctgcagggagggtctgctgagagcatctgggtggcgaggaccctcgatcggcctgcagggagggtctgctgagattgaatagcgggaatttgtaaggcctgtttgagtgtcctccaccccaccatcagtcagtgacttggaagcaggaacagagaaatgtggtgactgagttcagccgaggggaggacttcaaggtccactagtcagctcagtgaggttgagagagaggtggggcagccccacccacattctgcctgcaagctcagtgacccrcctcaggaggctgggagtgagggcccgggctgaaccggggcgcgtgctagagaatagggacgtgagtcgctgtgggcgaatctgtgttgtgacttctattcttcatgtcctcttccccactccatcaaatagcactgtgccttgcttaaacaagtctcagttatacgatgtayggataactttgatctcattttgactcaagtttgctttactttttgtaagtccagagtattcatacaaaaatgcaaactgagaattttagtaagaattctcaatgcctgtatcatcaacatactaactgactgaacaatgaagaaataaaattttgggaagtctgaaattattgtagacactgcattattttatacaactttcttaatagctgcaggtttccactgataaatgtttctctgaggctcacacattttgggatgtagttgaaccaaatgtgagaacaatttatgcattgattcatcatcatgagtctgtgatgggtgagttcctgggctagccatacgtgaaagtttaggtgaattttcattgcaacacattgattcacctgtattttctgagcatttactataagagattacaatttacttggtgtgattctsggttggactgcaaatttctccatatgacttttttttgaggyagggtctcactgtcactcaggttggactgcagtggcatgatcatggctcactgcarcctcaacctcctgggccaaacagatcctcccactactgcagcttcctgagtayctggactacaggcatgtgctaccacatggactaatttatttcattttgtagagacgggggtcttgctgtgttgcctaggctggtctcaaactcctgggttcaaaacatcctcctcccttagcctcccaaattgctgggattacaggcatgagccactgtgcccagcccatatgcctttgatctataaaaaattatctttttctcaagcatgatacactgtttgagttggactcttaggacacagtcttcmcttcttgttcttgctctgtaggccatgacaatgtacctttggggcagcaaagagggaaaacaaatcctctgggacctgcactgattctcayttcaaactcagcatttggcctgaatacataggtcagctggtattccagataaatactatgaattgcaatgtttctctgtacatttcttaacatttgtagattaaatgaaaaggggcctcccacaggaaggagtatgatccaagttcaaggagtaaaataacaagacatatcatcccttgtcccactccccacagtgaatgttgttttggttttgctacagctggtagggtcttgaagctatgcatctctcgggtgatcaggaagagctgcagagactgctcactcatacggagacaagggaccaaggagtcatcagaaacatagatgggacacgcctcagctccttttgagtggaggtgtcctgaggagagcggtaacccctgagggtcaggaaggactgaatgaggcgtggtattaattggctgagcaagaagacagggaagagcctggcaggcttagagcaaggagactcagagccccaggttgggcctgcgtgccgctgccctgaccayatccttacacgtggcacagctctgctggtctgcaagggttttaggttcagtttcctctgtacgctgtgcagagcgtagcgtatggattggcttggctttctcgaacgattcaacacattccgtgattcagctgacttggctagtgaaaccctcctctgcccagggaggaaacttgacaagtaacagggagttggctctatggactgcrtaagtgggcttgatccaggtggctatgggggagagaaaggagtgctataaatgactgggtgatgttggggaaaggatcagcatgcagatggaatctgcttccaaattctgacttcccttcagaaagatgagaaagtcctgccatgctgtcattcatggtctgtttatcttgattgacaccccagccccaccccatggttccctctcagcttcacagctgaggattaggatgttggcaagaacaatctgcccaggcagtctctgtcctcacattctggccccagctttccccttaccctctagcagagaaaggcctttctcaaactggtgacattgggcaaattcaaatatgagtgtgttggttttcagtcctgatgatttccttggagaccttttcctagtgtcttgccaagcacatggagggcgaagagtgagggaggctctgacgcggttagtggctgctgtgtgtgaggcgctgctggctgggctccccagaacatggtctgtggatggcctactgatgcctgggactgatgggatgtacacccatgtacccatgtattttacaaggaggatttcattctacatgcaacattttaattttatttatttattttttttctgagacagagtctcgctttgtcacccaggctggggtgcagtggcacgatctcggctcactgcaagctccgcctcctgggttcacaccattctcctgcctcagcctcccaacattttaattacaaatacacaatataggcacattgttcaaaactcaaaagcacaaaaatatatacagggagaccaggtggggtggctcatgcctgtaatcccagcactttgggaggctgagactggaagattgcttgagttcaggagtttgaaaccagcctgggaaacatagtgagaccttgtctctcttaaaaaaaaaaaaaaaatatatatatatatatatatatatagtgaaaagcaagcctccctcccacatctattatcttgtatttattatcaatttcttgtgaatcatcacaaagatgttctgctaatatataaacagatgcacatataattatttttaaaatataaatgataacaatattgtgggtatatatatatatggtgtaaaactttaggtatagcatttttagattgtcaaagaagcaaaaagcaaaacctgaatacattttcccttataaytgaggccaaaagaaattgtagggttatgtttggggtaatgggttaaggatgggaaacaatgtgtgcatgtgtgtgtgtgtgtttagttgtagcaggtatcttgactcatacagattgcctgtccattttaatgacatttttccagttcttgtggaaattcacataaacaggatattaaaacctagtcctagtaatgtattgaaaatttaacagctacttgggggccgaggcaggcagatcacctgaggtcaggagttcaagaccagcctgtccaatatggtgaaaccctgtctccaccaaaaatacaaaaattagccgggcatggtggcaggtgcctctaatcccagctactcgggaggctgaggcaggagaatcgcttgaacccaggaggcggaggttgcagtgagccgagatcgcaccattgcactccaacctgggcaacagaagactccatctcaaaaaaaaaaaaaatgaatatttaacagcaaaatcatcttattgctattggaaagtatttatttgatgcagtggttagtgcaaaactgttgctattttaggcgcagtggcaaaggagttgctatagaagggctcttatgtggaatgatgtaaagaggaagcattcattctaaattctgagaagcagaatttagcaagcagaagcagcgcaagttcttacctgcagattcttaggaagtgatgcctagaggccactgaactctgttcttggtacattaggaccaggagattatgcaatgctctgaggcagaataaacaagrtcagaagcaggcatttattctgcaagaaaagaatttactgtgtaggttcctgaaggattgcctgaattccttcatggctgagagtgcaaaataatgcacagctgctggctgccctgcatagctgtaggcaaggatccggaagatgccatcttgtctccaagtgtttctttttctttaggcagggtctcactctgtcacccaggtgggagtgcattggtgcaatcactgctcactgcagcctccacctccyrggctcaagcaatcctcctgtctcattctttgactttttttttgtagagacgaggtctcactatgttggtcaggctcgaactcctgrgctcaaacaatccttctgcctcggcctcccaaagtgctgggattaacaggcgtgagccactgcccccagccttcaagcgtttcttaatggattcccccttttctcatttggtctctttcccccctggttagtttcattgtagttcatgttcaggaattaggcttgtgcacaggagcaagctggttttgtccagttgaaaggaaaagggtgaggaatgtgctctgctgtgagctttgctctggggggaaaatctagttttctttttcccttttcccatttgctttccaaggtttggatggcacaatcaccttctcagaatgcttcttttactactcaggaggaaaaggctgccactttgggattgaaggaccccatactgtttcctctagaaaggtagctcttttccacgggagaagaggtgtacagtggtaggaattgtgtccttagttaggatttggggttttatttagacatcatcatgtcccttaacttggacttagacactggattctgtgaagttcagtttcaggttggttcagcaggtagatctctgatcatggacttttctgtcttctctccttttctctgcatctattgctatcttgacaccaaagttactcaaactctgggcttctaggtacactgggtttgttctcctgcagatctggccaaagtgatatttcatgagtgggtctgagaaatggcaaccagtgaacaaacatttgaaacaattcagacactcactaggctgtatgtttggggaattctttttattatatgtgggtgtggaagcctgaggtcttwgattttatcacagtaagaagcagcttacccctctgttcatcaagtcacagactgtcytggcttctagctgggaagtttttgttgggaagttttgtagtgttgggcaatggatgagtgaatggaaagaagcgtgactagggacctactcttaatggctcgaaaatgtccattaacttgttgtataggggacagctcattctattaactcactttgttctcaacagaaggtaaaattgggcataactaccaagctatcatgagaaccaatccaggaaaactcattagtcccaagctggataggggcagagtccacaggtgcttgagaagtttgggtggtcctatagagactagagtatatatttatcaccttagaaacttctttgtctcatgtttgacagtttttatgcttctgggtcttacagataattaatattttgttctttatttaagctagtttgcctttttttttttttttttttgagatggagtctcgttctgttgcccaggctggagtgcagtggcgtgatctcggctcactgcaagctctgcctcctgggttcacgccattctcctgcctcagcctcccgagtaggtgggactacaggtgcccgccaacacacctggctaatttttttgtatttttagtagagatggggtttcaccgtgttagccaggatggtctcgatctcctgatcttgtgatccacccgcctcagcctcccaaagtgctgggattacaggcatgagccaccacgcccggcccactagtttgccttttaaaaatttcaggtatttaattaaagtgtgtaagacatcagtggctgctctgcaggatgctgatttgtatctggagacccagaactgatgaattgggccagtgggttcctggctggtctaatgtggcatcttctcttccttactgtttgaggacatggggcagggcatgaccagtgcctgagtggcaggtggtgactgaagggagggagatgggaactgggctgtagtcagggctctctcgcaaggggcttgacctttacctattacctcctggacacctgtgcggagaggtatgagagaatgggttttcttgtgaaaggaaaattcaaatctctctttacttgagagtctagggacttcagacatcaccatcccccatagcagctctgatgattttcacatttgaatgaaacacttgaaatttttaaaaggccaattagtataaatgaagaacaaaataattaattataaagacccacagtcttgaaacacagtggcaggcaccatcttagttcttgtgtttcttcttctgtcaagtgaaaaaataaactaccatttttatcttccgcaatactcccattcaattgagctgcttctttttattttttatctttttatttcaatcctgcyccttctgtagtcaattgmgcttcttgactggtctcctggagctaattgtcaggactggggtggtgccccacccccttcctgggatcctagccttctccttcctttgggtgagatcctatctactccttctcaggaggtggcctctgctgcagacccataaaactttaacccyacctttcctatcagtgagaattaacataacagctagggctactatcacaggagtggaaaataaaccatagtaaagagaccttccaaaagtctgcaagcaaaatctaaacacatttgagcacctctctatggggcgagagcatagatttttgctgaaggcaggcagaggggtggcattttgtgttctcagagggaagcgatctggagtttgatttagttcaggattcttctcagcttctagccccgagctccagggcttctatcacctccatgactttcctgaatctgagtccttgaagtgcatttttcagaaaacttgggtcctactcttccycttcctttgggtgagatcctatctactccttctcaggaggtggcctctgctgcagacccataaaacgttaaccccacctttcctatcagtgggaatgaacataacagctagggctactatcataggagtggaaaataaaaccatagtaaagagaccttccaaaagtctacaagcaaaatcaaaacaacacatttgagcacctctatatgcagcgggagctagatttttgctacagtacctagtgagggactgtaattktggctcttggcacaatagccaaattcctatccctctaatcctaytgtgtctcctggggctgggtatgaggaaggagagtcctgcactggaagaattaccttagcrgtttcacttactatgaggactgttggtttcagtaacccttttggctcccatcaatgtccatttagctatttctaattatttcaactactataatattatttttctccaggcatgcagccaaataaagtcagccattgagttggttctctcagccgtgctgcttgtggaacaacgtgactgcaaggccatattgcttccctttcccatgccaggccgtgtgagtgagagagcaatcagtgcaaatctttgggctggataactggcggtgctggtttgacctccggccgggtcactgagggattgttggggaggctgctgcacccctctgcacagacttccaacatatcccagaaccatagcaccagctctcttaagccagaggataatgttagttagtaaagagaatgatgctattggggtcgattacttccactagtagaatcttaatgatgtgtgggaaaccatgtctctggcaaagtgctggagttcacctgagccttttttttttttctggagacagtgtctcrctctgttgccccggttggagtgcagtggcgtgatctcagctcactgcaayctccgcctccctggttcaagcgattctcctgtgtcagcctcccaagtagctgggattacaggcacatgccaccaggcccagctaatttttgtgtttttagtagagayagggtttcaccatgttggccaggctggtcttgaactccttgacctcaagtgatcctcctgcctcrgcctcccaaagtgctgggattacaggtgtaagccaccgtgccccaccaacctgagccttttttaactggccagctgggcccaagagtattatcgtgtctcctaaaaatgactgatacagtttttttaattagtttcctatggctgccatgtaatatagtaccacaaactaggtggcttaaaacaacaggaacctgttcactcccagttccrtagtcagaaatcaagatgttggcagggttggctcatttctggaagctctgaaggagratcagttccctgcctctctcccaggttccttggcctgtggatacattgctccagtctctgctgccatcatcacatggcattcttcttgcatgtgtgtctgtgtgtccyaattttgctcttcttataaggacaccaatcattggattacggctgaccctaatccagcatgatctcattttaacttggttacatcagtggagaccctattttcaagtaaggttataytcagaggtaccatggggttaggatttcaaagcatcatttttgggaacacaattcaacttgtaacactcctcttatccatctccctcctggactatagtgctggcctcttactgtatctccctgggccrgggtctcccctcagtgacctttccacaccatcagtagaattatcttactgtattgtaaaaagaatcatactatccagctttatttccaaaggctaaactcagtttgacagacagagcccttcacagactgtkgtcattggagagctggaccaacgcagaacagggacctgtcccccctgcacaggatcataattgaagcyggactcgcctacaaggcactgctaattaatctttcctcctactgggcgtctgaatcattctgcccctaagaagattatttgggaggtgattggactttttgcatgattgttcctagggatgttgtccttgcctatcttctcagatgtgggtttattgcatttttacttatttcctaaactttcaatggaagaaggcaagatcatcttccataaggtagttagattatattactcatgaaactaataacttcaagactctctttccttactctactgtggcaaagtaccatatctctctctttttttatttttttttttrttgatcattcttgggtgtttctctcagagggggatttggcaggktcataggacaatagtggagggaaggtcagcagataaacaagtgaacaaaggtctctggttttcctaggcagaggaccctgcggccttccgcagtgtttgtgtccctgggtacttgagattasggaktggtgatgactcttaacgagcatgctgccttcaagcatctgtttaacaaagcacatcttgcaccgcccttaatccatttaaccctgagtggacacagcacatgtttcagagagcacagggttgggggtaaggtcatagatcaacaggatcccaaggcagaagaatttttcttagtacagaacaaaatgaaaagtctcccatgtctacttctttctacacagacacrgcaaccatccgatttctcaatcttttccccacctttcccccttttctattccacaaaaccgccattgtcatcatggcccgttctcaatgagctgttgggcacacctcccagacggggtggtggcgggacagaggggctcctcacttccccgtaggggcggcggggcagaggcgcccctcacctcccagacagggcggctggccgggcaggggctgaccccccacctccctcccggacggggtggctgccgggcggagacgttcctcacctcccagacggggtcgcggccaggcagaggtgctcctcacatcccagacsgggcggcggggcagaggcgctccccacatctcagacgatgggcggccgggcagagacrctcctcacttcctagatgggatggcggcccggaagaggcgctcctcacttcctaggtgggatggcggccgggcagagacgctcctcactttccagactgggcagccaggcagaggggctcctcacatcccagaccatgggcggccaggcagagaggctcctcacttcccagacggggtggcggccgggcagaggctgccatctcggcactttgggaggccaaggcaggcggctgggaggtggaggttgtagcgagccgagatcacgccactgcactccagcctgggcaccattgagcactgagtgaacgagactctgtctgcaatcccggcacctcgggaggccgaggctggcggatcactcgcggttaggagctggagaccagcccggccaacacagggaaaccccgtctccaccaaaaaaatacgaaaaccagtcaggcgtggcggcgcgygcctgcaatcgcaggcactckkcaggctgaggcaggagaatcaggcagggaggttgcagtgagccaagatggcagcagcacagtccagcttcggcccgtggaaagagggagagggagaccgtggggagagggggagggggagggggaccatatctcttgtgaatttatttcctgggaaagcatgtggagtgcggagtgtgtgtgtgtgtgtgtgtgtgtgtgtgtgtctgtgtgtgtgtggtggagggtgaaagtattttacttgaggataaagattgatgcaaataatattcagatagagttcaatagggttaaaacaatgttaagtgtcttccttgccagtttgctgtcttaggttttgctttacctacgtttttctctgatagaggaaaaataaaataatcaattyccagggttaagtgactgagtccccaagaagatcttaaagaagacagccatttgcctaagtagttaaatcccagttaaattttagtagcatgatctatctctatgcagagaggtaaagaaagaaccaaatgatgtcatttctatctaaaaagtacccttcagtggcagggcgcggtggctcacgcctgtaatcccagcactttgggaggctgaggtgggcggatcacgaagtcagaagttcgagaccagcctagccaatatggtgaaaccccatctctactaaaaatacaaaaattagccaggtgtggtgatgtgcgactgtagtcccagctactcaggaggctgaggcagaagaatcgcttgaacctgggaggtggaggttgcagtgagccaagatcgagccactgcactccagcctgggtgacagagcaagactccctctcaaaaaaacaaaaaaggacccttcagtataagagctgtccatgtagcagctctcaacttagtccagtgagttraagtgtgagattggattagtaatcctttaatttaaagtcgtgtgacctcagccaagtgaccgtcttcaatcctcagtaccctaggctgtgcgaaaagcatatggtacaattcctggtggaataatgttcaataaatgtcaaatgctattattattttgtgattatatgaatgacccgagaaagggtcccacstgcatccaagtacatttatacttcttaataaccaaagtgccttcatgagaatgctggtagaaactgcataagggtgtgtttttttgcttttgtttttgtttgagatgggggtctcactctgtcactcaggtttgagtgcagcggcgccatcttagctcactacaatctctgcctcccaggctcatgtgatccttccacctcagcctcccaagaatctgggaccacaggtgtgaaccaccatgcctggctaattttttgccttttttggtagagacggggtttcaccgccttgcccaggcttgtcttgaactcctgacctcaggtgatccgcccacctcagcctctcaaagtgctgggattgcaggtgtgagccactgttcacagccctgcatgagggtctttgattacaactgatattttctattgttgagtgatggcctttttataagttgccctttcagtgacacaaaggaggaatgtgcaactgagtagaacaattttagagaaaatgtagattatgtgttaattagactgaagctgtgcctacttccagagagtatgaggcagtttagaaggtaaaacacagtattttactgggagtaagacagaatttttatttagcgtatatacagcagaaatagaaagggaacagaaaaagcctggaatgaggcaagtgttaaaatgggcagttctagcaaacagaaccgaataaggaacagtcaaaacagtgatgggggggccaaccttgaggagaaattgagtgttgtttggggactttttttttttttgagatgtcgcatacagtacttagtgttggttggatggatgactcttacattttccatatagttattctgtcataaatactcaaacaaaatgagggatttaaactgtaattagagctcttttctgagacatctgtctgtaacatttctctttttcccacaattaggtgaaaatgaaatccttgcaactctgcatgccatttcaagcaaaaaccagatctggagatcgtatattggcatgggctattataactgctcagtgccacagacrattttgcggaacttactggagaactcaggatggtaatgtatttctcagttcaggaacaggatgactgtgatttgcataattctctccatcctccatctgtccccttgcagtctcagagcctccacactgacacccacctcctagtgctgtctccaaygtccgggaacctaccgggtttctctggatcgagaaatgttcttgctcaaatgttgaggaaatasaagtttcttcccacttccagtcccataaaatctactaggatgctaaattgtggatctggtcatctcttcctcttctgcagcttaatttctgtgctgtatttgagtaagatgtgaaacctgcaggtgggcagattcaggcctttactcctccttggagaccctgggacataggctayttctgagctatctcattgagtcattggtggagtctgggagagmatcttggtccactgtcttctctcaggattccccgcctaccaccctgcccagacggagtcttgctgtgtatcccagtctggagtgcagtggtgtgatcttggctcactgcaacctctgcctcccaggttgaagcaattcttctgcctcagcctcccaagtagctgggattacaggcacccacaaccacccccggctaatttttgtatttttagtagagatggggtttcaccgtgttggccaggctggtctcgaactcctgacctcaggtgatccgcccgcttcagcctcccaaagtgctgggattacaggcatgagccactgcgcctggcccttctgtcaggatttttaagggggacagataattgtgttcccttcccctcccacccccaaaatttttgattcacaactgactgacaaaaagacatggtgttggagatcataatatcagctttattgctagcactttctagagaaagagaacatgtgcattctgtagacaggctcttctagaaaagatatgagagaggcctgagctatgcatgctcagttacttattccagtcttacctcaacagttagataagtcactcctacttcttcttttttttttttttttttttttttttttttgcctgagacagagtctcactctgttgcccaggctggagtgcagtgggatgatcttggctcactgcaacctctgcccttcgagttcaagtgattctcctgcctcagcctcccgagtagctgggattacaggtgcctgccagtgtgcctgggtaattttttgcatttttagtagagacggggtttcaccatcttggccaggctggtcttgaactcctgacctcatgatccacccgccttggcctcccagagggctgggattacaggcgtgagccaccgcgcccagccaagtcactcctacttctaggggtgtgtgtgtgtgttcatctgtgtctgtctcctgtccactctggtcctcactgattgtgtggtgtgtgtgtgtgtctgtccatccatgtctgtgtctcctgcccactctggtcctcactgatagaacaacactgaaagcatttctcctgcatttgagaaaatacttctagtccacttccatgctattttgttgttttccattgctgtttgctgtatgatgtaaagaaccaaaaaggccaggcatggtggctcacacctgtaatcccagcactttgggaggttgaggcgggtggatcatctgagactgggagtttgagaccagcctgaccaacatggaaaaaccctgtctctactaaaaatacaaaattagctgggcgtggtggtgcatgcctgtaatcgcagctagttgggaggctgaggcaggagaattgcttgaacctgggaggtggaggttgtggtgagccaagatcgcagcattgcactccagcctgggcagttaaggacatctgcctctgctgttcactgggatataatgtctaactgtggaggaggaaaggtggggactcctaggctcttttttcccatctttttggattggtgccattttatacaccagaaacactgagttgaaattttatttcaaatgatgaattagtcttaaaaggaagacatcttatttgaaaatatargtgtccacttttcatttccagcatggaaacaaatcagacatagatggagtatggtgataattcctaggtgattttttaaaagttagtttgtggaagaggtaactttaatttctagcaggatcatcatgacatgaggacagagtaagtggttgcctctgcaattcaaagtattcctagcaaggggcacagattggcttttagattaacatatgtaaaaaccaactttacttaagggaatgcaggcttcactaagtgggaaatcataagttgtaccaacaggagcttttgaartacccaagtacatgctcccaatcaatgagtgttaacaatttgataaacactttgcatctttgtctgcttttccatcattgcaaatgtaatcctggtgggtgcatgtgctttgtcgtagatgcaattatttttatcatatcattataggagccagatctctcagcacaatcattccagtattgctgtccctgtacataactcttagtttcaatatgctccactttattaataaggggacaggaaaatcaaagaactagtttctctgtagcgtctgtgaatgcgtttgcattgatgaaggcttctttttcattgtggtattggtaaaaatttgaatggtaaattccaaggttaatttcaaaagaaaatggcctgtttctcttcccccttaagaaaagcctcaaaagtacatgaacgggctgcagcattccagccatctgaatactggccagcagcctttgctcttggtggccataaagaatattcaccatattgctttctggctgtgggcggatgttaatttaccgtaggagcagccagtgttttgagaaggagatgatgttgtcctgtacttttcatttacttttcaggtgcattttaaatactatttctttctattctctgaaagctgatctgaaccagagagtgatattacaccccaccagcgctgatagggagggctgtgcacatgtgggtggtagatttcacattatcatccttctgaatggtttccatagagatggaaccaacaaattccggagacgtgaggggaaaataaatggatgacatagcctcgaaagaaaacaaacatttgggctcttgaaagaaaatttacatcaggtctagaatttattttatgggtttcactattccaaattttcaactactgataacatcagaacatttacatattccttgtagctatttctgtttggtatatttttgtcagcaggattaaaatgagagaatctcaggagtgtttgtcctgcaaacccccataaccccctttcccaattccaaaagaaagtcacagccaaaatgatagagaacactaattattttgggttaaatattaatgccatgttgaatatatcaagcatcctatttgagctgaactaaatgccttcttggatgtgcagatacctttttatatgttaaaatatatttaggaacaaaccagttgaattagtcatttggaacatagacattatagatsacaggcatgttttcttaatcactatgttttacctaattgagtcaaactcttgtaaacatgatggcaggccttttgatagtatttttctcctgaaatgagggttatttgtcatctctcagatccaaggctcactgtcctttaatagatcattgttaagagcattaacacctgtttaatttcagtagtgccaaaaacctctagactaatacaagaagtttacatgtaaaaggagtgagattacatatttggcatatttgcaagacaacaattttaaaggtctctacctttagcaatgctaaataacattaacctcaccttggacttatgaaaggattgagagagaaatattacataagggacagaaaagatgtaactaatttgaataaatagtttttaagtggaaatatgtaataatatctaaacagaattctgcagaagtgcttttaggaaaggtctatcagcatatgctttaaaaacttttttaaagatgaaaacgaaaaaaactccaacttttcaagagccaatgggtcattgaaaatactgatcctaagccaggcatggtggcttgtgcctgtggtcccagctccttgggaggctgaggcaggaagatcatgtgagtccagaagtttgaggctgtagtgcccaatcatcgcacaggtgaacagccactgcactccagcctgggtagcatagcacaagcctgtatacaaacaacagaaaagaaaatcctgattaggccaggtgcggtggctcacgcctgtatcccagcactttgggaggccgaggtgggcagatcacttgaggtcaggtgttcaagaccagcctggccaacatggcaaaaccctatctctacaaaaaatacaaaaaaaattagccaggcctastgataggcacctgtaatctcagatatttgggaggctgaagcaggagaatcacttgaacccaggaagaggagactgcagtgagtggagattgcaccactgcactccagcctgggtgacagttagactccgtttcaataaaaaagaaaatactggttatatactaggtctttttttttttttttaagacaaggtctccgtctgtcacctggactagcgtacagtggtgctctaatagctcactgtaaactggaactccttggctcacgtaatcctcctgcctcagcctcctgagtaggtgggacttacaggcccctcgccaggctaatttttttttttttttaaatttttagtagagacaaggtttctctgtgttgcccagkctgatcttgaactacttgccccaagagattttcctcccaaagtgctgacaggtgtgagccaccacacctggcctgtatactgagtcttaaaacatacacagacacatatagacagaaagctagggattttaaaagtttttgaatgtcttatgaattcaaaataacttacagatgctaatttacagttgctattattcacttgaataacctttggacagtacattagtctgatttgagcattaagaaaaatctctcatataggtgatgttatttccattgagaggcaagagatattggctagagcgacgtttagttatttatcccagttcacaagtacactcatgccctgcgtagtgatattttggtcagtgacagattgtgtatatgacagtggtctcataaaattgtaattctgtatttttactgtaccttttctgtatttagaaacacaaatacttaaccattgttgtacaattgcctatagtattcagtacagtaacatgctctacatgttggtagcctgggagtgataggctatatcacgtagcctaggtgtgtagtaggctataccttctaagtacacgtaagtacactctatgaggttcacacaacaatgactaaatcacctaacgatgtatttctcagagcatatttctgttaagccatgcatgactgtagaaaattaataagattaaggcttggcacagtggctcactcctgttatcccagcaatttgtgaagctgaggtggaaggatcacttgagcccaggaatttgagaccagcctggacaacatagtgaaaccctgtccctacaaaaaaaaaaaaaaaagattgaaacccagggcttcagctgggcgtggtggctcacgcctgtattcccaacattttgggaggctgaggtgggtgggtctttgagcccaggagtttgagaccagcctggccaacatggtgaaactccatccctacaaaaaaatataaaaattagctgggcgtggtggtgcatgcctgtagtcccagccactcgggaggttgaggtgggaggattgcttgagcccaggaggtggaggttgcagcgagccaagatcaggccactgcactccagtctgtgtgacagagcaagactctgtctcaaaaaacaaaacaaaaaccaaaasccagtgcttcttaatacttagtagttttgaagatgcaaggatatctgtgaatcactgtagtgtttaagagaatgcagacagatatgctctttctggagaggaacatggtactatgctctgggagccttagaactaattatcagggtgggcgtgataattacacatgactcacgcctgtaatcccagcactttgggaggccagggtgggcagatcacctgaggtcaggagttcgagaccagcctggccaacatggtgaaaccctatctcaactaaaaatacaaaatttagctgggtgtggtgtcacgcacctgtaatcccagctactcaggaggctgaggcaggagaatggcttgaacccaagaggtggaggttgcactgggccgagatcgtgccactgcactccagcctgggtgacagagcaaractctatctaaaaaaaaataaaaaccccaaaaaactagttatcatatataatttggaattctacttctaagaatgtatccttagacaaagataaagatcttaactattatgctatttctaatatttgaaatcaaaagtattcaactggaaggaactcgttaaataaatcaagatttacatgaagaaattataacttaaataatttatttcataagttatttaataccatagagcagttaaaatcatgtttttgaatagtatttaaagatgttatgttagacattgttcatggaataatgttaactgaaaaaagttaagatacaaaaacttcttttatttttagtagagacagagtctcgctatgttgcccaggctggtctcgaactcctggtgcaagtgatcctcccaccttggcctcccaaagtgttggtattacagatgtgagcctccacgcctggccagtactacttttagtataaatagattatgatgtagaaaagagattggaaaaaatgcacctgaatgttaactgtagttatgttaaagtttggaaattaagtgattttattttctcaatagttatctggattttccaacttgttacaaagaacatgtataacataatcataaaaaaggtggtaaatgtgttcctgacccataagagatggttaatgaatggtagctggtttctttaacatttggaacatacaataaaaagaaaatttagtgttaatcatcttacctcccagagaaaaccagcttacattttggttcatctacttgtttttacaaacttataaaaacgagaacgttttgtattttatgtatttattttttgagacagagtctcactcccgtcacccaggcgggagtgcagaggcgtgatcatggctcattgcagcctcaaactatcctccagcctcatggttattttttgttttttgagatggagtctcgctctgtcacccaggctggagtgcagtggcatgatcttggctcactgcaacctccgccttctggtttcaagcgattcttctgcctcagcctcccaagtagctgggaytacaagcacgtgccaccacacccagctaatttttgtattcttagtagagacggggtttcaccatattggccaggctcgtctcgaactcctgacctcgtgatccgcctcctcagcctcccaacgtgctgggattacttacaggcatgagccactgcrcctggcctgatttttttgtagaggtgaggtctcatatgttgcccaggctagtctcgaattccwgggctcgagtgattgcccacctcagcctcccagagtgcaagggttacaggtgtgagccaccatgcccagcctccatctacttttctttcattacttttctttctttcttttttgaaagctttgaaaccaacatcttcttatctttgacagggagtgtggtggggaggttgcctttccaagcagtacaatatcgagactttgaaataatttcctgagacttgtattggggtgttggtgtgcggctatgtgtatgtgtgtgtgtgtgtgtragagagagagagagaaagagtgtgtgtgtgagagagtgtgtgtttgtgtgtgtgtgtgagagagtgagtgtgtgtgtgtgtatacaacagaatggatttttgcttgaagagactggcttagcaactgtaaattagtttgccagattctaagtgggtggtgaactggaatgaatgaggcacacaatacatggtgtaggcaaatagaaagggaaatctgaacagaaatggggtcatacaaaaggcatagacaacaggcaggcagttgtgatcttgaatcagacaagatctacacacatggcttgacaccgtgaagacagatgtggcactactccagccaagtgcttagattgcttgggtaataaaaaactttcattttacttggaatcattatttgtcatgtagaaacacatacacatgcaggaatacacacatacaatctagtccatctgataaataggaaagacttagtatatccataaagacaggcacaagatatacgacaggaagacagagaataatgttccaaagaattcatcacagcacagaaaacaacagaaaaaacaagcagtgtctgctaaaaaggaaatgataattagacagtgtgaatataatactatgcattcattgaaaatgatgctgtaaaamatatttgctgatgtgggagatgttcatgatgtactaattttttttttttttttgagacggagtcttgctctgttgcccaggctggagtacagtggcgtgatctcagctcactgcaacctccgccccgcgggttcaagcgattctcctrcctcagcctcctgagtagctgggactacaggcacgygccaccacgcctggctaattgtttgtatttttagtagagacgggtttcaccatgttagccaggatggtctcgatctcctgacctygtgatccgccygccttgacctcccaagtaaaataggtgaggtgtggtagctctcgcctgtaaggatgaaggaactaaattggctaactgacatatccaaagccacattcttggctaataattgaaggagataaagttagaatccatgtttacgttgccttctaaacatttccatcctggaatttcaatagccatagagttaactgccatggactcttagtaactggataatgagaattcttaagtagacctctattaatttcttagcatgtagaacttctcctggttaacataaaacaaatatccaaataaataaataaaatgtttgagtattacatgttasattcttggatgctttcctattgtaaaatgtgaatgaggtcttttatctaggggaaagataatagcaaatgaaatttctgtttatgatattataggtagcctcaagtgcagtggctcatgcctataatgccagcatgttggcaggccgaggcaggtggattgcttgagctcaggagttcaagaccagcttgggtaacatgacaaaaccctggctgtacaaagaatacaaaaattagctgagcgtgatggcatgtgcttgttgtcccagccactttggagacttaggccagaggatctcttgagccttgtacattgaggctcagtgagtcgtgatcatgctattgcactccagcctgggtgacagagcgagaccctgtctcaaaaaccaacaaacaaaaaacaaaaaaacaacaccagagagatagaaaaataagtactgcttatccccaaacaaagggtaatattgttactatgatttaattctaagctttacaaaggccaaaaagaagcttactggtgtgttatgtaattctcctcaagataggcaaattattttcaggtactgaattctgaaatgatagcattttgtgtgcttctctaaacagcagtcagtttggacaagaccttttgtttcccttgcaggatcacccagtatactccataccagcctgargtgtctcaggggaggctggagagtttactcaactaccagaccatggtgtgtgacatcacaggcctggacatggccaatgcatccctgctggatgaggggactgcagccgcagaggcactgcagctgtgctacaggtgagaggcctctcaaagtgctggaattccagttgtgggccacctcgcctggccttgttttctttctatagtatattgtgaatattactttagtcagctttctagagtatgacttttcagagaaactgaaaaactcaacaggttcaaaaacctagaggttggatatttcctctcagggtccttcttggtgtctccacccggattttggttggggttggggaagatcagacgggagggctgaggttggcaggcgaggggtaaagacatctgcatatttggtgaggggactatttttgggaggaaggacagggagccggtgccaggtcccccactgggaagtgctggcttggggaagcagccaagcgcaggcctgggggctgcgagggtgggccagcagggttgttcaggggacagggtgaggtctctcaaggcagggcagtgaggctagggtggaaatgtgaccttaaacagctgactcggcacctagctttgggagggcagagggcgggagcaggggagggggaagctcaattaggagtggactttggatagatgtggctgggrgtgggggtgagggtgtttcaagggcaggtgtgggtcagacgtgaggatcycccccataacacacacacatgactgagtgcccgggagcctctccgttgttccaaaccttggcagcatagctgagtgtaaaggcatgagggtctctgtttggtggggttgtaagagggtagtgacaaaggtcctggcactrtggtcaagggtggattctcaggcccatagagtaggacttctattatctccatggcacttacatggaagtgccataatttatttaatctctcgtctattacacatatagtttatttccgtctcttactgttattaatagtacttcatgtgcatccttataataaatctttgtcaaaacttctgattatttcctgaagagccatttctggaagtggacttactgaatcaggatggttctccatttcttctgcttcccttatttgccttgccagtacttaggagtgtaccttcctggtggaattctcatgtagatggccatctggttgggaaagacgcacacatgctggccgtgtcttaggttttgtgctcctagccctgaatgcccatgtaagcctcttttttggcttatgcagagttggggtggggagtgagctccatacttggtcagcaagtttagaggcctctggtgcattccagccataggcctttctgattcctgagcagccgttgggggtgggttcaggttctcccttctgtcagggacacacagccacaaaagagtgccatccacccacctctctggttattattctcagctttttgctaattttcatcttccctctttttttaaaaaattgctttttatcttatttcatttatttatttattatttattaatttatttatttatttgagacggagtctcgctctttcgcccgggctggagtacagtggcgtgatctctgctcactgcaagctccgcctcccgggttcacgccattctcctgcctcagccttccaagtagctgggactacaggtgcctgccaccacgcccggctaattttttttttttgtatttttagtagagatggggtttcaccctgttagccaggagggtctcgatctcctgacctcatgatccgcccgcctcggcctcccaaattgctgggattataggcgtgagccactgagcccggccgagttaatttatttgttttaattattttgttttttttgagacagagtctcactctgtcactcaggctggagtgcactggcgctatctcggctcactgcaagctccgcctcctgggttcacgtcattctcctgcctcagcctcccacgtagctgggactacaggtgcccgccaccacgcccggctaagggttttttttttttgtatttttagtagagatggggtttcaccctgttagccaggagggtctcgatctcctgacctcgtgatctgcccgcctcggcctcccaaagtgctgggattacaggcgtgaaccaccccgcccggccctcaattgtttttttgaggcagggtttgactttgtcacccaggctggggtgcacgatctcagctcactgcagccttgacttccccagttcaagtaatcctcttgcctcatccccccaagcagctgggactataggcccatgccaccatgcccagctaatttttgtattttttgtagagatagggttttgccatgttgcccaggctggtcttgaacccctgagctcgagcaatccacccacctcagcctcccaaagtataaggattacaggcgtgagccaccatgaccggccaattttatttttttaatacaaaaattggctgggcatggtggcacatgcccgtagtcccaactatgtaggggcggggtgctgaggtggaaggagcacttgaaccttggaggtcgaggttgcagtgagctgtgatggcgctactgcactccagcctgagcgatagaccgagaccctgttctccccccaccaaaaataaaataaaaataaataaataaactattttatttattaatttatgtatgtatgtatttatttatttaagacagagtctcgctctgtggcctaggctggagtgmagtgaggcgatcttggctcactgcaacctctgcctcccgggttcaagcaattctcctgcctcatcctcccgagtagtgggattacaggygtgcaccaccatgcctggctacgttttgtagttttagtagagctggggttttgctawgttggtcaggctggtcttgaactcctgacctcaggtgatccacgcacctcggcctcccgtagtgctgggattacaggtgtgagccaccgcacctgtccagtttacacttgtatctaatcactgtcctttgctttattttctttttcctcatggtatatttgaaacattttgaaccattttttaaaaattgttattgagtaaacatagaaattgaaccatcttaagactgactttctaaatggggttagaatgggaattggatctatgaggaatgctaatcagtaaatgccattagttactgatgactcaatttttttttaaattttttttttgagacagagttttgctcgtcttacgcaggatggagtgcagcagcggtgcaatcttggctcactgcaacctcggcctccctggttcaagtgattctctggcctcagcctcccaagtagccgggattacaggcatgcaccggctaattttgtatttttagtagagacgaggttttatcacgttggccaggctggtctcgaactcctgacctcaggtaatctgcccgcctcggcctcccaaagtgctgggattacaggcgtgagccaccgcacccggcctactcagtattttttatactgtgcttagacttaccctcggtactrtgtttgctttgcgttcttagaagatagtcctatttatttaatgttcacgttggaatgtgctttttcttttcaacagacacaacaagaggaggaaatttctygttgayccccgttgccayccacagacaatagctgttgtccagactcgagccaagtaattaatttgattcgtgttttaaactcagtataatgtcatgttcatctctgctgtttctttctctttctcacttccaaactgattggaggtgaatctgaaacagggttttttgctgtttaaattggggttgctgagttttgccttacctctcactttcttctgggcatctctctggtaagtaaactgtgtcagaattgagtkgggaaatacacaattgccattgctttatagtaagttgtgttttgttttcttcttcttttttttttttttttttgagacggagtctcgctctgtcgtccaggctggagtgcagttgagggaacctaggctcactgcaagctccgcctcccaagttcacgccattgtcttgcctcagcctcccgagttgctgggactacaggtgcccgccaccacgcctggctaattttttttctatttttagtagagacggagtttcaccgtgttagccaggatggtcttgatctcctgacctcgtgacccgcccacctccgcctcccaaagtcctgggattacaggcttgagccactgcgcccggcccgttttgttttctttttgtagaaagaataaaaatattgttttgatcaggttttggaacgtttgaaaaacagagaaaaatgggactcacatacaactgttaagattttgtgtgtattccttgcaaacgtagtttacagagggtgtgcagagtccctaggtgagatgctatgtagtttaaagtgtagtacttttctttcgtgctgtaatcaggtaaaacaatcctcgcaacaaccactattggtagatatttgctttccctttgtaaaagttgagcattcttccccctacccataccaccatcccttcagagggggggtttctgacatataattggcattattagttcaggaatctaaggaagttcttcctccttgtcttacttatggttttccattcgcttaagagtgatgccagtgaaagaggtgatggctctgttgttaacaaatattggctcattagccctaggaagcaatgctcttgggcctctctgaggagtagattgtgacaggaaagggcaaaggggagtcagaggatagaagagaggaacagaagcagagctgttggatgcgcttgagttgctgtgatgtagttaccactgaagtgcctgtgggacgggatgtgggcaggggtgggaggccactgtgggagggcacagaaaatgaatgctgtcttactggaaaagaaacgttaattaattttcccttataaaccgaaagcacgattgttctttgttgtctgtctttccagatatactggagtcctcactgagctgaagttaccctgtgaaatggacttcagtggaaaagatgtcagtggagtgttgttccagtacccagacacggaggggaaggtggaagactttacggaactcgtggagagagctcatcagagtggggtaggtatacctttcttgtggggggtccgtggaggcgyatcccaacttgtatctgtctacctatctctctctctgtcttttcatgtgccttaatttctttaccattatcacatggaatggtaaaactctccttcctgactccttgctgctacttttttctgttcccggattcctggcacatggtgggcactcagtatgtatttactgaatgaatgaatgagcaatggagttcacaggatgtgaacacactctgcccgtcttcctgtagttaagataatttcctactctcccactactctcagggaaaggtagcaaccttgttccttttctctcacttcctttctagagcctggcctgctgtgctactgaccttttagctttgtgcatcttgaggccacctggagaatttggggtagacatcgccctgggcagctcccagagatttggagtgccactgggctatgggggamcccatgcagcattttttgctgtccgagaaagcttggtgagaatgatgcctggaagaatggtgggggtaacaaggtaaaggggctcatgtttctctacttttattgtgattatgatttccctgatttcttctgatcacaaatgttgatttctatctgaattcaactgggccatgttgagtcagttaaggaaatgtacaacatagattcagaagaacaattctgtttgggatatgagctagtacttctcaaatactataaatttgtaaatttttgaaaaattttgtgtataatttacaatgtatcgaagtcatgtaacgcatttgcttagattgatggacgccttgaaagactaaatattttaggcatgttttgtgtctcgacagttttcgttctcaaaagcattatgccacgtggctctgtaaagacaaatgcactgagactgcaaagtacacactgagtttgctccgcgttccttcctagaggcttccgccacgtggccatttgagtaatttccaaatttccaaatgtactttcctgactgcttctcattggtgaaacttctcagattaaaaacgtagatgttcagaagtagtctttgttccttaaaaaaaaaagaaaagaaaagaaaaaaagggctgggtgcggtggctcacacctgtaatcccagcattctgggaggccgagtcaggcagatcacaaggtcaggagtcccagacgagcctggccaatatggtgaaaccctgtctttactaaaaatacaaaaattaggtgggcgtggtggtgggcgcctgtagtcccagctacttgggaggcagaggcaggagaatcacttgaaccacggaggtggaggttgcagtgagccgagatcgcgctgcctcactccagtttgggtgcagagcgagactccatctcaaaaaaaaaaaagaaaaaaaaggaaaaaaaaggagcgggggacctagatgcattccaggattattactggggaaatttagaaaaaaaaattatgtttttgacctttgataaaagctggactttaacataagtgagtaagctgaattagtcaatgatgtgatgataatgtgaagtgtgtttttttaaaattttatttatttatttatttatttattttgagaccaagtctcactccatcacccaggctggagtgcagtggtgtaaacgtggccactgtgtccaactaattttttaaattttttgtaaaaacagggtttcaccatattgctcaggctggtcttagggctcaagtgatctgcccaccccagcctcccaaaatgctcggattaccaggtgtaagccaccatgcctggcctctgtatactttaaatcatcttattaacacctaatgttatgcaatggttgttacactgtattgtttttaaaaatttgtgtgatttgtttttttttttttattttttgagacggagtctctctctgtcacccaggctggagtgcagtggtacgatcttggctcactgcaacctctgcctcccaggttcaagtgattcttgagcctcagcctcccaagtaactgagattacaggtgcctgtcaccatgtctggctaatttttgtatttttagtagagatggggtttcaccatgttggccaggctggtctcaaactctggacctcaggtgatccgcccaccttggccccccaaagtgctgggattatagacatgagccaccatgcgcggctcataaaatttgtgtgatttttaattgttgtattattttttatttttttgaatgttttcagtccgtgattggtggaatctgtggtgtagaatccacagagagccaagtcttttcaattttgtcgtatatttccacttttcctgtgtctcctaagaagttcagagtgaaacttaatcctcccagtcaccattattgtatttgtctgggaaattcctgcaaaattttctttcaaaattcctagacttattgtatatatcttggtgtctcagagtacagtctaaaaatcagtaatcctgctgggcacagtggctcatgcctgtaatcccagcactttgggaggccaaggcaggcggatcacctgaggccaggagttcaagaccagcctggccaacatggtgaaaccccatctctactaaaaatacaaaaattagctgggcgtggtgtcaggaggctgatgcagtagaatcgtttgaaaccagaaggcagaggttgcagtgagccgagatcacgccattgcactccagcctgggcgaaagagcgaaactccgtctcaaaaaaaaaaaaaaaaatcartaatcatgtttagatgaggaacgtttagaaattgtttctttataaatttgcacccaagtgcatttgctgaattcacttcaagctgggaaggaaagaagtaattctatttatagcatctcccagtgctgtgattatctgtgctaactggatgccttattcttggtgtagagatgccactgggaaagaagtgtatcgtcttgctcttcaaaccagggagcaacacattcggagagacaaggctaccagcaacatctgtacagctcaggtaaatcacacgtctgacctgactactgaatgccttacgatacacagaaatgagctactcattcattcattcatttgttcatttattcaccacctcctgagcagtgagcacaccagaaatggcaagatcttattggtgtagaaggctcattgtcttatgagaaccaaaatacagtattggctgggtacggtggctcatgcctgtaatcccagcaccttgtgaggccaaggcaggcagattgctggagcccaggagttggaaacctgcctgggcgacatggcgaaacaccatctctatgaaaaataaaataaaataaattagccgtcagtggtggtatgctcctgtagtcccaggtgctagggaggctcaggtgggaggatcaccagaatctgggaggttgaggctgcagtgagccatgattatgccactgcactccagcctgagtgacagagggagactctgtccccaactcctgcccccacaaaaaaagttaaagaaaaagacactgtgttttactggtgttctttatatgtacaccatttgcctatgctttctcttcaccatacatgttttaatactaaaaaaaataaaaagcattatttgtttcattttacccataatcacatcttcagatcctgaacaggcaaagcgtaagaaaggacaaaaaaggccagtcttcacttttatatacagacttaaaatatatgtaaatagaaagatggatatcagggtctctagtattcttggcgttgggccaggtttgttatgggtggcagttgagacaccctctcttaggactgagaaggagcctctccaggaatgggttgaggaaggcaaagcaagggcatttgtgatgactgtgcttgaggggatggtggtagtcatgaggcactcttactgggagattatgactggcattcttttttttgttttttcgagacagagttttactctgtcgcccaggctggagtgcagtggygcaatctcagctcactgcaacctctgctgcccggtttcaagcaattctcctgcctcagcctcctgagtaactgggattacaggcgcctgccacagcgccaggctagtttttgcatttttagtagagacggggtttcaccatcttggccaggttggtcttgaactcctgacctcatgatccacccacctcggcctcccaaagtgttgggattacaagcatgagccactgcacctggccatgtctggcattctttaaaaggatgggataaaacagsaagagcttcctgggttctgaccagggttctgggttctgctccttgaagttgctccagggcttaggtcgaagtgtttgtgaaacccagccaaaccctaggatcagttggaggcccactcctgagcacaggatccattctaagtgcatctctttttttttttcttcttctttttttttcttctttgagatagagtcctgttcctgcgtcacccaggttggaatggggtggcgcaatcttggctcactgcaacctctgcctcctgggttcaagtgattcttgtgcctcagcctcctaaagagctggaattacaggccaccacacccagataatttttgtatttttagtagaggcaggtttcatcatgttggccaggctggtctcaaacgcctgacctcaagtgatggtcctgcctgggcctcccaaaattttgggattgtaggtgtgagccatggcacctggcttctttttttttttttttcttgagacagattcttgctctgttgtccattctggagtgcagtggcatggccatagctcactgcagcctcaaccttcaacctccagggctcaaattattctccggtctcagcctcctaagtagctgggactatgggtacattccaccacgcccagctaattttcaaaaaaatgttttgtagaggcgaggtctcactttgttgctcaggttggtctcaaattcctgagctcaagtgatcctatcttggcctcccatagtgataggattataggcatgagccaccgtgcctggccactgtaattgcatctcttccatgaagtgtcagagagagatgtcacaggtgcttcaatgggaggtagagtgctctttcgtctcagggctttggcgtctagaaccacctctgaaaagcttctccaggaaggcagtgggcaataagatcttcttatagttggttctgcagccacgggtctttggagccatttcctcagttggtccttttgtattatgttttgcctcaggaaggtgccacctcttttcaaatatgagctcttccagtatgataggaaggaaaggtggttggcacaggcttttcctctgttgaacagcaagctgatctttatttatttatttgtttttttggttgttttttttttttttgagatggagtcttgctctgtcacccaggctggcrtgcagcggcccaatctcagctcactgcaacctctgccttccagtttccagcgattctcttgcctcagcctcctgagtagctgggattacaggcgcctgccaccatgcccaactaatttttctatttttagtagagacagggtttcaccatgttggtcaggctggtctcgaactcctgatctcatgatctgcccacctcggcctcccaaagtgctgggattacaggcataagccgccatgcctggccacatggtgatctttatatggtggcctcactttctgtagcttaccctccatttgttgaattctctgcttacgttttccctttcggtgcagctgactgctcctgtcttgctgtttctcctcaggttcctccaggtttccgtctgatcataagtccatttagggcctcagttttctgcctctaggttcattttccaggtgaatttgggctgtctgcagtgaaccagttatgttcctgtttctttcttttttttttttttgagacggagtctttctcttgttgcccaggctggagtgcaatggcgtgatgtcggctcactgcaacctccgtcttccgggttcaagcgatactcctgcctcagcctcctgagtagctgggattacaggcacccacgaccatgcctggctaatattttttgtatttttagtagagatggggtttcaccatgctggccaggctggtctcgaactcctgacctcaggtgatccgcccgccttggcctcccaaagtgctgggattacaggcatgagccattgtgcccggccttatgttcctgttgcttaatttcttccagttcatgtatagctgataatttattatttaacttgggttgaaaggtctgtatcttttccagcaattgttaaaatgtttgccctggagatggccatactccagcttgtctgattttcatcctcttattctgatgatcttctaactcttcactgtctatttcactgcatatgtgccttttcatagttgattgcatacaagaattactcataactccagtttcactctttgtgagcatgcaagtctccctgttttgttaggagatgactggtgtcttttgagttgtyccttttgtgctgtaggtctttgacccccgccttctgttgtagcagctgttccacattcttctcactcttgctcttctctcttgtcactggggtgggtgggggagtccactcttagtttcgcatcgtggatggggcatgactcttttttaatctctgaaagtgtgttaatgattcttttttaaataaatttttctatagggagtctctctgagcctattctggctcagcaggccccattctaaaacaaaactgaaaaaacagggtgcggtggctcacacctgtaatctcaacactttaggaggccaaggcaggaggattacttgagttcagcagtttaaatccatcccaggcaacatagtgagactcctgtctatataaaaaaagtacaaaaattagccaggtgttgtggtacacaccagtatcccagctactcagtagactgaggtggtaggagtgcttgagctggggaggtccaggctgcagtgagctgcaatcacaccactgcactccaacctgggtgacagaatcagaccccacctctacaaaacaaaaaggaaaagaaacaattttttctataaatttgtggcattactacagatgtctgaattttcattatgttctgttctttatattctcttatttcttttttttttggagacgagtctcgctccatcgcccaggctggagtgcagtagcgccatctcgctcactgaagctctgcctcccgggttcacgccattctcctgcctcagcctcctgtgtagctgggactacaggtgtctgctaccatgcctggctaatttattgtatttttagtagatacagggtttcaccatgttagccaggatggtctcgatctcctgacctcatgatccacctgcctcagcctcccaaagtgctgggattacaggcgttagccaccatgcccggccatatattctcttatttcttagcttctaccacaatgagcagctctttcattggcttttcttatttttaatataaaaatctttttaaaatagagatgggagtcttactttgttgcccaggctagtattgatctccaggcctcaagcgatcctcctgcctcagcctcccaaagtgttgggatcactggtgtgagccactgcatccagccttgttggcttttctaaagtcaggtgtagtaaagaataatttacactttattagctttttttattgagatgtaactcaccgtaagtttcaccaattgcaagtatacagctcaatggtttttactctatttacaaggttgtgcaactatcaccagtatttaatttcagaatatttttattaccccaaaaagaaattctattcctatgaagtagtcactcctcatccctctccccttcctatagcccctggcaactactattctactttctgtctccctggatttgcctgttctgaatatttcatataaatgggatcatacaatgtgtggccttttgtacctggcttctttgcataaggttttcaaggttcatccatattgtagcatgaatgtgtacttaattcttttctatggctgggtaatatcccattgtttggacatgctacattttgtttatccattcatcaattggtaaacatttggggtgtttcaaataagcctgctgtgaacacttctgtgtaaatttttgtatggatgtaatgttttcagttcttttggttatattcctagcagtgaaattgctgggtcatataactctacatttaacattttgaggaacttccagacatttttcaaagtggctgcattattttactttcctaccagcagcatatgaatattctaatttctccgtattttcaccaatgcttgttacttcctatcctttggttatagccatcctattggatgtcaagtgataatctcactgtggttttgttttgtatttccctaataactaatgattttgagcattcattagcttttgaggcttttaagtaccttaattgtattattgttattttatttatttattttagagatggggtcttgttatgttcttcttgctggtctttaactcctgggctaaagcaatcctcccaccttagcctcccaaagtcttgggattacaggcgtgagccactgattcaagccctttgtatttttaagtttgttcaatttgtgaaagaaattgtcattttcttggtctctattttaatttttttggttcttcttttgatattctagtgccctttgaagtttttaaaaagtggttttatacttctcatcaatttgttgttcagccgtgtgatatagcctcctgattatggaaggaatcatctgtagattaaaaagggacatgaaccaacctctacaatattgtggtggaggctgccagggcattctgtgaatgtcaggcctgggtttctgtttccagcaacacagccatgagcatttgggcacagtgtgtcacagattctttacctcagcctcgccttttccacagctgtaaagtgctgtggagtttctgtgtttatttctgattgttgtaaggagtccataagagtgtttacactttgtctaggacttttagtacaagaatgcctayttccatgttttctgatgtctctttctcctcatttacttccttgtttgctgacttcacctttggaaactgtttcttattttgcattggctccatagagacttcctctagtagtctagcagaaaaaaagatgtacctaacaaaatggacccagtattgaacatcaactgtattttgcagagacagggttttgtattgtcaaccgggctggagtccagtggcgcaatcataggtcactgtaacctcgaaatcctgggttcaagtgatccatctcggcttctggagtcactgggactacagttgcacaccaccccgctcccagctgaagtgcgcattgccgtttttgccagtcctttgccacagattctccattcaactcttggttggcagaagttcagcctctagtgttttatttaagttcttaggagaattttattcctgaagttcttgaatgtttgaaaattgcttgtttctttttattcttgaagaattgcctggttgagtgtaaaattctcagatctcactttttctccctgaggtctttattgcttcactgtcttccaacattaaacattgcttctcaatgtctgatggtagtgtgatctttgcccttaagggtgacatgattttgttgcatggaagaagcccttcgtaatggtcaaatgtgaaggtttagtatagtaacaactccagggtgtcttggatgatggttcctttcaggtagtcaggcaggttatatattaattgtccccaactatcaaagaatgtaggaaatctgatcattttgttttgtcgctgtcttcagttttgacatcccaagtcaagtaattacaccctcccactaattgtcctccatcacgtgattctttaaatgttcttatcttttaggccctcttggcgaatatggctgccatgtttgcaatctaccatggttcccatgggctggagcatattgctaggagggtacataatgccactttgattttgtcagaaggtgagttggtaatctgtctaaaacatttgggcatartaaaattgataaatttgagtaaaattgaaaatattgcatgtccaatactatatgcaaaattaaaagtcaagtgagaaacgaggaaaaatactttcaacatccatgattattttgttgttttgctttctttctttctctttctttttctttctttctttctttctttctttcttttatttcctttttcttgctttctttctttttttcttgcttgcttgctttcttgcttgcttgctttcttgctttcttgtttgcttgcttgcttgcttgcttgcttccttgcttaatggagtcttgctctgtctcccaggctggagtgcagtggcacgatctcagctcactgtaacctccacttcccggattcatgtgattgtcctgcctcagcctctcaggtaactgggattaaggtacacgccaccatgtctggctaatttttgtatttttggtagagacagggctttgccatgttttccaggctggtctcgaattcctgacctcaagaaatccgtccactttggcctctcaaagtgctgggattacaggcgtgagccaccatgcctggcttagactgagtgttaatatttttttctcttttactcctggcaagctgtgatatttttaatatgtagaactcttactttcctaccggccccaaacataagaaggatgaacaccctaatagaaaaataggcaaaagacattaaatgtaattttaaaagaaataagtatacaaataaatggccagtagacatagaattttagcctcattattaatgaaagagatacaaaataaagcaataaactagtatttatcccattacattggcaatcagaagaatgctgctatgtagtgagctagacatggttactcgtgtatgtaatgtcagctactctggaggctgagccaggaggattgcttgaggccaggagttcaagaccagcgtgggcaagagcgagaccacatctctataaaaaaatagaaataggccaggcacagtggctcatgcctgtaatcctagcactttgggaggctgaggcgggtggatcacttgaggtcaggagttcaagaccagcctggccaacatggtgaaaccctgtctctactaaaaatacaaaaatcagctgggagtggtggcatactcctgtagtcccagctactcgggaggctgaggcaggagaattgcttgaatttaggaggcggaggttgcagtgtgccaagattgctccactgtactccatcctgggcaacagagtgagactccatctctcaaaaaaaaaaaaaaaaagtgattaaatcatggttcatccatatgtttgactattgtacagccattaaatatggtttaaaatagtgatctataggaaagcatagatgagaccaggtgtggtggttcacacctataatcccatcgttttgggaggctgaggtgggagaattgcttgagtcccagagttcaaggccagcctgggcaacatggcaagatcactgtcttcaaaaaatttaaaaaattattagccaggtgtgatggcatgagtccttgatcccagttacttgggaggctgaggcaaggggattgcatgagcttgagcccaggagtttgaggatgcaatcagctatgatcatgccactgcattccagcctggacaacagagtgagactgtatctctcaaaaaaaaaaaggtataattttatatatatatatatatatctgatactacctgctcccccatttcttgagaaataatacaccaaaatacacgcagtaatgcaattgtatgttgattttccttactcttttatatgtatttcataattttctacagcatgataataaacatgtttagttttttaaaaagcaatcaccaaagcactccccaggaccaacaagagtctagtagaatttatctctttattattctgtgacatgtcaatggctgaggagcaggtttctatatgagagtttgggggatctcctatcttgtgtaggtctcaagcgagcagggcatcaactccagcatgacctgttctttgataccttgaagattcagtgtggctgctcagtgaaggaggtcttgggcagggccgctcagcggcagatcaattttcggctttttgaggatggcacagtaagtcaaattttcagtatttttaccagtttttcaaattttcacattgtttctcattaaaaggttttctctttgtttttaaaaaataaaaaggaaaactttaggcacagtcctattttttcataaacaagtgttatttacattatgcaacactgtggtcttttcagtaaaggatcattcaccctttgctttcttttagacttagtgttttcatatgtgggactgaaatgcacatattttgttcataatactcctctcttcacagtatgactgactttaagataaaggctctgataactgatatacaggttaagggaagaaaatctcctcaatatctgataagtgggttaagggaagaaaaagataagcatgtctagcttcaaaaggagtgtcctgcagccatggaatgttagagttcagaggtggctggcaaaactcgaagccttgtgaaacctgggactggtctagccaccttcctctaagccttagcgtggagataattgtaccctgatattttggaatgatgggattttgtttagcactgtctcccctttgacctctcttgggattcctccagtgatgtggagtttagagttgatgttttccattttgtttgtgtttctgtagcttggtatttctcttgatgaaacagtcaatgaaaaagatctggacgatttgttgtggatctttggttgtgagtcatctgcagtaagtaaaataaaaacatgcgttcctcatcataactattggaggtggtagcaaaagtagcttatcccctgagtgtgagggagaaggggcccaagtgtgacactggtagcttgttgttaaaattattccactgactatcccttgctagtcactgctgacagctggaggtcactgctgtagggctccagccagtattatgcacccaggctagttggaaagattgttaatggtgtttcattgaaagtgcctctaggctggggatggtggctcatgcctgtaatcccagcactttgggaggtcaggggggcgggggggcagatcacctgaggtcaggagttcaagaccagcctgaccaacatggagaaaccccgtctccactaaaaatacaaaattagccaggcatggtggcacatacctgtaatcccagttactcaggaggctgaggtgggagaattgyttcaacccaggaggcggcggttgcagtgagctgagattgcgccattgcactctagcctgggcagcaagagcaaaactccatctcaaaaaaagaaaaaagaaagaaactgcctctactacaaagatgcaagacatttgtatcttggttatgtcattcattggaaaattatgatattcatttaatacatatttattgaggacccaatatgtgtcaggtgctatgctaggccctgaagacacagtggtgaattagacatgcttcttgtcctcctggtgcttacagtttattagggattcagataaacaagcttaagattagaatccaggtgactgatgtgtgaagatgttctgggagctcacaggatgagctccttaccaagaagataagcaggagttatctagaccaagatggcacaagagggaaaggaagatgggtccgagtgttctagacactggagaaagcagtcacaaaggctgggagagggagtacatgaaagctataagcagttcagtgtaatgagttgctttctaaaataatgaagtagtgggggaaagcaagagaaaagttaccattccatgggatgagagtgaaagagagccgacagtagctacctagacctgtggcaaggtgttaatcacaacagcctacactgcctggtgtgtattaatcactaagtaaatatttgttaaatggatagatgaaaggaagtagaaataccttccagagtgctgagtggtgctgtcttgcttatctgtgccctctttgagagaggacttcaaagggttataccagataacattcataaatgatcaaagaagcatcacagtgttctcttttaaacctcaattaaacaggactgagttagctccttctctgtagaactctgcactaaatttaatcacagatatttggttcatgcatttgagaaatgtttctggagcatcactaaggggtcaagagggccattattttagttcatttgcattggagtacctgaggctaaataatttataaataaaatagctttatttggctcatgtttctgcaggctgtgctgtgcaagaagcgtttgcttctggtgagggtttcaggaaacttcctctcatgaaggaaggggaagaggagcaggcatcacatggyaaaagaaaaaggaagagagagagaggagggaggtgccaggctctttttaacaatcacttctcatcagttctcatgggaactagtagagtgagaactcactcattactgtgaagacagcgccaagcccatcttcaacactggggatcacatttcaccctgagatctggaggggacaagtattaaatctgtattagtcatattattagcctggcaaggaatgaggatcaagccatgtattgattatatattctggatattaaatccttatcagatatatgacttacatatattttcttccattctgtgggtagtcagtctcttaactttcttgataatgttctttgatgcacacacatttcaaattttatagaaatttaatttatctaatttttatatatgtttattgtttattcctttggtgtcacatttaagaaaccattgccagatccaaggttatgcagattagcccctatattttcttttttttttttaagatggagtcttgctctgtcgcccagggtggcstgcagtggcatgatctcagctcactgcaaactccacctcccaggttcacgccattctcctgcctcagcctccygagtagctgcgactacaggcacccgccaacacgaccggctaattttgtattttttagtagagacggggtttcaccatgtgagccaggatggcctcgatctcctgaccttgtgatccacccacctcggcctcccaaagtgctgggattacaggtgtgagccaccgcgcctggcctattttcttctaagttttagtagttttagcttttaaatttacatctttggccaggctcagtggcccatgactgtaatcccagcactttgggaagccaaggcaggcagattgcttgagcccaggagtttgtgaccagcctgggcggcatggtgaaacatcgtctctagaaaaatacaaaaatcagccaggtgtggtggcatgcacctgtagccccagctactcaggagactgaggtaggaggattgagcccagtagggccaaggctacagtgagttgagatcgtgccactgcactctagcctgggtgctagagaaagaccctgcctccaaaaatattaaataaataaataaataaataaataagtaaaattatatatttgatccattttgagtgctttgtggcccagccacccagaagcctggatgtccacatgtggctccaggcacagttctggccctatcatctctgtgtttctccttcaggaactggttgctgaaagcatgggagaggagtgcagaggtattccagggtctgtgttcaagaggaccagcccgttcctcacccatcaagtgttcaacaggtttgtgtgtcttgtgtgacttctgcgttttgtgctttggtaatcagctagggagttaggcagagtgctgctgctgatttcgcctgctgtggcctggttattctggctcagccgtggctcccaagtatttcatcctcataacgatcccgttcctgacttgggaaaagcacactttgtttcctggtggctctgctcccttggcagtcaggaagcagggatgaataattgccaggctgaagttcactcccaagagccctatatcctcttcttcccaaccttcaactcatacccacagtcagcttcttgtccaagacatcctctgaggtttgtgggggtctgtgcccttctctctgagtgtagttgacatattgtccgtggccaaaattgatctgcattttgaaagtagatttcggtgtgtcttatatgtcaggaggatgtgcatggactcatatctacttttggggcccctaattctgtgttttgtgttcacagctaccactctgaaacaaacattgtccggtacatgaagaaactggaaaataaagacatttcccttgttcacagcatgattccactggtagttatttgtggccttttttctcatttccaagctaccccaatcccacgtctcttggtcctacctaatatgctccaagagcaacaaaggggtggccatgctgggagaatggagggttgattgatggactatagaaaatcactaatgtgatacattttggatgttcttcttaaagggatcctgcaccatgaaactgaacagttcgtctgaactcgcagtaagtagctcacttctgtaagtggatactcagcaaggggcagtgttctagcttccacctaagcccagaactagtgaaatctactgggactgtgattctgtgattgaagaactattttaataattctttaccttgctattcaccaatcttgggagtaaccctgtatttctcacgacttcatcatttaaatgtatgggtaaacttattattttttaataaaattaattaaatgtatatggtatttatgcctttctatcctatccctcccccacccccacccccttttaaacctgtcatattaaaagcttttttaaaaaaaattgtttatagttctaaatctcaggtagaattacgaaccttaagccgtctttytagaaatcattcctgtatcagaaagatagggattcaagtcaacagaagatttgtgcaactcgctgttgtggttggcaagtatctctactaggccaggatccattttagcraagctttttttttctttctttcatttcttacgtttattctgamgtgacatatcatatcagacraaagaaatcattttatatcatgataagaatatttccctctctatttttttaaaaaatagagtcaaggtcttgctgtgttygccagtctgatctcagactcctggcctcaagcagtcctcccacctcagcctcccagagttctggaattataggtgtgaaccactgtacctggccttcccatttacttttgtgtttgtttcttgttccacttagtgaagaaagagaacaatctattgctatataagagtttatgccaaccatacctgaagcaactcattgtgtttcatggaaagaaatctgttttgggggcttttcttycctgaaaagttagcaaaacattgtatttttgtgtaagttccctttttggacaactatgtcccacttttaaatgaagacagtaayggtacttaccttataaggttgtggtggaacttaaataaattaacatatgtatagcgcttagaacagtgcctggcacatagcttttctcatcatcgtcattattattaaagttattattgctattgctattataatatgtatatatgcatttttgttttctttcttttcagcctatcacatggaaagaatttgcaaacatccacccctttgtgcctctggatcaagctcaaggatatcagcagcttttccgagagcttgagaaggatttgtgtgaactcacaggttatgaccaggtctgtttccagccaaacaggtaagggcatttcttttcttattgtttcagcaatctattcttgtatagcatacaccacaaaacttaaaggcttaraacaacaacttwtttgtgttattctgtgacttgctagacagttccactccactggggagagcatggctagaaggtgcatcgtgttctccctcacatagctggtgaggagctgtgggctgggagtgcatttgaggatgttcactagggccatagtttttctccatatggggctttccttgtagttccttgagcttccttgttccttacagcacaatgtcggggttcagaatgcgtgttcccagatgaagcatggagaagctgcaaatctctaatggccsaacctcctaagttacactgcatcccttccagattagtctatctattaaagcaagtcacgaggcgagcccagattgaatcggggaggggacaacacytgggtgtgaattttggtagatgtcgttcattgcggactgtctttggaagctagcttactacacctgtcagtgacacagcataagaagaaggatcaagcacacatgctgaattccaacaagtgtctcagtttagcagggccaggagaacctggatcctgctttggtaatgtcactaactttgaaaggtcccttctcctcttccagcctcaatttctttgtaaaggaaagactttgaagaagaacagtgattttcaaaagcaacagcctccagcaaaatctcctgagcacttgttaaaartacaaactccgggccccgctccagacgcactgatcataacctccaggggktgagactaagactctttatttttatttttatttatttatttrtttttttagatggagttttgctcttgttgcccaggctggartgcaatggcgtgatctcggctcaccrcaacctctgcctcctgcattcaagagattctcctgcctcagcctcccgagtagctgggattacaggcatgtgctaccacacctggctaattttgtatttttagtagagatggggtttctccatgttggtcaggctggtctctaactcctgacctcaggtgatccgcctggctcggcctcccaaagtgttgggattacaggtgtgagccaccacgcctggcctagaatctttatttttaagacaagaccaagtgattctaatacacagtcaatttggaatcccctggatttgtggtctctctgccttcatgatgatagatgacagatggaccgakvgatgatagatagatagatagatagatasatasatasatacatacatacatacatacatacatagatgaatgatagatgggcaggaatcatgttatcggtatgtgagtttacattttagaatatctttagaaaatgagttatggtatctgcccctaggttcttcacctcctgctgctcaaagtatagttctctaccagcagcctcagagttgacccctctgggagctggttagtaatgcaaaatttctgtttcaagatgccctaccttctgttttgtaacatagactacacagcaaagccatttactttgtaaaaacaatacaccctataaaatacaaaccctttgggaagagggtatgtggcaatgaaaggayacagtgctctcaattgcgtcttaaagtctcacttcataaataggtaggagctgatagcatgaaagtcaagctttagtataccttctttagaacttcattacttatttttgttttgttttaagagacaaacctcagtgaattctgaaccttgagtctatgatagttattaaatgttgaaaattaagaaatttcgccctctagtgacggaatataatcacattttcactgtcatattggagagtgatttttcaagactattttaattctggttattagctcttgcagtaaattgtgatcccagccaggatcccagaagactgacctaagaatcaggaaatttgtcttcttaaagcagtggtttacagccttggctaggaattagatcccatggtgactttataacatycctgatgcccacatcacaatcccagattgaatcataatctcaatggagaatgactggggtgagggaagggacccaggcgtgagtatttctttaaagttccctacatgattccaactgcagccaaggttgagaaccagtgtcttagacatttctccgctgtttttccctacatacctggtgttctttctttgtcctaatttttctcattcatatgatggacagtgagactccacaccctatcccaatcttgcagagggtaagagatcttcatcaygatgtcgttcctggcaatgatgtcttctccagttcctgagattcccagctataccatccatttccaagagctgatttgagcatggcaggggctttgcacaatgtttaggcttagataaaggaatgaaggatgtktstggtcatgagcagaagctgctgtgacagatgrgaaaatgccttattctttgttgagaaagtacaagggccatgcttctggtgagtaaagcaatttgatgtcttaattcgcagaaaaaaggaagggatacaccacatattccatatataagtgatttttttaaccttgtttcaatcctattttggcttatttgtgctaatctctgcacaagtgggtgacacatttcttgtcttataattattctgtgtctacaacagggcttacatattggctaatttgtcatgatttactgctggctagagtccagtgaaatctaggggacctatatgcacgtcacattttttgtaagaagaaacacaggtttcttgacaactctgcacagagggagaatttcgaataccatgtcagccactgatgttatactcaaaatagcaggtgcagtcacaggtgtcatcaaggaaccatttcctggtaatttcatttatacctgactaattagagtcagtcaatgtgtctgtagagttctgtagtcacaaaaagttttgaatctgaatgtttcctttccctttcattattgtatgatatttcagatataaccatagcataatttttaggaagtagccttagtagtatttcacaactctaaagtattttttattgtggtaaaatatacataacacaaaatttactgctttacgtatttttaagtgtacagttcagaggcattaagtatattcacactgttgtacagccatcaccattatccgtctgagagctttttgattttctcaaattcaagctcrggacctgttaaacagtaactcttcggttcctctttccctttttccctggcccctggcrgcctccattctactttctggctccatgaatttgactactttaggaacctcgtataagtggatcatacaatatttgtccttttgtgtctggcttatttcacttagcataatgtcttcaaggttcatcaatgttgtggcatgtgtcagaatttacttccttttttctttttttcagacagggtctcattcttttgctcaggctggagtgcagtagcaggatcttggctcactgcaaccttggcctcccaggctcaagtgatcttcctgcttcagcctcccgcttagctgggactactggcacgcatcactatgcctggcgatttttaaaagtttttgtagagacaggagtctcactacattgcccaggctggtctggaactcctgacctgaagtgatcctcctgccttggcctcccaaagtcctgggattacaagcatgatctcctgcgcctggcctacttccttttaaggtggaatatttcattgcatatatatagcacattttgtttatcccttcatcaattgagggacacttgagttgttccatcctttcggctatagtgaataatgccactttacattgatgtacaagtatctagttgagtccctgctttcagtttttattttggtatatattcagaagtggagtttttggatatagggtaattttatgtttaattttttgaggaatcgccgtactgtcttctgcaggggttgcaccatttaacattcccaccagcagtgcacaagggttctgatttctccacgtcccccaccaacatttgttattttctgtttcctcaagtaatagcaattctggtaggtgtgaagtggtatctcactgtggttttgatggacatttccccaatgattagcaatgttgagcatcttttcatatgcttaccatgcatttgtacatcttctttggagaaacgtgtattcaagtcctttgcccattttttaattgggtttcttgggagatttgttgttgagttatagcagttctttttttttttttttgagacgaggtctcgctctgtcgcccagactggagtgcagtggcgcgatatcggctcactgcaacgaycgcctcccgggttcacgccattctcctgcctcaccctcccgagtagctgggactacaggcgcatgccaccacacccggctaattttttgtatttttagtagagacagggtttcaccgtgttagccaggatggtctcgatctcctgacctcgtgatccacccgcctcggcctctcaaagtgctgggattacaggcgtgagccaccgcgcccggcccagcagttctttatatcttttttttttgagatggagccctgctctgttgtccagcctggagcgcagtggcgccatctcggctcactgcagcctccacctcccaggttcaagtaattctcatgcctcagcctcccgagtagctgggattacaggtgcctgcccccgtggccggcaaatttttttgtatttttagtagagacagggtttcgccgtgttggccaagctggtctcaaactcctgacctcaggtgatctgcccacctcggcctcccaaagtgctggggttacaggcgtgagacaccatgcccggctttttttttttttttttttttttgagacgaagtcttgctctgtcgcccaagttggagtgcagtggagcaatcttggctcactgcaacctccgcctctcaggttgaagcaattatcctgccttggcctcccaagtagctgggattacaggtgcccgctaccacatctgactagtttttgtatttttagtggagatcgggtttcactatgttggccaggctggtctcaaactcctgatctcaggtgatcctcctgcctcagcctcccaaggtgctggggttacaggcgggaacaccacgcccagcctatatgttctaattccttatcagatatatgatttgcaaacattacctatcattccatgaatttccttttcactgtttacagtgttttttgatgcacaaaggcaactctaaatatacaataaatataaaggatttgcaccttatctagcataatgtctgtggccttctctggtaaatattagcttttggtcaacctggatagtctaacctttatccactcttagtccatttttatttacattaactttttcattcctactattcatgatctaccrtggtgcaatttagatttatattctgtattatctgccttgacctgacccatgagagcgacatagaccctgactggagaggaggcctttgcactggaaatgctatgttattgacccagataccagttggccctgaatgctggtaactgtctgtcagagacgccactatgcctctggtatgcttgtgtcttatttggggttycccaaaatcagaccctgaaacaggaacttcagtacaagaagtttatgtggttgctgatcccggaaagcacagtggagaagtacagaggtgagacagggaagtgaggaaagctggaaaaggttgtattagtgaccaggttatcaccatcactgtatgggatcctagagatcagtcccattgggggcactgagggagactggatggaacatgcctccgatttgtcccagtgaagagctgaggaagccagagtatttaccaactgctccttcgttgcccgggaaggactgagaagctggagttagcaacacttgttcttcatttgttgaaggcttcaccccgggggccttaacccctcaatacttgaggcttgatagttatgggctgtctttcaaccaagaacgtgcctggcagagaacaccctcaggtggagaggcagagatgcttgagttcatatacggtcattttatgtcggagctgtccacagaagctggaagtaagcttcaggatgaaacaaagacctgtgagcagcacaatgatcctgtctgctacaggttgcctatagtaggcatggcctttggcaaatggataataagtattatataactagattaaggaagaagagatgccagtgcctttcaggggaagatggcagcctgagtgggtcctgaatggagaaggggactgataggcaggtaggatcaggaagtgttatggagcagatgggcttgctgcctgatgtgcacagaagccaataactatggcaccagcttttgagaaaagaagggctttatttattgcaaaaccagcccgcaaggagacaagagtcagctgaaatttctctcctctatttgggatctggggcaagttttaagggatcagaaggcaggggaagggatttgggaatgctggcttggcaaggtctaattagagggcttcagatttgacagcttacggtaaggtatgctgagccctacatcttccggatcagtagacccctcacttctgaagaagttctggcatgcagggtctggttctcttccagccttgttggttccgaggggcggaatccctggttctgggtgtcgttagaagtcaaagctttttctattgcacattcccagactacatgacttgcaactgtggactctgttataaggtaactcaacattttgttatcaacagaacaggcccagtgtgggctggtcctgcaattatagaagcagagagcctgcaagagtcaaggagccctagggtgagggtaagagttctttggggcctgaagagaacttggcttatggagatccacaaaccctgagacgaaaggcagttgtctgaaggaatgttcctgggtcgaaggtctctctggccttcagggtgcttcaggggaaatgaagagtggggccaggtcttccgtagttctgagactgtgtggattctagcctttgtagatgaggagattctcccagtgatgctcccactgcccccaacagaggactgacagcttgcagactggttctgctgctgaagatgttgcagcaacctgaactcagccctaagggtgaatggagccgtagccagcaaagggaaaattttagttgcacacttcactggacccagcaacagagaggaagcacagggagagtgctcagaacaggttgcccgggcagccagcgttataggcactggcgtgaggcaaagtcagctagttatagcaatacaacttcgatctcagagctggctgacattcagtattaagtaaaaaggacattctgcaactaaaaccatgagtttcaattttaaacaatcaggactgggcacggtggctcacagtcccagcacttagggaggctgagataggaggatcacgtaaggccaggagtttgagaacagcctgggtgacatagtaagaccccatctacaaaaaaataataaaattatcaaataaataatcaggatgggatactcttgaaaacaaaattagtgacttggaaaggtacttggaggaaatattccaaaacaaaaacccaaaatatacagattaaggctgtgagggaaaagttaaggaactcagaagacagattcagaagattcagcatttggggatgagaacatggaagagttaattaatattcatctgaggaagtgaaaaaaaattgtataaccaaaatgatggtaaaaaatgaaatgattaaagataaaagctagaatgaatgacctagaagataaaatagtcacaaggattaataaatacaaaaactgattatttgaaagatccagtgaaatcagttaactcttttcttgcctaaggaaaaaatatatatatacaaataagaaatgagaaagaacatacccagatatagataagatccaaagaattataaaggaatagtatatgctaccctgtgtcaacaaatttaaaaacatagagaaataaatgatttcttaacaaacatttaggaacataagggcatgttgaaaacagattaacagaggctgatcacatggagtgaaactagaaataacagaaagatgagcaaaattcacaaatatgtggaaattaaataacacccttataaataaccagtggaacaaagaggaatcacaaggagaactggaaagtactttgaagccaggtgcagtagctcatgcttgtaattgcagtactttgggaggctgaggcaggaggatcacttgatcccaggagttcaagactagcctgggcaacatagcaagacctcatctctccaaaaaaattagcctagcatggtggcaagcacctgtggtcccagctactttgggggctgaggtgggaggatcacttgagtccaggaggttgaggctgcagtgagccatgatcacgccactgcactccagcctagacaacagagtgagactctgtttctaagagaagaaaaaaagagaggaagtactttccaactaattaaaatgaagataccgcatatcaaacatcacgggctgtagctaaaacagtgctaacaggaaagtttatagctgtaaataactacattaaaaaagaagaaagagctgggtgccatgattcatgcttgtaatcccaacactttgggagtctgaggtgggaggatcacttgagctcaggagttcaagaccagcctcggcaacatagtgggaccctctttgtacaaattaaaaaattagccaggtgtggtggcatgcatctgtggtcccagctgcttgggaggctgaagtgggaggatcacttacacccagaggtctaggctgcagtgagccatgttcacaccattgcaccccagcctgtgacagagcaagatcctgtctcgaaaaaaaaagaagcctggaccagatagtgagacttagtctctacaaaaaattaaaaaagtagctgggcacagtggcgtgtttctgtagtcccagctactcgagaggccgaggccagaggattgcttgagcccaggaggttgaggctgcagtgaactgtgatggtgccgctgcactccagcctggttgaccctgttttaaaaaagaaaaaagaagaaagatcttaaaccaacttaatcttccaccctaaaacaacagagaaagaagtacattaagctcaaagcaagcagaaggaaggaaagaatcaggattcgagcaaaaaaaaatcaataacgtagagatggggagcaggagaggaggggaattataagaaaataaaatatagtgaaataaaatttagwacaacagatgttagctgcgtaaaactgcgtgtgtgtgtgtgcacaggggcataggtggaaagatgtatgaaaggatgggactcaaacagttgtctctaggtggtagaatatcaggtgattttactttttgtccttatgtttttagattatttaaaatttttaaagccttgatcatatgttatttagtcaattcaaaaaagatatttttatggtggagaacatgcgtattgtgaaacaactaaatgcatagtaagttggttataggctcatttgcacctggttctcctgatctcagagggttcctccatcagctgatggatatgggataaggttggctttgaagcttgccctggggctggaggcaaaacataaccacctccatctgccctagcggcacctctatcctaataaatacagtgaggtagtctcccagggcacccagttcaaactctgcagaataggataatatttaacatcaagtggactcagaatacaactctctggttctcaaatgaccaagtagcagaatgaaatgtaactttcaggcctgcatctggatttctctgcgtgtggcgctgctggctctgcctcatccttgctgctgtgcctttccgcgctgtcttctcatccagggcatttctgtgttatgcgcacagaaggcttttgttctttctgcagtcattccctgcccacatatatgctgcagcagggacctttctctttggtgaattttctttctaagagagaattcatcagctcaagggaaaggttaggatctagaaaatgtgaggtttttaaggctctgttatgtggcttcctaccaagtcatgttgtaggtttctctagcaacagaaaagtgaatgagatttaattcaggaatagacagtcaatatggatcataaaaaggttttataagtgctatagattgaatgtttgcattccttcaaaattcacctgttgaaatcctaactccaggccagacgcggtggttcacgcctgtaatcccagcactttgggaggccgaggcaggcggatcacctgagatcaggagtttgagaccagcctggccaacgtagtgaaactccatctctgctgcaaatacaaaaattagccaggtgtggtggcaggggcctgtaatcccagctactcgggaggctgaggcaggacaattgcttgaacctgggaggcagaggttgcagtgagccaagatcgcaccactgcaccccagcctgggcgacaagagtgaaaccccatctcaaaaaaaataagaagaagaaaaaaataaattataactccaaggtgacggcattaggaggtgggagctttggcaggtaattaggtcatgagggttgtacaatcctgaatgggattagtgccattattttaagaaagaccccagagagctctttaccccttccaccatgtgaggacacagcaagaccacagctatctatgaaccaggaagtgcgccctcactagacactaagtctgctggcttctaggatcttggacatctcagcctctagaacaatgggaaatagctttctgttgtttataagccacccagtttttggcattttgttatagcacctggatggattaagacaataaccataaattttgtcaagataactttgcttgatgtagccaagccttcactggtctgcctagttccttaggacattttgatcccaagggtgtttgaagggcctgaaagaaaaaatgtcaagaagcttatccctattttctcctatttatttgttcwacccataaaccccggggagggtttccagcttggtgtagaaaacagccaaataatatttaattaccttttcatttcccactgagcccagcggggcttgcttcagctttttctccataacactttgccactcttcaaatcattcagcagctcataagtacattctaggaattgctagtttagaattatgatgtgatgtttaaggcagacagaaagagtaattaacacctcccatggatatgtaaagtgaaagacaagttggaattattattagctcacttggcttaaaaaattgaggaagttgtttttgtccttaaaaactgcaaactgtgattgttaatgtagacggaggtggccattgcttttcccagaatctccttcatgggaagattcttaaattgwggtgtgaacagggctctcaatggctgtcagaattaattgtgcatgagaatcacctggagggcttgtgcaattactgagcctcaccctacagrgtttctgattcagtaagtctggagtagggccccagaatttgcatttttaacaaatccccaggtgatgctgaggcagctcgtttggccaccagcctgtgaaaaccactaggtttaccagaggttcttggacctggctgcatgttagaattacctggggagacttttgaagaacacagatgccctacctactgcacaaaccagttacatcagaatcttcgctggggatggagcccatatgggagagttttggggtttgttttttttttttttgcttcttttgagatggagtctcactctgtcgcccaggctggagtgcagtggcatgatctcagctcactgcaatctctgactcccgaattcaagcgattttcctgcctcagcctcccaagtagttaaccgatgctacaggtgcccgccaccacacctggctaagaagtgggagagtttttaagcaaaaaactctctaattctaatgtgcatcactgggttggagagcaatttggcctggaggaacaccaaagagaaaggtttagcaagatggatgtggctatcatatgcatatcacaaataatttagtgcagggagggtcaaaagcccactatttgccgtctccctcccctcccttcctgagctcatggttgacatcactgatcatttctggtaagttttccaccgagcctagtgcagcttcagaaacagagtactctgggggccaaatatgagagacctgtaagccctctctgatttcccaaagaaacagtcagaatgccaggaaaaaagcagggtgagggatgaggagagccgtctttcgggaaatgtaaagcagtgagaaggaactcctctttcccaatttccttaactctcaagagtatattttgatttttgaagtttgttagactttagggcagtggttctaacattggactgcaccccagaatttctgattcagtattcgtggagtggagcctatgaatttgcatttcttttctttttttttcttttctttgtttttttttttgagacggagtcttgctgtgtcgcccaggctggagtgcagtggcataatctcagctcactgcaacctccacctcccaggttcaagccatccttctgtctcggcctcccaagtagctggaattacaggcacccgccaccacgcccagctaatttttgatttttagtagagatggggtttcactgtgttggccaggctggtcttgaactcctgacctcaggtgatctgcctcccgaagttctggcctgaatttgcatttctaacaagttcccaggtgatgttgatgctttctattgtctgggaactagactgagcgtgagaaccactgctctgaggcgctcttctgataccagctgatttatctacgttttttgactagatagcaaaggttaattatggaactaaacttatgtcaaattgatacagattggtaagaacattacagagtgttgtgttgaggggttttgattttaaatccatagagatagagacctggctaacgttagggtacttgagacatgcagtacatggagtttcactggttaaaatcataccgtttgcaaggtatttgtactgttaaattgttagtcacctgttttttccacctggtagataggaatctgcacccatttttcccttattttcttgagagtggtcctctgaaggtgccatgaactgaagtgggtcatttcgacagtggttgttaggatcactttactgccatcatttttaccgtatcggtttcttagctgatgtttcacttgcatcgtttttgtttctcaacgtaaaggagagtttggatgaggggagtctgacatcaaagatgtccaacaccaaacccttacgtatcacaagcaactgtgaagtatttccttctggggggtgacactgggtaggatggatgggggtcgcttttttcttcttcttttgctttataacccttctgcactgatgatggattttttttwaaaaaatcacataaatgtattcttttatttatttattttttaagatagagtcttgctctgttgcccaggctggagtacagtggcacgatctcagctcactgcaacgtctgcctgccgggctcaagcgattcttgtgtctcagcttcccaagtagctgggattacaggtgtgtgccaccacacctggctaatttttgtatttttattagagacagggtttctccatgttggccaggctgatcttgaactcctgacctcaggtgatccacctgcctccacctgcctcagcctcccaaagtgctgggattacagcgattcttgtgtctcagcctccctagtagctgggattacaggcgtgagccaccatgcctggcccacataaatgtattctatcataaaaattttaagttcacctgtgaaatagatagcattatgtccacgtgacagatgggatccagaggaataatttgcttggagccagacagctttgaaaagggcagcaaataaaaaacaactttgatattagaggtgagagaaactcccgggtggctgcaggaaatacctgtttgtgagatctgcctgggaatgagtgactttaacatgatcttgttgtaggaaacatttaacagtatgtgccacctaagggctcctgtttgcaaacaacagaaaatggcttgcattaacttcagcagaaaaataatttacagggaagttattgggcagttcacagagttgatggaaaagctggagaattagacttcagcagtgagtaagacccaagaaaggctggcagcagagaagaaaatggagtctcaccatgcgaagagtcaccatcttcactgtgggaaatatggaactgtcccattcctttggtctgtccatccagattcataatgtcctggctggagtattgcacaggatgtttcacacctccatgtcttattagtgtttagtgactgggaatgtctaatcctttttgctttcataggggagtgtaggaccgtgtctctcccatagactcacacaaaagagggaattcccccagataataaagccactgaaaggctctgcattcccacacacacctctaaactcagcaccaatgaaaacccagttgattttcaacatcctaatgtaaccctccttcgtacttttaagcacattgacagcatgtccacatgtcattttcccagcatcattttctgaattgcatttgtmcttactgctcgttggctatggtagtttgcagatactttctcccgttctgtagcttgtccttgtaaccctaatgggagcaaaaagtttttaattatgatggagttcaatttatcaatttttttcttttatgaattgtgctttgggtttcaaatctaccctagatcccaacaatttttattctgttttttgtttttcccagaaatttcatagttttatgttttacatttaagtccatgatccatttacaggtgatttttatataagctgtgagacttagattgtgcctatggatgtctaagtgtttcagttccatttattgaaaaggcgatctttcctccattgaattacttttgcaactttgtcaaaaatagttgggtatatttgtttggatctatttctggattctatattctattccattgatctatgtgtgatctctgtgtacataggcttgattattgtagctatatatgatagtccccacttatttgcagtttcagttacccatggtcaactggctcaaaaatattaaatggaaaatttgagaaataagcaattcatcctaagttttaaattgtacaccattctraatagtgtgatgaaaccctgcagcatcttgttccatcccacctgggatgtaaatcagccctttgtccagcatatccactgtgtatatgctacccacccatcagtcacttagtagctgccttggttaycagatcaactgctatgttatcacagcgctttcaaggaacagtgaaatcgtacagtggcacgatctcactgcaatgtctcattgcaaggaacccttattttatttagtagtgtacccaaagcacaagagtagtgatactggtatggtggtgtaattgttctatttattcttagttattgttgttaatctstaactgtgcctaatttataagttagattttatcataggtatgtatgtataggaaaaatcgtagtacacctgggtttgggtgccatccatggtttcaggcacccactgggtgtcccggaagatatttcctgcagataagagggggctactgttaataagccttgccatcagatgaactgatttgtgccagtttctttcttttttttttwaaaaaagtagctattccagttactttgcctttacatatgcattttagaataatcttgcttgtgtctataagaaaatcattattttgggggaggatgatgtatattttagcttctaaatgttacattttgtacaaagggctgtatgctggatgctatagatattataggtagttgaagggaacaaattcacctcatatttaaayttataatttatcactcataaaataaatatttttcatgaaaaggtatcattttaaatgtaataaaatattttttttaaaaacataccccgagaaactttttttttttttttttttgagacagagttttgctcttgttgcgcaggctggagtgcagtggtgcgatctcagctcactggaacctccacctgctgggttcaagtgattctcttgtctcaccctcctgagtagctaggattacaggcacctgccacaacgcccagctaatttttgtatttttagtagagacgaagtttcgccatgttggccaggttggtctcgaactcctgacctcaggtgatctgcccgyctcagcctcccaaagtgctgggattacaggcatgagccaccatgcctggtcaagaaacttcttaagaagttcaaatataagaagtaaaataggtccactgcttataaataacttcaatgggaacttcactgaaatcacacactaaaggtggccatccgtgcacaaactatgatggtgtgttaaaaactataaaatgattttcagaatatttagggaaaattaaaacaaaaatagatatggtcaatctagatatttagtaattcaaaaatatataaatcttaatttcttggtactataatttttaaaactttagaatccacagcgtggtcttttcttatggcacatttttaacatcttttgacttgtataaaaatacaacattctatttgagaacacaaatactgttttctccatataattacaatgtgattcagtgggagttttggtgactgctggtgttcaccataaattattactttagtgcattctgcagtcttgcaaaatgggtttcatgttactttttgcatatataaaaagcatgcagctacagtgacccatgtccaaatattccaaagcagtcaccatctgagaaattgcttatggtgtctataaagttagccacgatgttttttaatccccccggccatgagactgagtctcactctgtggcccaggctggagtgcagtggcgcgatcttasatcactgcagcctccacctccttgctttaagcgattctcctgcctcagcctcccaagtagctgggattacagatgcacaccaccacacctggctaatttttgtatttttagtagagacagggttttgccatgttcgccaggctggtctcgatcttctaactgcaggtaatccgctcgcctcggcctcccaacgtgctgtgattacaggcatgcaggcatgaggcactgtgcctggtctgcaacatccatttctttttgtttgtttgtttttgtgatggagtctcactctgttgcccaggctagagtgcagtggtgcgatctcagctcgctgcaacctccgcctcccgggttcaagcaattctcccgcctcagctccctgagtacctgggactaaaggtgcccaccaccacacccagctaatttttgtacttttagtagagatggggtttcaccatattatccaggctggtctcgaactcctgaccttgtgatccacccacctcggcctcccaaagtgctgggattacaggagtgagccaccacgcccggcacaacatccatttctaattctcagtatgtttggctagggttcttagtaaagggaaagataaattaatttttaaaatctttaaaatttgttttttctttgaactcccgttccaaccttggcaaaggaacttttagctcttctgaactatcaccctcaccctatctctgccatgtcatctacaaattctttttttttttaagtttacattgagtattgctcctgaacttgcacacctgtgatgatacactgatactgaaagggcctgggttatagtcatcacaatactgttgaattccatcaactccagctgttttcaccttgtgggctcttatacctgttattcagttgttctactttttctggtctattgaatttcttgtggattctttgtagaatgaatctgagttttggaagaagttgtctgctcaatttccccattctgcattaagcagcagctccttaatcagcctgagtaaatgccatacactggagggtcttgtttttcttttcttcttttttttcttgaggtggagtctcactctgtggcccaggctgcagtgcagtggtgtgatctcggatcactgcaacctccacctcccaggttcaagtgattctcccacttcagcctcccaagtagtctggattacaggcatgcaccaccacgcccggctaattttttgtatgtttagtagaaatggggtttcaccatgttggccaggctggtctcgaactcctgatctcaggtgatccgcccaccttggcctcccaaagtgttaggattacaggtgtgagccaccacgcccggcatggagggccttgtttttctaggacagtttaagctgtgctcacataaacttggtgtttctgaggctccccgttcactggccagccctgcagctccagaccattcactacttcattttaaacagatgtcagaaaagcactgacctagcctgtcctccatatataatagtttgttgatggttgcttagtctgggttatgtagataagcaattatttttcataagacttttctaccaacaggtggcactaacaatttgttttactaatgccccagtagtaatccttgtgtcacatttgaatatatcatttgcactttttgggttgaaacatagctgatttttatagatgtttaaggccagagagagagagagagagagaaatccagcatttctgatcaagtctttagcatatagtctttctcctacactactggctcatagccagtaatctgcctcttccttcattcctagtctacaccttgattggcctttcaagaaagtcagatgaatagaattcatgagaaaaacataggggtaaatataaaatgtttttcttgaggttccttactgtaggggaaaggatgacattcatattgattgcctgtgctggaggaattcaatttttaaaatatttactaaatacttattgcagaactactacatgcagagtactgttctatatattccctgttgaagaatatacagaactctgagaattagaccctactktcagagcttatgctctaattgagataagacaggcatacaaagtaaatgtgaaatcggtaataattttctatgtccagtacatgtataggatattaatgtcagataagattgtagagtaaaatgctatgataatttggaggaggtagaggattatttmtttaatcaatctatcaaatattttttatgtcagtgttcttggaatagagaatacaattgtgaacaaggttgacaaaattcttgccttcagggaaggcctctctgaggaagtgacagagctggattggtggctttagggaaggctttgcagagagttgtagccagttgaagaatgggcaggatttggctgagaagcatttgaccttgatgatctcactacwcatcacatctgccctgtgtgatgggtactgttactatccccattttacacatctctcaggcacataggcacagggagatgaagttacttgtgatgtgagtggtttcctgaagcacggcatattcattttcttgtcctcaaaatgaaaaaacctcaaataggctaggacttgtttttcagaagccaggaaaacagaagagcagtctttgcctttcttcttggaagagagcggagatagctgcagctgactcagtgcgggtgacgaggaacggggtgactcaggtcttgtaagacaggctttctttcttcttttctttctttttttttttattttttattttagctaaaccccccagttctatcaatcagacaagacttctgctagaaagaaaatcagcatttgctcccacaactctccgtccttggagagcacagtgtgctcagaagagcagcactgcttgcaaagggagcccgtagctctgggaggcaggctgactccacacccaagtcttcatctgtcactgttggccatttggcatgtagcactcagacctcagtttctttgtgtgcaaaatgggggtgatggcatggagaacatacacattttttaaaattcttaccgattttctgtgggtaacattaaaaaaagttattttatttttaaattttcatttgtttaaagtttaaatttttgtatctttttttagtatttaatttttgccttcagcttcgcagacatacacattttgaatgggactgatacatctattactcatttcccttcccttcctgcacrgggtactgggaacatgaaataacagtctacgattgagtcagcattgctcaccggaatgttagtcatkgcatatgccctgaaagtggtgccttccaggaccgttgagatgaggatggccagcccctaacagccatctgcatccggggcctgggagagccgaacctgagactgccaggaatggtgtcacattaaaagtgcctcattcttttggggctgatcaggcccttgactcgatatttggtaatactaagaaattatagagtgatgatttgttttcacctcataggtgtgtcttccttaaaccttgttaagatgttgacacattacccatttaaagggggaaagaaaagggaaaaaaaaaggaaaaaactgaagttcattgttctaggtgtgacaattgtgtttgtagttatttatttattttttgagacgggatctcactctgtcacccaggttggagtgcagtggcaccatctcggcttactgcagtctccgcctcacagactccagtgatccttccatgtcagcctgcccagtagctggtactacagatgcatgctatcacaccaggctaattttttgtacttttagtggagacactgttccgccatgctgcccaggctgatcttgaacttctgagctcgaatgctctgcccacatcggccccccaaagtgctaggattacaggcatgagccattgcacccggcctgtagttatatttttaaaaacaatacttatctttgaaggctgcatattgacatttgaactgatgataggatgtttgaagtttgcttcaaaatatatagttcagcatgaaagtggttagtgagaaatataataggaaacaagattgaccgtaaaccaaattgttacagctggctgacacacacgtcgtagttccttttgttcttcactgtattttggtatagttttgaaatttttcataataacaaaaggctattttcaatgcgtggtcctgagcaaggatatagaaagctccatctttgggtaggagtggttgagctgtagtgcacaaactggatgctgttgctttgattgttttgattgttcaagaccttttgactccagcagagctccttgatgagcttctctcagcgtctggacagtgaccatgtgtcacgtgctggtgaacccctggccagggcccaataaatattgaatgagtaaatgaaagccagaagacctaaccgtgatccctttcttcttgtctttgcaagcggagcccagggagaatatgctggactggccactatccgagcctacttaaaccagaaaggagaggggcacagaacggtgagtatggcaggaggtggcgcttgctcaccatggggcacagaggtcctggctctcagggtcccttctgtgggacactccctccaagccttcttggaagcagatgagggaacatatagtcaagaaacaaatttctgtgaactagccattatgatccttgcttccaagacatcccacttgaccattttgaggaaaaacattcagagataaaagacttgctcaaacccagaatgcaaacgtcagccagttggctgtggaactgctctctagggagcagagggaggaagagggcaggaatgttgccattgcaagcatcctctccttggctcagccccggccctgggcctggatgaagggcagagaccatgctttaattcttcagtaacccctgttgtgctgaagcccggttctggtcatagtatgctcaaacaatatttgttgaataaataaattctccattagatgattctcaacttcaagcaccaaaaaaggcataaagcagagttcacggtcctgcttcaatgtttgctttggatatgagaacctggtctccaggatcccaatcgcctcttggggaccactgtggggaccagcaggtactaatggacaccactcgctccccccaggggcagtgcctgtagcagtggcctaactcaggcctcagcttgtgccagaggaggcctgtgttcctggttccttcattttgatggccagtgctatgctagagtttgtactgagctgtggggcggaagtccttaataggagcatcgcctaggagccgagagcagggcaaaagcatctgctgatactagagagttgcagacaaaggggatagggtggtgctggctggctaagtaagtagggtggagtggtagtggcccgatcttagtccatttctggttttattaccactggaaggttacttatggctagttgcctggaatttgcaataaagaatgctgaaagtgtttcacttccctttcataacaggggaaacgaaggaacatttttttccctscttcccttgcatagttcatcctgattccacaggtgtgtctttccaggctttcatcttggttggggaatagaattttttttttttttttgagatggagtctcgccctgttccccaggctggagtgcaatggcccaatctcggctcattgcaacctctgcctcctgggttcaagcgattcttgtgcctcagcctcctgagtagctgggattacaggcatgcgccaccacgcccggctaatttttgtatttttagtagaaacagagtttcaccatgttgatcaggctagtctcgaactcctgacctcaggtgatccacccgcccctggacctctcaaagtgctgggattataggtgtgagccactgcgcctggcccttttttttttctcttcatagctcactgcagccttgaactcctgggctcaaggaagcctcccaaagtgctagggagaccaggattacaggcatgaccctctgcacctggccctagaattcatgtctaaagatctttgaaaaacaggccattcgtgaattgaataaatgattaaaccctggtcaaggactgcttgccagtccagagagaagtgaagtggtcaaccagacagacacagaccctgaaattcccccacagtttgttcattcgtggttctgaattctcagctttctaaggaatgattagtttagaactataattgctcttgggacctgagagtctcggcactttcacagaatcagaaaggaaactttggagctccaggtgtccagccagtaaaacaatgccagattctctcctgtctgtttttccctcatggcttccatgttctgaggtcgtctctggagttcctcttcattagtatctttcaccacgaggtgcccaggagcctggggatgctggaaaggggcagcctgtcctgtgtgacatctccacccgactcctccactgcttggcggagaggccgcagaaagcagtgtttgcagaaagcaggtgactagctaatggcaaagggccagctaaaatccagattctttccacgcagtaatgcttcccacccctcgccatttcccaaatttcccaatctgacaccaggaagtagctgtgaatgtccagcagctggggaccaaactggaaaggccaaggagaaagaatgaaaggcctttgggtttggcctgggcggggttcttccgtgacttgtggattctttctggttcctgttccctctctttgtgttttcctgtcctccttcccttctccacccactgtgtgtgatgtttctcttggccccattgcccatcctgccatcactgaagtgtcatgagaggccatttcactctgcaggagggagaggggctgggtgctgtgcttcagggagagggggaaagggagaggcagggaagccctccagccactgagctggtagaaatacaaagctcattagcctggaaatgttggcatccttctggatcagaaattttaattagctcgggcatggtggctcatgcctgtaatcccagcacattgggaggctaaggcaggcagatcacctaaggtcaggagttcaagaccagcctggccaacatagcaaaaccctgtctctactaaaaacacaaaaattagccaggcatggtggtgcacgcctgtgatcccagctactgagggaggctgaggcaggagaatcacttgaatccaggaggcagaggttgcagtgagctgagatcgcaccactgcactccagcctgggcaacagagcaagactccctctcaaaaaaaaattttttttaattaaagccaactttcttagttagagaagaaaatgatttagtattcactaatcagggaagattttttcacatcactgatgtctgaggcagctgctcccacacaatagattctaatggaatccagcaaaatatatcattcttttttgaaagggagtgtggggaagtcatgtgcagggagtgtggggaaatcatgtgctacagaagtgcctgggctcctgatgggtcttttctttcaagctgctttttgaagttattttcacattttctcttaggttaaatttcagaggttcctaaaatggaatgcctaacttcttgatttatgagtttactttgggagaatacaaatttatttaacaaacacttatatggcaattaccatgtaccaggcatggcctttaacactttataattaatatttcaatttgtcagtcaaatcctgacttactcagcagacctccagatcttacgaaaaaataaaaactctaaagaaaaacaattaggtttgctgttcagagtctgagtttcctatacaaagggaaaacattgaccaaaggaaacaaattatgttatatgtaaatcaacaaagaaagctcaaaacctgtatgggaatatttttttcttcccaactgcctgagacaaagtagtggcctttggttgttagattttaccagtggtaagacattagtttcccttgcacaggagatctccttaacccttcactcattcaacaagtctaaagatgacctcatgctattctatgccacgcggcaccctggggagttgagaaaacatagcaccccctaaatgggcatcaatgcaccaaatgctggatttgctttggataaaccaaaacttcaaatctgggtcgtgttacttccatatccctcacaacaatacaatttttttcccccaagagagactctcactctgtcacccaggctggagtgcaatggcatgatcttggcttatggcaacctccgcctcccgggttcaagtgattctcatgcctcagcctcccaagtagctgggactgtaggcgtgcaccaccatgcctggctattttttgtatttttattagagacagggtttcaccatgttggccaggctggtcttgaactcctggcctcaagtgaaccgcctgcctcagcctcccaaagtgctgggattacagacatgagcaacctcgcccggccaacactacaattttaaactgaggaaaaacttaacattataaagaataattaaagtcctctaaatcctcatagaaaaccagaaatgtctgacagcaacatataaatgagtgcttcacaaagccactgtgacttctctttccatcgctccttgtaccaggatgtgtattagtttcctatggctgctatgataaatttctacaggcttagtggcttaaaacaacacacattaattttcttatagttgcagaggccaggtgtcagaaattggtttcactgggctaaagtcaaagtgttggtagagctgattccttctgggggagacaggggagaatctgtttccttacctttcctggcatctgcaggcctcctgcgttccttggctcgagcttcctgcttcagtcagcacatctcccgctccctctgtggtcccatctccctctgcttccctctgatgaggacacttaagaatatatttagggcccagcccaaaatccagaagaatttttccatctcaagatctttctttaccttaatcccatctgcaagtcccccttgccatataaggaaacacccacaggttccgaggattaggacagggatgtctttgggagcccgttattcagtgtaccacagggtggttgacgtttttatatgtttgtgtttcaacagaactcacctggtatgaattcttcattttggctttctatgaatattttatatttatttttaacattcccctttctccttcttatcaatattctgccctgaagggatcctttcatccaacgatccttttgtagactagcaatacctgtgagagaggacagtgcctccagcttgggtcctcagaaattaaagaaaaaaattaactacaaaagggaagcattcaaacaagaaaaacggatttgaggacaacgtgacataaccagtatgagaccaacagccgttctaaagggacacaaaccttctgacagtagaagagtgcaaagtagttcatgtttgcctttggctaatgttttctttttgtacacgtttatttttcttaagtagactcctttgctgtttttgaggaaagagctgtaagctaagatttaacttcatagcctattttcaataatgcccatccatctctctgtgggataaaaaataggaggatgattttcagggtaatcatggcttctccttgatgctttttgttggggaaaaccttctgacttactttcccactgggacacatcgtcagttctacaagagcctgtgtccacatggttgtttggaggaaatgaaggatgatttgagtctgagaattttagcattgcacctactgtccagcttccataaaaattcagtgcagctgtaagctctaacttaggctcagctcttgaggcactttgccttgatttccttaacctgaagctacatccccttgtccatgtttctgctgcatctctggactctagacagtcattcacaggccaccattgttagtgagtgagttgtgtgaacccggggtaggggttggtcatttttatttttagctattttttttttttgagacggagtcttgctctgttgcccaggctggagtgcaatggcgcgatctcggctcgctgcaacctccacctcccggattcaagcgaatcttctgtctcagcctcctgagtagctgggactacaggcgtgcgtcaccacacctggctaatttttgtatttttaatagagacagcatttcgccatgttggccaggctggtcttgaactcctgacctccacctcccgaagtgttgggattacaggcgtgagccaccatgcccggccaggttgatcttttttttttttttttttttttttwaaawacggagtttcactcttgtcgcccaggctggagtgcaatagcgcaatctcggctcaccgcaacctacacctcctggtttaaaccaattctcctgcctcagcctctcgagtaactgggattacagacgcctaccaccacacccagctattttttgtatttttactagagacggggtttcaccatgttggccaggctggtctctaactcctgacctcaggtgatccacccgcctcggcctcccaaagtgctgggattacacgcgtgagccactgcacctggccgggttgatcattattaatgcttagtttatggttcttatagaaactaataatttattacagagtaaacatccgataaatattgatataattggtgtattggtactgggaggccttggaattaacgtctgtcattatcatctgtcctggataagccaagcagagcactgaagctgtgatgtgggccctgagtccttgagtttaacttccagtctcatgttcttctaaggtgctttctgtgtatcctaactgagacaaggttagaataagtccaggcctatttttattgtactgggataaaggaagattgtattgatttcctgagcatcttcagggaacaatatttagggattcatatggaaactttttttggacattgctttgcaatgacaaataattaaattgtagcagattttaaagcactagtgttcagcctaaataaaaacaggtggtgtctaatttgtgctacaagcatgttgtagtacttttctgtcattattcatagtctgatgatgattttgctctttctttgcttcctttctattctgtaggtttgcctcattccgaaatcagcacatgggaccaacccagcaagtgcccacatggcaggcatgaagattcagcctgtggaggtggataaatatgggaatatcgatgcagttcacctcaaggccatggtacttgtcttctccttagcagatgggagaggccgggatggggagtgctggtggggatcagggacttgatggattatgtaaatgtcttctcttgcattctaatgaaaagtctgcagttcttcctttgaccagagtctactctacccctcccatcaccaacagggagaaatccccgttttctaattccagcttgtgtaaaaaactgaatgaattattcatggtggtagtaagagtactccttgcagaacctgcctgcctctttctgcccaatcttccctctccttctcgccttccccacttaataatcaaaatggcagtcacacttacacatcttcgtgtcaggaattgtaacacaaatgtcagctttgcaaatatccatgactgtgccagccccatcatgctgaattcctggcatcatgcagcttggtttccaccaacccccactctcaacctcccaacctccaggaagaagttgcttagcaaccgtatctgcttcccaccagcggactggcagctgcatcttaagcgggaaggaaaccagtggaatagcaatgtgattttgatggtggtgttattaggcatggagactgtgaactctgtgcagttgccttctaaaggaagctgaaaatccacaatgctgcacctctcttcgatccacctctacccttccattgctccacaaagcttttttccaacaagtgttccaggccagtagttgaaattattaagtccctccattatagtaatataggacatgacttccctggccacccccatgttctcaaacatgcctgctctgatatgctggccaggaaaacaaacagggatgtgacttttatatatgcttgccttctgtaaaaggaaagaataaagaagacttttatttacagaaacacttcttgtgggaattctttttttttttttttttccaattcctgttctttatctttttgtttgtttgttttgagacggagtctcaccctgtcgcccaggctggagtgcagtggcacgatctcggctcactgcaacctccgcctcccgggttcaagcaattctcctgcctcagcctcctgattagctgggactacaggcgtgtgccaccatgcccagctactttttgtatttttagtagagacagggtttcmccgtgttggccaggatagtctcgatctcctgacctcatgatccgcccgcctcagcctcccaaagtgctgagattacaggcgtgagctaccacgcctggcctctgttctttatctttttaaatgacaatagttgtacatagtcatggggtatatagtgatgtttctatacatcaaatgtatagagatcagatcagggtaatcagcatatccatcatctcaagcatgtatcatttctttgtgttgagggaacgttcaatatcctccttctaactattcaaaattatatattgttaaatatagtcatcctgcagtggtatagaactctacaacttactcctcctatctagctgtaatttgggaattttaacttcaacagaaggcaagggaaaggaatggatatgagaagatgagcagagagattaactatgagaatggacgcacctagaaccacaaacgtctgaaatcrttattgagatgacttgaaccaagggaaaaccaccttagagagttgggcccaaaatatccaaaaatcttgtgaatagtccttttggtctggaccatagagacctagcctsaaaggatcttattatttctttttttcttttttcttttttttttttgacgtggagtctctctctgttgtccaagctggagtgcagtggtgtgatcttggctcactacaacctccacctcaccggttcaagcaattgtccctgcctcagcctcctaagtagctgggattacaggcacctgccaccatgctcggctaatctttgtatttttagtagagacggggtttcaccatgttggccaggctggtctcgaattcttgaccttaggtgatctgcccgcctcggcctcccagagtgccgggattacgggcatgagccaccacacccagccaggatcttattatttctttggaatgatttgtgaagggagtaatggctgtggtttttttttattgctgtcattgtactttgagacagttccaggaaagtaaagactgagacttcatctttcttcatcctttaaaatgaaaggcgaggatttggccaagaaagaaacatatcctccctccatgtccttctctaccccttttctttcacaggtggataagcacaaggagaacctagcagctatcatgattacatacccatccaccaatggggtgtttgaagagaacatcagtgacgtgtgtgacctcatccatcaacatggaggacaggtctacctagacggggcaaatatgaatgctcaggtgggaactgaagaggcccgcccttagttcccactgagaaaatggatatgtggaaaaaaaaaaaaattctgacttcttgagaggcttcctgcctgagggaactcagacccacgacctgaccactggtggttgttgatctctcatggccttggaaagccacttatcctggcatcagctttatcagctgtgaaatgggggctcaaagggcccaatcctgattacttgggggacagaggatctatgtactgtgaacctctgaagaaatgctgttgggagcccctgcaggagaggagtgacacaatctttttgagactcttattggtgtttgcttttttcctttttctttctttctttctttttttagatggagtctcactctgtcgccaaggctggagtgcagtggtgcgatgtctgctcactgcaacctccacctcctgggttcaagcagttctgctgcctcagcctcccgagtagctgggactacaggtgcatgctgccacacccagctaatttttttaaatttttttatttttatttttgtattttagtagagatggggtttcactgtgttgcccaggctggtcttgaactcctgagctcaggcaatccacctgcctcagcttcccaaagtgctaggattacaggtgtgatccaccacgcccgacctcttttttttttcctaccattttagagcctttctttggttctcattcatttcacaagtgtaatccagagmttgtctattggttctgtagcataaatgaattctgtacctttggtcaccatcaaaattagtcctaacacccaagtggtgggaaggctagtgggatggcatgcctggyatctgggtcatctcgggaagrctgcgagccttgccttccctctctcagttcagcctcctccctggtgcccccgcagccccttccatcactgtgcccaacggggccgttcggtaacgtgcatcatactaaagccgaccacgcaggggaaggtagcgctgctcagggaagagttgcctatttcaacaacatggaggttctgccctttcttgtgttagagacacttctctccctytgtggtgtgtggataattaggaagagactgtgtattcaaatccatatttttaaatctaaattggactaaatggtcagttgctatttccatagcaaccacaagcactctgcctatcggatgccagtttgtgactacggaactgggccagtatagaggacatttctgtgaacaccatggatgtggctctgcctgcttttcctctgaggggagaaggcagcaccggccagccatggcsttcacactggagggtgcttccaagctcttgacttttgcttttggcccttgcctttgtggtaggtgggaatctgtcgccctggagacttcgggtctgatgtctcgcacctaaatcttcacaagaccttctgcattccccacggaggaggtggtcctggcatggggcccatcggagtgtaagttctgggctgctggtttcaggatggctttggagacagaatgaaggagtggccctaaatagactactcatcccatsaaagtcttcatgtgttgaggataccctcatyggtgtagtgcacttgtaggggctgggggaggagcagcaaaatgggtgcttttaggggatttccaaagaaaagcgtaattagattttactaaccatagcatctggcctcactgagcttccagttgcacatagacagcaggtttattaacagaataatgaatagggaacttcacctgagcatacgtattgtaactggaatattggcactagaaagtgcctttcggacttttggatttcctagcattttttttttcttttttaaaatcagctaatggttccattgaaagtgaattagatgtaaggtgttgagataagtaacacataagtaaggaagaaacaaacctggttactagaaataattggatgaagccagagtaggactgaaggaatatttcttagctgtggataactttttacactgaaatcaaatcatcttgggaaaatgatgatgagagcagctgttttcctgagctgcttcagtctcccaaaaatatgctaaagaagtcagttttcagagttgctggaagcttggccttcttacttttttcttctttcttgttttttttttcttggactacggttaaagtgagattcattttgatgatgattatttctagtaaatgtgtgagctccagtgcttcagctgtcagggaggtggggagaatgatgttcatgtcagcccatggggcatcttctcatcagcccctcctatgtccatcttgggaaagtgtataggggtgagggaatggggctgggagtgggagggagggacatggaactccactgttttatggctgcctgcctctatcaagccctccaccacatttcttgggtgagccctgggacactgatggctggtggacctccaccagaggaggaaggaaggaaggatcgcttcctgaacatctgcctcccagcaggtggagagtcccttccactgtcagagctcctctgctaagaacaaggctttctgggagggcccagaaccttcccattagattaaactgaatcgtttacattttctgaatttgcacttaaaaaaaatacaggaagaaacatctcgccccgtttttgcccaatcatcccgtcatttcactaaagcggaatgaggatgcctgtcctgtgggaaccgtcagtgcggccccatggggctccagttccatcttgcccatttcctgggcttatatcaaggtgaggcctgggagtatgtgcaggtgtgcaggtgggtgggggcgtcaggcatgcatggggaccggatactgcagacttcttggcttaaaaacaaataaattcatgatctgagatgtggttcaaagaatattgctgatggcctgggtggaagaaaccttcctgaagagatgagctaaaaatcatttcatctctccttcattacactacttcttttgggttctcagagtgggtttaacatcagagaaactgaaacatcagatatatttttccagacacagctaagttccatgagtcatatggatgttctggccgcrtcctttggtttcctgcaggatttatatagccccttccgagtgaaaagcagtgcatgtactaattattccactttgctgagatcctgctatatatctcactttgctatatatttcttggggggggccagaggagaagatgaaaaatagcagaaatttgcttctctggtttttccccagagctctttggcctttagggtttgtggtgctgtgctctctgcgtaattagtcagagtacaggcttccttcctttgtcttattccaaataacaccagggccagagttgattttctacagttcttgttcacactgccctgcccacctcctggactgacaagactgtgaataagaacacttgtttggctgctcattagagcagtctccccaaagcagtgcccctctttaaaggaaggcgggctcccactgaaacaaaacccccaaaacgcagctatgccaatcattccagaggactctgtggagctgactgtttatttctggaacagcatggcatttatgattcttcacgaaaagtttcttggaagccggaacaattctgtacctcagacactaacacttgcttttaaaaatgatactcaagttgttttgcaaacaacacaagcaatcagaataaaggtctgcttctttgtaagcagaatcaaattccacttcccttttgatctctgggttctgtaaatctgggttatttgtatgaacatatttgggttggagatgacttcccacatataggaaataaatgccccaaggttggtttggctacatgcctggaacaacagctggtgcctcagtttaaaaactaaataaataaagtagggtttaagctgccccctctggccttgggccttctcttatttcaggctgttattacttatcccctggactctagctttagctgcttctctccctgctgcaattccacaggcgcacctacaggactgctagactcaccctaggcccccacgtatctctcgtggcttcctgttgctttacctggttctcactagcctgcacgaaatccttaggggattctttcagaatgcacatgcctaggccccattccaaggagaaccaaactgagcacatgtagggttggacttaagccgtctgcatttttaaaaaatccccccatgagacataggttgagagccagtggttggctggacaaagtcgaagtccttcctagagaagttttgggcttaaaaatggagtcacaactcaccttgccctacatccactcccagatgacagtcatgtgccctccccttccacgccttcatttctgccattcttctcacctggtataccttctcctttctctttccctatccgaattctacttatttctaagtttctagccaagttctggctcttaatctaggaacccttctttgaccagcctggagcaatgtggcccctttttactttggacccccttaatgataccaaagtactactgttgttttatttggtgctctctcattctctttacattagttatgtatttaatatatatgccaactccatcacatgtgaggtactctgggaagaaagtaggccataagaattggtgcagtcttgatttgaagctctttgcagtgatgatgtgtatcccttatgatcacagggactcttaactaccaggacaagattgagcagtttttaaacataagcagcctctactagggacaatgggaaaataaaccagacaaaattgcttccgtggagatattggcccagatcccatcggattcctggcaattatcaagacctctcaaattcatagtaaacaaacaaaaaaatcacaaaacacatgtaatttaagaacaattcttttctctctttagataacacagtagtcagtagtcagcttgccctgttgtaggctttgctactacaataaagaacgtaaaactactattaaaagaagaaaacaaaaatgtattacaggcttacagggatctgacagatatccttgttggaattttccactcatctttactccagagtcatggtgggctgccttcctttgtgggtggagtttatctgggggtgtcttttggttggtttcttcacattcgtgtttgcctgttcaatggctaatggctctttttccctttgttgcagatgatgggaggcaagggtcttaaacaagccacggaaactgcgatattaaatgccaactacatggccaagcgattagaaacacactacagaattcttttcaggggtgcaagaggcaagtatcaactttaatctatcattactttggtttttttcttggccaaactaagtttgacctagatgcgcttttctgacatgggcaagagacttctatttcttagcacatatcagaaaatagtgtagagttcttggaaataactcgggtttattttattttatcttgttatttttgagatagagtcttgctctgtcacccaggctggagtccagtggcaggatcttgtctcactgcaatttctgcctcccgggttcaagcgattcttytgcctcagcctcccgagtagctgggactacacgtgtgcaccaccrtgcccggctaatttttatatttttagtagagacagggtttcaccatattggccaggctggtctcgaactcctgacctcaggtgatccacctgtctcagcctcccaaagtgctgggattacaggcatgagccaccacgcccagccataacaccactttagttaactgtttaggggcattactatatgcaggtttctcctaggctcctagtctacacagcagcccaggtcaataaagattccacaacactgaaatgtgtacataaataccataagctaattatttacaaagtgctatgatatgccttgaaagagtagagtaactcagactgggtagaggcaggatagaatggttgacagcgccttcttgctggagccatttgagatgggcctggaagccagcgtagccgatgagagcctgagtaagcagagacacaggagcaaaccagagaaaagaaagctctctggtctggagtgaaggatgggataggggagagggagcaaatgacaatgaggctggaaatgtagcgtggggccttgaaggccttggaaggctctggacttcacccttgagctggacaatagccattaaaggtttttgagcaggggagggtagggattcatgaagagaccgttacaatcattaagacrgcggcaagggggaaacatgccttagaggtagcaaggggctggggtggtggctcacacctgcaatcctgtaatcacacctgtgattgaaggttagctagcctctagggcttacartagagggaataataggcaggggaacaaagtcaccctggaagtgatgggagggaactaaaaaccaggcatccttttacacattgggctgtgggctcaggacctaatagctgagtcttggaagtggtgaggccccaggaaagaatattgaaggtgagaagccagaacaaaacgcctcaagtagatggctacattaagagggagggagaagttgggtgcctggtgaggggcactccacacctgaggcagctttagaaccctggcagtgcttggcacagtgcctctccctcaacacccctgcctggccctcctgctgccgtgtggctccacctcctccctgcagcctccactccctcctcttgcccacccccgaccccaccccggagcagctgctctcccacttggtattgtctggctctgtccatctgactccagggtccaggagagagtggaggctgcgcctgctttgtttctctggcagtcaacagacaaatgcacgtgatgacgcataataaggagagacactgtaaagagcgggtggctgatttaatcttacttaagtttatttagattttttctgcttttactgaggtatgattgacatctgattttaaattatgagtcttaaaaggaacctttgtctataacaattaggaagcctttggtagcctttgaaagtagtttgggcacaatggtgaggcagacgctgggtgtttaaaatgggctgagatgtggatggaggtcgggaaggagaggggaaaaggattccatgtttgcaggtagtgaaggaggagggggctgcttcagtaggatgtagttatattttctttttaactatgaaaacaacatgattttaagctgtgagaagggagagcaaagatacctttgagagaaaaacagatgggggaacaaagtcaccctggaagggaaaggctggaactgagaaccaggtacaagtccttgctatgggcccagagtaagagcaggacagagaccaggacctggagcttagatcagagagacagacgtcaggaaccagcccaccckcctgcacctgggcaacagcaacaaagcgcttrtgggatcttggtttctctggtccaggtggaatgtagctctatagctgtgatctttaatttaatggctggtcttaccttataaatcagtatccaaaggggtggttccacagtttgaaaaagaataggaccaaataaccagaagtgctggttaaaatgctccccagagagcagaaaacacagttgtgggcaacatgtctctaagcagcacaataaaatgcttctgtgaagtgggtactaaagaagtgacaagagcttctrattaattcaaatctagcttagctcctgctctgtgaaatgtatcctgcttgtgtattggctttaaggaatagcttcaatatttatttcatcagattacataaataatgtatatatrctcaacayggacattttggaaaataataaagcatgacaaagaaaatgtaaatggtccatggttccatcaatcagttatagccattactaatattttctgtatttcttctcctctttgtttgtacaattgatcatactacagatagttttattagtttgttgtccaggctgaagtgcagtggtgccatggcagctcattgcaatcttcagctcctgggctcaagtsatcctcctaactcatcctcccaagtagctgggaacacaggcatacacccgccacacctggctaatttatttatatatatattttttgtagagacggggtcttgctctgttgcccaggttggtcttgaactcctctgctctagtgatcctcccacctcggcctcccaaaatgctggggttatgggtgtgagccactgcacctggcctacaaatacagtttttagcctattttttaaatgtatattatgagcattttcccctgtcactaaatattctttgaaagtggcactgtcaattccattgtgtagatgtgccatgatttaaccaattgtatagtttttcttccctttgtttgcatttattacaatgtggccgtgagtatcctttgcttgaaattttaaagaattttgcctgataatttccttaggagagagtcatagaaaaaattattatctcagaggatataaatgcactgaagcttttgacatgtatggcttcaatttttttcccagagactttgtgccaatttatctcacagtgataacatatgagagtggccatcacacaggggcctagtgaggactgagaactagacagaagaacaagtaaacaatatatcatggccaatttgataggtgaaaatgaccttattgttttagtatatgtagccaatgcgctcaatgtttccctagttcttagtgccagccttgtccatccagggtaactgtgttcccccatctgttctgtctacttccttctccttcacagctgactctctgatttcacagcttaaaatcatgttgtttccatatcttaaaaagacatataactgcatcctattggttttttccctaattgcttatttgttcatattttaaacttcctcacgtttaattttatttagtagcagccgggtgtgttggttcacacctgtaatccaagcactttggaaggctgaggcgggttgtctaaaagtatracacttacatttaatatatagtacctaataataatgataaagactatgctgctggtttatgtattcactacataatgcttcttatcwttattattattattattattatttttgagacagagtctcgcttggtcacccaggtgggagtgcagtggtgtgatgttggctcactgcaacctccgcctcccaggttcaagcgattctcctgcctcagcttccccagtagctgggactacaggtgttcatcaccacgcttggctgatttttgtatttttagtagagacagggtttcatcctgttgcccgggctggtctcaaactcctgacctcaggtgatcctcccaccttggcctccccaaatgctgggattacaggcgtgagccactgcgtctggcccccatcattattttagagtgtattccttctactgtaaaaaaaaaatgttaactgtaaaacagcttcagggcggtccttcaggaggtattccagaagaaggcattgtcatcacaggagatagcagctccgtgtgtgttactgtccctgaacaccttccagaggacaagatgtcggaggtggggctaggtgctgtggctcatgcctgcaatcccagcagtttgggaggccaagcygggagggttgcttgagcccaggagtctgagaccagcctgggaaatatcatgagacctgtctcttccaaaaaaaaaaaaaaagaaaaaattaaccaccatggtggtgcacacctgtagtcccagctacttggaaggttgaggcaggaggattgcttgagcctgggaagttgaggctgcagtgagttgtaatggtgccactgcactccagcctgggtgacagagtgagacactgtctcaaaaaaaaaagatgaggaggtggaagacartgatattgagcatcctgaatctgtaggcctagacaaaggtgtgtgtttgtgtcttagtttttaacaaaaaagtttaaaaagtaaaaagaaattaaatatagaagaaagcatatagaataaggacattgaaaaagaaaatatttttgtacagctgtacaatgtatttgtgtttaaagtgttattacaaaagagtcagaaaggtttaaaaaatttagtttataaagtaaaaaagttacagtacgctgggcatggtggctcacgcctataatcccagcactttggaaggctgaggcgggcagatcacttgaactcaggagttcgagaccagccaggccaacatggtgaaaccccgtctctactaaaaatacaaaaattagccaggcatggtggtggacatctgtaatcccagctactcgggaggctgaggcataataatcgcttgaacccaggaataggaggctgcagtgagccgagattgcgccactgcactccagcctgggcaacagattgagactctgtctcaaaaataaaaaaagttacagtaagctaaggttaatttattattgaagaaaaaagtttttttaaataaattaatatagcctaagtgtacagcgttcacaaagtctatggtagtatacaggaatgtcctagaccttcccgttcactcaccactcactcactgactcatccagagcaacttcagccctgcaagctccattcatggtaagtgccctacacagatgtaccattttttatgttttatgtcgtatttttgctctgtcttttctatgttgagatatgttaagatacacagattcggaccattgtgttacaattgcctacagtattcagtacagtaggagcaagaggctgtaccatgtagcctaggtatatatagtagactttaccaactagtttatgtaagtacaccatgctgtttgcacaatgacaaagtcatctcacaatgcacttctcagaacgtattcccttcattaagtgatgcatgactgtattctgctagaatgaggaaagaaaggaattacctcaggtaagatgatactttttttttttcttttttttgagacagagtttcgctcttgttacccagactggattgcaatggcgcaatctcagctcacctcaacctctgcctcccgggttcaagcgattctcccacctcagcctcctgagtagctgggattacaggcatgcaccaccatgcctggctaactttgtatttttagtagagacagtgtttctccttgttggtcaggctggtctcaaactaccgacctcaggtgatccacccaccttggcctcccaaagtgctgggattacaggtgtgagccattgccccggcaagttgatacattttaaaggaagaattgcaaaaatccacagctgtctacttttrtaggaggcaaaggtttgatctgaatggagttyccattagtaggaggagatgactttgttagtatcccaacgttttctttatgttttaatttcttatatgcctatccattttttttttttttttttgagacagagtcttgctctgtcacccaggctagagtccagtggtgcaatctcggctcactgcaacccccgcctccccggctcaagcaattctcctgcctcagcctcccactatgattacaggtgcccgccactgcactcggctgatttttgtattttcagtatagacgaggtttcgccatgttggctaggcttatcttgaaatcttgacctcaggtcttctgcctttttttttgtttttccatcagacaaacagcgactttgcctgcaaatacctgtccctgcggaggtttccaggtggcccttgctgtatgggtgggcaggggcctcaggggctgggccctcacatccttggctcacaagtgaccctgctcagtcccgcttacctgacctcattctcggggaaacctcattctcgcttgaactacagggaaacagccgggaggtttgattctgttagtcatgttctgtggatttcagctaaaaggcttgaccaagcattgattgcccagcagagctttccagagtagttacccagtgagttcatttattcctcrgcagccgccttgaggatgggggataagtaaggtctggtcccttctctcaaggagggttttgagcagccctattttttcacagcacactcccatattgttcttaccctcagaagacaatcaacatatgggggcggtggttcccacttagatagccacccaacgtttaccttgcttttccttcatccccccccctcctgtcctccttgcccctttcacgtggtaccttctcagctgtagtcactgttaggtccagcagaaacacctactctgttaacacgaaaagttggtgctgagtggtttattcagtttccacttgatatcgccccaacattgccctatagcaggtttgtgtgtcctaaaagctgcaaagaacatcttaggatctggcttctgacagccaccaagttgaaatttcatccctttcagggctcacatagagatggagagagatgctggaattccaccgcagtttctatttgaacgcaatagagtatggatttagaaaataacatctgaacctcatttagaaaatggagctcttcctaaacctcttggctatggtggggacctcttcagatggcactgtagtattagcagtgctgtgttgggcttggcttgacggtgcctttcagctattactgaacctctgcttggaagactctcctcttgcgctgccagcaagagtgcctcctcccccactgtgtctctcccctcctcccctccctgctgtctggtgtcattccgagcagtgagcttccattagccttcgtcctccaatcattgtcacaatcagggcattttgttttgtttaagagacggtcttgctttattacccaggctggagtacagtcacattatcatagctcattgcagcctcaacctcctgggatcaagcgattctcccacctcagcctcccaagtagctggaactacagatgtctgccacacacctggctaatttttaaatattttgtaggatagggtcttgctttgttgcccaggctggtctccaactcccaagctcaagcaatcctcagctgagcatttaagagtcctggtattaatagttgataaaaacttagtctaatgattttccccttgaacrttccacttactattctgtttcagcattttttccctatgtttacctacccatgaataggattttctacctcttttttttttttttttttttttttgagaaaaggtctcactccgtcacccaggctggaatgcagtgatgtgatctcggctcactgcagccttgacctcctgggctcaaatgattctcccacctcagccttacacgtagctggtactacaggcaggcacaactgcacctagctaattttttgtttttttgtagaaacaagctctcactatgctgcccaggctggtctcaaactcctgagctcaagcgatcttcctgcctcggtctcctgaaatgctgggattacaagtgtgagctaccatgcccggctgaattttctgcttttgaatcatactccttacagtttattccccatcattgttagaaagcatgttttgcctgggcgcagtggctcacggcctgtaatcccagcactttgggaggctgaggtggggggatcacttgagcccaggagtttgagaccagcctagccatagtgagaccccatctctacaaaaaatacaaaaattagctgggcatgtggtgcacacctgtagtcccagctactctcaggaggctgaactgagaggattgcttgggcccaggaggtcaaggctgcagtgagctgttatggcactactgcactccagcctgagtgacggagcgctcaactgtgtctcaatttcttttttccttgagacagagtcttgctctgtcaccaggctggagtgcagtggcatgatcttcgctcactgcaacctccgactcccgggttcaagcaattctcctgtctaagcctcccaagtagctgggactacaggcatgcgccaccacgcccagctaatttttgtatttttagtagagatggggtttcaccacgttggccaggatggtcttgatctctggacctcgtgatccgcccgcctcggcctcgcaaagtgctgggattacaggcttgagccaccgcgcctggcccctatttcaatgtttttgaagttttttttttttttcttcaagcgtggtttaaaaatatgcagtttcagtatattcagagtcttacgctctttatagttttattttcaaacaaaaccacttctttttttttttttttttttttttgagatgaagtctcgctttgtctcccaggctgcagtgcagtggtgccatctcggctcactgcaaccaccaccttccaggttcaagcaattctctcactcagtctcccgagtagctggaactacaggcacccgcccctacacctggctaatttttgtaatttttttttcgtagagacagggtttcaccatgtcggccaggctggttttgaactcctgacctcaagtgatttgcctgcctcagcctcccaacgtgctgggattacaggtgtgmgccaatgagcccagctccacctctttcatgtttattcattctataagaagcagagcagttcgtagactgtcttcaggggctattaattactggagctattcttcacaggcttgagaagttatgcttgctctgagtctctataagtggattcatttttgctgagagtgaggaamgtgggttaagaagaaggagtacatcattatctcatgagtagatactttcctggaaggaaattcatcagttggtggaccgtggaatttgggaagccccggaggaatattggtctatttattaaaacgctgacttaatggtttattcctgatgatggttgtgtggtcagtagctcattctggggagctactggcagcctggacctagagaagaagcctgtttatgaactacaggtcgaatatccctaatctgaaaatctaaaactttttctaaaaatttatatttatttttttgagacagggtcttgcccctattacccaggctggagtgcagttgtgtgatcgcggctcactgcagcctcgacttcccaggctcaggtgattctatttttagtagggctagggtttggccatgttgccctggctggtctggaactcctgatctaaaacgatctgcccacctcagcctcccaaagtgctgggattaccagcatgagtcactgtgcctggcctgaaaatccaaaacttttgggtgcccacatgaggctcaaataaagatctgtaatttcaaataagggatatgtcattggtagaacaaagtgaactgggtcgcacagactttggcctcattaactccttgttacttacggtatactgtttgacgtcgcgtatttctaattctttgtttgcagcctgaaaccaaaacatcaaaaggtccttcaaagaaacataaaattctgtatgtgtcttatggatatatgtttaatatatccatacctatatatacgcaaaagtaattatttgatgttgagggtaaagttgctgaaaagtgtcaatggctctagaratattttgtataaaaggatcaggactatacaacacatttaactgttgcaagtagattttatgtccgcagaatagaaataatctcatccccagacacctccggtcatatgttcagtaatgccccccacctgccattagccataatcaggttcacaggtgtgtagtgagctgaagataagacacatcggcacagtgtgctraacatttttatttgtaataagactaaatgaaacctttattgccaataataaacttacccggtgcccatggcttcttggtcctcgctgatacacataaaaagctgatgcacttatttattaaattacttattcatttgtttgggtaaaacaataagctgatgctaatcttgggctgaaacaactttcctgaacaggttatgtgggtcatgaatttattttggacacgagacccttcaaaaagtctgcaaatattgaggctgtggatgtggccaagagactccaggattatggtaagtggcttttgacattcatgccgccgcccatgctggctgtggaccacttcctaaagcacaaatggaaaatgcaggcaccacagtaaactgatctgggggataaatggggagctcagggttcttggcaacctccaaaataatagagaaaaaagtttgcttatgactgcactggtcctgcccttcagaagatattaaaatatgcatcttgaatccattaacagccaagaaaagtgtttaagattaaaattaaaacccctttgagttgcagtgagtgtagtggtaaaggagacagagcaagtaacccatcgaagtggtagagacaaatggcattggagttttatagccacctctgtcatggcgtagctgtttcagctgcttctagagatgaagaaataagtgtagtagttttcacaaagaaaatgcaactttctttgaagcattttgaaagacacggacactttacctgtgcattagtgggtgttcattcagctcagctcactacattttcctagtgaacaatgttattaatattaaaatattaagaccatattacttttttgggggttggggagacagagtctcactttgtcgcccasgctggagtgcagtgatgtgatctcagctcactgcaacctccacctcctgggttcaagtgattctcatgcctcagcctcccacgtagctgggactacaggtgcacaccaccatacccagctatttttttatatttttagtagagatggggtttcaccatgttggccaggctggtctcagtctcctgagctcaggcaatccacccacctcggcctccgaaagtgctgggattacaggtgtgagccagcacgcccagccaatattactattataataatatgaaaatgataataatatcaaggatctttcaattctcagaaaggctaagttggggagaacattgccattcaatggatatggagtcctatctgagttttaatgacttgyttttggaaaaaaagaaaaaaatcttttaaatttaatagtttcactactgcatcataatgggaatcccatgtgtgtgactcactcctctcttgaatgaatgatcttattatgcagttacactgataatagatgggaaagccagagaaaggcttcattaatgaaattaccaatcccatcctcaagatctctgcttggcaactcttgtaacctgacagtagaactcctttcccctgacagcctcccggctagcgattgggtaatggccgactcaggaaaacacactcactttgtggatgccttgcctacttcacacatctaactgcaacagcatttgcaaggagagagaggaggggctcacagggaggtggtaactgaagtcaccacccagtgtttctgaatcatgttgtctcctgacctcaatgttgttttgaagattgatagaaccgtttccacacttgtccaaaagcccagaattgtccaggtgcctggcacatagtaggcactcaacacatagtgttaataaatgagagaccaaatgaayagctaagtcgaaaaacaatgaacatgacaacacagtttccaggtcttaaagcataaccgctgaatgtgaatttttaaggaagagagctgataatctgtatatttaacacgcagcttctgtgtgagtcttttcaggcaattttggggcatactgccttacccagcagttccaggctaattatcagaccaattatcagaatcacctggcatgttttatgactcatagatttttggaccctaccttggasttcctgaatcagggyccagatgcaggaatttcttttgcaagaacttctcaggtggttcaaaatatggggaccactacagcaggatatgttggactgaatttgctcacacatggaattaagggcagacgtgataggtaatcagcttgttctcttaaaaaaaaaaaaaatccctgtctggtttgagtgacaaaggtgtatgcatttaccaaaactcattaaatggtacagttaggatttgtgcatttcactgtaagttttatcacaaaaatatgtgaacagatactgaattctagtcatgatatatatgctgaagggtttaagagtgaagtgtactaatgactgcagtgtactttgaaatgcgtcagaaagtaagacggatggctggatgagtagatgtgataaagcaaacaacagcattgtagaatctaggtggtgggtatatgggtgctcacctacagtcctttcaactcatctggatgttagtgttttttttttaatagagacaaggtcttactctgtcacccaggctggagtgcagtgttgtgatcttgacttactgcaggctcacctcctggattcaagtgatcctcccacctcagctttctaagtagctgggattacaggcacataccaccacacccagctaatttttgtattttttgtagagacggggttttgccatgttgcccaggcaggtctcaaactcctgggcttaagcaatccgctggccttggcctcccaaagtgctgggattataggtgtgtgagccacagcacttggcctgaacatttttaaataaaatgttggtagagaatgtttgaaatcatgcagatgttactttaaagtactccatgtaataatgatgctcaccagaatttgagaaccactgcacattggggcaagattagttcagaggtgtatcaacctgggagttgttcttcagcttttaaaagtttcataggcctggtgtggtggctcatgcctgttatctctgcatattgggaggcagagacaggcagatcgcttgagctcggtagcccggacaacatggtgaaactctgtctatgcaacaacaacaaaattagctgggcatggtggcgtgcacctgtagtctcagctacttggaaggcttaggtgggaggatcacttgagcccaggaggttgaggctgcagtgagccgtgagtgtgccagtgcactctaacctgagcgatacagcaagaccctgtctccaaaaaaaaaaaaaaaaatgctttacagaaaaattataagaaatgaaaatgttgtttttgatttttgtcctggaaatctgtctcttgactacataccttgttgcactaccttacatgtgaaaacctttggaaacagaaacacactgagcctgtgttcaatgtaaaggcaaaggctttccacatactggccaaacttcagtttccttatcatacaaaatggggacaataagatttgctccagagtctttaacacttgttatctcattatttaacttttgataagctataatatttttatttctcttaattgcacataatacatgataattactgaaagactctaaaatacaatcgaagtgaaagaaaaatcccagtctcattttccggccatatttagagttaacattttatgttttcttcaaggcatcttccctcataaaatacacatataagtactttgtccttttatttatatatagaaatgggatatcattatgtggcttgcttttttcacttaatatttttgaatgtttagccagtttaacacatttatgtacttttgaatggttgtctatttaccatataggtgctctgtaaaatttgcttatctgatcccccattgttggatattaggttgtttcctaaatttttcttctatgaacagcactgagatgagtccccacatacatacatttgcaaatgtatctgatgattttcttaggataaaatataagaagggatacgaacttttcttccaaactgggtaggccactgaccttcagtgaggcaagttctcctgtctccctttgcaggatttcacgcccctaccatgtcctggcctgtggcagggaccctcatggtggagcccactgagtcggaggacaaggcagagctggacagattctgtgatgccatgatcagcattcggcaggaaattgctgacattgaggagggccgcatcgaccccagggtcaatccgctgaaggtgcgtaggccctggaacattgcttgaaatgttccttaaactagaaaatgatgtctggacagtgtaccagcaactcccgaactctcaamtgaggatgatactcttccstagaataaggtaattcttctgagaagatgcagttgttactttgaagtttccatcgtcttgaacagcatagcagttactcaaggatgatgtggttgtggaagctgtccacagctgtctagttggagaatttgtaacattctgcatctctgtttgatgtactgtagtgagattatggcataaataaaatttacatattcacatcacaaactctgtacaagcacacattcttatattagagcagttatctctgagaaaactggattgacatttggactggatgttacaatgtttatgccccatgttggggaaaagttggttgggcattactctgccgcttccaaaacatgttaattttacatctggtcagagtcctaagtttcttgttagtccagatattaagctggaagatcaggagtggagaataccatgaaggctgtggttgtgtcttcatggctrtaagccagagaacaagtctgatatgactgcagcagctggggcaggtttccaaactgcctacctgtaggagagggcagggaccagtgacttgcagaaggcaggcacctctctagaggtgagttcacagagtcatggaggcatacaagatgattatgcttaccaccgtttattactcttttctctctgaagacacctgcttctttcaggatttaggctatttttttaaatggcaataaacatttcaaagagcataatagtgagttataatacaagtggataataccactcatatgatgatatcagattttaaaatgagccaaattatgctatatgcagtttattaacatatgcagtaatagtataaaagcatgatgagratggtaaacaccraattcagaagagtggttagcactgggatggggatatacaggcagcaccaaacrtgtaggtaattttttctaaaagatgaagcaaatatgacagaatgctcattagactttactgggtggtrgatgtgatgattattaccataacgttctgatatttaaaatatttcacaattataaatcacattgtacccccctaaattgaaagaaaacaacagctttctctgcctgggctcctgtcagaagattgacggttgaggtgcagggtrggaggagaagagagtgtattgctctgacccctcctctgtccgtgtctctgtctcagatgtctccacactccctgacctgcgttacatcttcccactgggaccggccttattccagagaggtggcagcattcccactcgtaagttctctgaatctgaatgtgccagctgggaaggcatgggccagctcctatcctgacgggtgtacgctcttagcctcatgattacagaaaccatatgtggggcaccttgtgaaataagggtcttgaagaggaatgaggagcaaagaaattggctttcagaggcgaggtcacacagtatcaaccacagatctgggaayccatagggaacagagtgggggaaaactgaatacgagtcctgyccagtggaccaatgtgtttccctccactgwgggacagggagatggcgcccagtgcaaccttcctttcctttctgattcttatatggaggagaaggttctgtgtagtctgtttgagtgaggtagggagaaggctaaaaatgtgccaaattatgctatgtgctgtttatggatctatgcagtaatagtataaaaacataatgagaatggtaaatcctgtattcattggagaggagaggaaacaaaatgatgctttttttttctttctttttttttttttttttttgagacggagtctcgctctgttgcccaggctggagtgcagtggcatgatcctgggttcacgccattctcctacctcagcctcccgctgggactacaggcgcctgccaccatgcccgggtaattttttgtatttttagtagagacggggtttcactgtgttagccaggaaggtcttgatctcctgaactcgtgatccgcccaccccggcctcccaaagtgctgggattacaggcgtgagccaycrcgcccagctgatgctttttttttaatcgttcaaatttttattttaatacacagtatgagaaattaacttttttttttttttgagatagagttttactcttgttgtccaggctggagtgcaatggcaccatctcggctcaccacaacctctgcctcccaggttaaagcgattctcctaccttagcctcccaagtaactgggattacaggcatgtgccaccatgcctggctaattttgcatttttagtagagatggggtttctccatgtcgatcaggctggtctcgaacctctgacctcagctgatctgcctgccttggcctcccaaagttctgggattaaaggcacgagccactgcgcccagccgagaaattaacttttaaatcaactgaattgtatggaaaatgacatagcaaataaattagacctatgttaaaagagaaggtcagctaaatatccaaacttaaggatataatgggcagataaacatagattccaaagtcttctttaagcagttgaagtctttcaaacacaactttgctataaactggtccagatatcaacagcacatagggatgcttaacaggggtggtgatcagggacacgcctcctgggaaatgcctcttttttttaaatggtaatgtagggttggattttaggttctcagaatatttgctgggctgatggtgtcttaggttgtgggactagcattgccacctcctttgccctaagagaaacctcccagaacatctcacagcatttccatcttttgtcctttgcagcccttcgtgaaaccagagaacaaattctggccaacgattgcccggattgatgacatatatggagatcagcacctggtttgtacctgcccacccatggaagtttatgagtctccattttctgaacaaaagagggcgtcttcttagtcctctstccctaagtttaaaggactgatttgatgcctctccccagagcatttgataagcaagaaagatttcatctcccaccccagcctcaagtaggagttttatatactgtgtatatctctgtaatctctgtcaaggtaaatgtaaatacagtagctggagggagtcgaagctgatggttggaagacggatttgctttggtattctgcttccacatgtgccagttgcctggattgggagccattttgtgttttgcgtagaaagttttaggaactttaacttttaatgtggcaagtttgcagatgtcatagaggctatcctggagacttaatagacatttttttgttccaaaagagtccatgtggactgtgccatctgtgggaaatcccagggcaaatgtttacattttgtataccctgaagaactctttttcctctaatatgcctaatctgtaatcacatttctgagtgttytcctctttttctgtgtgaggtttttttttttttaatctgcatttattagtattctaataaaagcatyttgatcggaagaatgcctttctcttggtgtactttatagttttaccaccgttacaacctagattcagtgggagctgaagggcaatgagaacacccaacccaatagccattgttacatcatcagttttgccttcgactggctgaagaaacagttgtcttggtcaacagtgaaaaccactttgaccctttttgttggaactgagttagagtgcatgtaactgtactccagctatggaaggtcaatcaaatagcaatttatcttttctcatttaagtccagaggtaataagccaagcactggtgctccttcagttttcccgctctgccctcctttgcataaaattttcatccgcatggtctcaagaaggctgttgcatttccaggcgtctgacatacccattctagttaggattaaaagggaagagcaaaggccaggcgcggtggctcatgcctgtaatcccagcactttgggaggctgaggcgggaggatcacctgaggtcaggagttggagaccagcctggccaacatggtgaaaccccatctctactaaaaatacaaaaaattagccgggcatggtggtgcatacctgtagtcccagctacttgggaggctgaggtgggagaattgcttgaacctgggaggcagaggttgcagtgagctgagattgcaccactgcactccagcctgggcaacagagtgagaccttgtctcaaaaaaaaaaaaaaaagaagagcaaaaggcagcttccacccaaatctgcttcttttgaaatgttttcgaatatgttccactcagtaactgctgcagctggccaaaattggttcaaatctcactcccagctacaagaaagtgtggggaagtctgttacctgggcatgtgactgccccaaacaaaatcaggagtatgttaatttttaaaaaggtggggagaatgggttttaggttggcaactagcatgcctgccacaaatgactttgccttagaagtagcaaatgctctaatcatgactacttggtttcttgcatggctgcttcctccaacattacttagtatccctaggctttaatgctagtgatctgggtgctctattgaattatctgcaagtattccacttatttttatatttaaaaagtttatacaacaatttactttagcctaacaaagcagtacagaagtgatgggattcacggttccttttttacacaataattaaatgatatctattaaatagtgcatctcaggtatcaggcaattttttttttttttttttttttttttgagacagagtctcattcttgtcacccaggctggagtgcattggtgcaatctcggctcactgcaacctctacctcccaggttcaagtgattctcctgcctcagtctcctgagtagctgggattacaggtgcccaccacgaggcccagctaatttgtgtacttttagtagatacggggttttgccatgttggccaggctggtctcgaactcctaacctcaggcctccaactcctgacctcagcctctcaaagtgctgggattacaggcgtgagtcaccatgcccagcttggtattcttttaagtgtttgaaatactacctcatttgaccctcacaatgttccactcttacacatgtggggaagggtatgaagagatgcctaaagtcccactaccagccagtaagagggaggggcagaatttggacccagccttactggctccagtacctatcagccaaaacaggataccctgctgccatggcaactgcagacctggggactctgcccttcctgagttggaaaccctgcttagtgcaagctagccatcaggccctgggacggccccttcctaggaaggacaagtgtatgacagtaaataatggaagcaaacagcaattcttttctacttactttacacagtgtttgtagttgagtgccaaggttgtttccatggctattatccattacttgcccccagaacatagcagagccaaacataggcgattaagagtcaagtgaatcacttgtccttcactattaattgctcatgtgttacctaacacttgtgccagtctttccctgccccggatcttatcctgaaaggcactgccccttgaagccctgtccccagtcaccttgctttactagtcattctctgtatttcatcctagccattttctgtatttcatcatttcaaaaataccttcttcatatccccatgaaataggctttctctgttatcttctatcttgccccttggtttgtttcctcctgtaccctgggcacaactggtaatttttttttttttttttttaacagagtcttgctcttttgcccaggctggagtgcagtggcacgatctcggctcactgcaagctccacctgccgggttcacaccattctcctgcctcagcctcctgagttgctgggactacaggcgcccaccaccacgcctggctaattttttgtatttttagtaaaggcgggtttcaccatgttagccaggatggtctcgatctcctgacctcgtgattcgcccgcctcggcctcccaaaatgctgggattacaggcatgagccaccgcgcccggcccacaattaattttttaatgttcactcagtttttgtctctttgttttggtctctctagcagagaccgtattttacccattgttggattctcagtgctgagccggggccttccaagtagtatgtgttcaacaaataaaaagaaatatgggtcgggtgtggtgattcatgcctgtaatcccagcactttgggaggccgaggcccgtggattgcctgaactcaggagttcaagaccaacctggccaacatggtgaaacctcgtctctactaaaaatacaaaacactagccggacatggtggtgtgtgcctgtaatcccagctactcaggaggctgaggcacaagaatcgcttgaacccgggaggcagagtttgcagtgagccgagatcactccactgcactccagcctgggtgacagagcaagactctgtctcaaaaaaaaaaaaaaaaagaaaaaagaaaagaaatatggtgggctgggcacagtggctcacccctatcatctcagtactttgagaggctgaggtgggtggatcacttgaggtcaggagttcaagaccagcctggccaacatagagaaaccctgtctctactaaaaatataaaaattagctgagtgtggcagcacgtgcctgtaatcccagctactcaggaggctgaggcaggagaatcacttgaacctgggaggccgaggctgcagtgagctgagatcggccaatgcactccagcctggcgacacagccagactccatctcaaaaaaaacaaaaaaacaaaaaactgaatgatctcaaagaggcgcattgccatggaaacccatatttccaatgtctgctgtgagcagttctgttaaagatatgtacaaaatgccagagcttgaagatggggcctctgaaatggctttgtgtagagtgtgtcccctaaaatttttctgtttatcatggaaaaatatacataatatatatttgtgtatatatatacataatatatgtatatatacataatatatatcatatatacataatatatacatatacataatatatatcatggaaaatatacataatatacataatatacaaaatatacataatatacaaaatatacataatatatatcatggaaaaatatacataatacaaaatgtagcactttaaccattctcaggaacaatgtatgagttaagtacattcacaatgttgtgcatgtttgagcagaggtggttttttttagtcaagtgaagcagcgggagtggagaggagcagttttaagactgggagcctgaggccatcatgcgcacccatcctatgaactgggtatcccctctgcatcctcacagccctgggccctagccacttccacctgggacccaccacaggccactgagagcaatcctcacctggtagcctggtgtgataaagagcaagagccctggccccatctgaaaacccatgagacctacgtgctccaggaaacagcccaaaccctggccaacgtctgaccaacagttctgtcgcgagccctgcaaatcactaaaagggctcacgattcagcttctaaattgtttgtctcagatggattcatgcaccccgcagtggcacctaaatcctttttctaaatgaggggcactagttttgtcattggaaacctgatgccccttatccagataaagggttgcctctcaacttgcattgttcacatttcagggaactttccataactctaggcctttaagggataaggctggtcttagttaaccttgcatcttttatgcaagtcttaccattttaagagaaagcccccttttccctggctttggccagggatcctacagttagtcccagactggcgctttggccttgagctctgatctgcttggctccttgctcctgccagcactgagtcaaagaagtctctccctgaccctccactcttccccaaccaactaggcagcaagattgctgaactgagtggaccacatgggagcccagatctgagacaagatatagggaagggagtgaacatcccagggattaaaatgtctgagaggttgaaaattgtgttcagaaggccaggtgtggtggctcacacctgtaatcccagcactttgggaggctgaggtgggcggatcacctgaggccaggagtttcagaccagcctggccaacatggtgaaatcctatctctactaaaaatacaaaaattagctgggtgtggtgatgggcacctgtaatcccagctacttgggaggctgaggcaggagaattgcttgaacctgggaggcagaggttgcagtgagccgagatcacaccactatactccagcctggatgagagagtgagactccaactcaataaataaataaggaaaactgtgttcagagagcagcagcccctgagagtagggctggtggcaacatccctggatcattacagtatcccaggatggcaggttgaggggctggaagaccaccttttatggatgcgggtcactatccctctatgtaagattaatgcagagcatgtttgtatgtgtgaatattattttcttttccttactgtggcctttttcttccttctcttctgttcataacatgtcattctcatcctctgctgctctgagtgcttcatcataccctctccctgcttctcctctagtcctggtttgagcctgcctcccagctgttgcttttcaccttgccaagctctcactccccagccttcggacacgttcctttggtctggagcttttcccaccactccccacctcccatacatacaactccctggggatggagataagtctctgacatctctgttacaattctgctgtcaaatcatccataccaacatttgtttgaatatgttgtgaatttggggcagggggtgatctctgatgcctagaactggaaagggttttccataaaagcagtactgctaagttatggtttaataggcttttgtagggtaatctagtatcctacccttttcctccatatcaagcttgtccagcccacagcccatggtctgcatgtggcccagatgctttgaatgtggcccaagataaatttgtaaactttcttaaaacattataagattttgaccgggtgtagtggctcaacacctgtaatcccaacactttcggaggccaaggcaggcggatcacctgaagtcagaagttcgagacaagcctggccaacatggtgagaccctgtctctactaaaaatacaaaaattagccgggtgtggtggcacgtgcctataatcccaactaccagggaggctgaggggggaggatcgcttgaacccaggaggtggaggctgcagtgagccaatatcacaccattgccctccagcctgggtgacacagcgagactgtatctcaaaaaaaaaaaaaaaaattataaggttttgcttttttttttttcttttaagctca

SEQ ID NO: 94591 - DNA, 80503 bp, Homo sapiens
  misc_feature (1)...(80503): n = A,T,C or G
tagaaataaatgtagatgtaaacgtgtgtgtaaatgaatacaaacatatttacatattccttagccctgtcctctgagagggccttaaagcagcaacacattaatagtaatgagcacactgaatgcacgggcctcagtttctaaattccatattccactaaaggaaaccagggattcttggagaaatggttgatctcagccatttcaatgtgttgctgggtctaggaagtccaagatgaacctggaccttcttatgccagaaagtaaagaagtgcacaaagagtaatggggacatgccaaaaggacacagatgctagctaacacgaaggagattccattagccaaatcttaaatgatttgaacatcaaaataaataataatgacaatggcttacaaccaatttaataaaataagaaaccatataaataaatgtaagatagtgagtaaattaaaagtttgatgaaagataaggtatttacaaagtctgaacttcaactaccctcttacagaatactttttttttttttaaagacagggtctcactccgttgcccaggctctagtgcagtggtacgatcatagctccctgcagcctccacctcctgggctcaagtgatcttcccacctcagcaccccactcaacccactccctgagaggctaagaatataggctgggccaccatgcccagctaatttttttttaattgttgcccagctggtcttaaactcctgagctcaagcaatcctccctcctcagcctcccaaagtgctgggattataggcgtgagccaccgtgccgggcctagaatacttgttaattacaaatggaaaaagagtaatttcatagtggagagatcctgcagacaccaccttaactgggtgatcaaagttagcatcatcaataatgcaacacattaaaatcatatgccatctgatagaacataacaaaatcacagcactacttctgtaatattatctaccaaagatgaataagctgaatagaatcatgagagaacatcagataaactcaaagagagggtgttctacaacataaccttcccataatcttcaagagtgtcaaggtcattacactggcatagtatgggaagttaaaaaagaaaacaaaacaatgaacaaagagtgtcaaagtcataagagtcaaggaaagactacggaattactccagattgaaagagaactgaaagagaataaagacatggaaactgaatgcaatgtgtgatcttgaaaatcacacaactaaaatttactgtatgatttcataacttctgttataaagaacattagtggaacatttggggaaaactgaataaggtctgattaaatgttagtcatgtgatttttttcttattttaaaagttatagtgtggttatgcaaaaatgtcattgtaggaaacatacatgaaagtattcaagaatgatggggcatctcaaatggctcagaaaaaaagaatctttgtactgtatttgcaacttttctataagtttgagattatttctaggaaatgaatatttgtattcagaatccaactagctctcatcacctataccatgcaagcttaagtcatcatcctctctcacttgcattattacttaaaaccaccatgatcactttattttctcccatggcttctgtggttcaggaacttaggaagggctcagctggatagttttggcttgaggtgtctcacgcaagtgcagttagatggctagagttgggacacccagggaataaagcactactctctccatgtcatctcaggacgttcctaagtggtttctccatgtgggctaatctggacttccttacagcctgttggcctcagggcagtcagattccccatgtggcagctataggcttccaaaatgagtgtcctggtgaacaaatcagaagctgctttgtcttttatgacttagccttggaagtcacataatatcacttccaccatgctcaattggtcaaaacagtcacagaagcctattcagttaaaggtggaggggacagggacctcacctcttgatgggagaagtgtcgaagataagctcatggactgggagtgggcgtcgtggccatcttcagacaataccatttgccacagtggtttgttaggccctgtaaggtctggaccctcactacctccctgagctttcttgttgaataactttcatttcttgctctctctgttccaggcagaatggcttctttggaaactcaagcacactcctccctcaggggctttgcgtttgttctttttctctctagaacattcttcccccagatattttatttatttatttattttcgagacagagtctcactctatcacccaggctggagtgcaatggtgcgatctcggctcactgcaacctccatttccygggttcaagtgattttcctgccacggcttcttgagtagttgggattacaggtgtgcaccaccacgcctagctaatttttgtttgtttgtttgtttgtttgtttattgagacagagtctcactctgtcacccaggctgcagtgcaatggcgtgatcttggctcactgcaacctctgcctcccgggttcaagtgttcaagtgattcttatgcctcagcttcccaagtagctgggactacaggcacatgccatcccacccagctattttttgtatttttagtagagatgggggtttcaccatgttggccaggctggtctcgaattcctgaccttaagtgatccgctcatcttggcttcccaaagtgctgggattacaggtgtgagccaacacatccggccaggatattcatttatttattgagacagggtcttgctctgttgcccaggctggagtacagtggtgtgatcacagctcactacagcctcaaccttccaggctcaagcaatcctcccacctcagcttcccaaatagttgggaccacaggtgcacaccaccacactggctaatgttcttcttcttcttcttcttttttttttttttgtagaggaggggtgtcattatgttgcctaggctggtctcaaactcctggactctagtgatcctcccgtcttggcctcccaaagtgctgggattacaggtgtgagccaccacacctggcctggagtggatttttatagtagtggataactgatgtaccttccttctctttgtcttactacaatcactacaatcctagtaattatttctcaaacatgaaccctcctattcttttgttctcacctaggtaacacatagtgtgaagcaacatacaaacacatatacatgtttcttggaaacaagctgtgttagttccctagagctacagtaacaaattaccacaaactagggggcttgaaacaatagaaagttattctctcacagttctagtgactacaattcatagccaaggtaagggcagggttattctctcccaaggatcctaggggagaatcagctttgtgtctttctcttggcttctagtgtccctagcaatctttggtgttcctcggcttgtagctgtataagcccaatatctgcttccatcgtcacatggcattctcctgctatgttttcaggtcatattggattaagagctgaccatcttccactatgacctgatcttaactacttatgtctgcaaagaccctatgtgtaagtaaggtcatcttctgaggtactggggattaggacttcaatatatctcctgggggaatacaattcaacccatgacacatgcctatcatttccccctcagttgtacattgtagagttgtacattgaagacttaaacatttcagtcttcaaatgtgacaaaggccgggcatggtggctcatgcctgtaatcccagaactttggcaggccaaagcaggaggatcatttgaggtcaggagttcaagaccagcctggccaaaatggcaaaaccgctactaaaaatacaaaaattagcggggcatggtggtgcaggcctgtagtcccagttacttgggaggctgaagcaagagaatctcttgaatccaggaggcagaggttgcagtgagccaatatctcgccaytgcaccagcctgggtgacagagagactccgtctcaaaaacaaacaaacaaaagtgacaaaacagtaattcttagtatttaatcaacaaaaccctattgagtgcctactatgtgcaaagcactcatctgggctttatttgcttcaaactaatctgtataaacacttggtcattaaattagaatttgaatgaatttgacctcagtgtttttcagttggaacaaggtaggcagtgaggaacagatccatacaaaggcctgtgaatggcgaaaagactatgccaggcacagttgccaggagatttcacagactggcagttactcatttgtaatcaacaaccttttgcaaagccaaagttgattggtgttttgtgggcctgttaatatgaccacgacactcagcttttcatccccgcaatgacaggatgattcctcagctatttttgtttgtttgaacattttttttttctaaaccaaatttccccaggattttctttctggtttcttttggagctgaaacctcctatgttcccagctttggagattagaagtactttctccacaccttcagattttctagtattgcataagttgtacttgtccagacttgctcattctttagttagttctgttcaagttttctcatcctttcatttatgttgtttacttcatcccttcctctgctttccatgggttattttgatgtccttttcccaattacatgaattcaatgtttaattcatttattttcattcttttcattctttcttgcttagtaatgagtatgtatgagccctgctgggcacagtggggtggctcaagcctgtaatcccagcacttggagaggtcaaggcgggcagatcatttgaggtcaggagtttgagatcagcctggccaacatggtgaaatcccatctctacgaaaaatataaaaatcagctgggcgtggtggcgggtgtctgtaattccagctactcgggaagctgaggtataagaatcacttgaacctgggaagtagaggttgcagtgagctgagatcgcatcacagcactccagcctgggcaacaaaacaagaccccgtctcaaagaaacaaaacgaggccgggcgcggtggctcacatctgtaatcccagcactttggaaggccaaggcgggtggatcacctgaggtcgggagtttcagaccagtctaagcaacatgaagaaaccctgtctctgctaaaaatataaaattagctgggtgcggtagcgtgtgcctgtaatcccagctactcgggaggctgaggcaggagaatcacttgaacccgggaggcagaggttgccgtgagccgattgcactccagcctgggcaacaagagcaaaactctgtctcaaagaaaaaaaaatgtacaaggtatgtattttctttctttcttttccacaccagaaagtataaaggctaatgtcttttctaagtaccaggctgtctacctattgaaatcccccatccattcactcagctacgattcactgactgtctcaccctgaagtcatttctatcttctttgaaatcagttctggacctctgaggagaatggtaactgtgttttattttcagagagccttctttctgccttagcatagtgtccgggacaaagcaatgatgataaatggacaaccattattgaacattgaccctgtagctggcattgcactaagtactacattattttaactcctccattctactcctctatgcccattttacaggcaaaatgatactcactcgaacgtttttgtcctctgtttccattcttgaaacatgccaaacctccagttttagggccttttcctaaaactggacataggaagggcccatgtctctctcttccatattctaattaagcactcagcacacatgccatctcttcaaagcttttccgaccgcctatctacaacagcctgcctccacagtttcacacactcttttacgttatttataaaagagtctcactcaatgraagctggatttcctctcctgtaaaatgaggtaggccctctcggctcaaggtcactccctgtgattctacacagagagggagtgggaagagagggcgctcggcagcagaggaggaggargaaggagggaagggcgaaggcgggagtgggtgcagaagcggggggtctggcggtccaggggggtagaagggaggrgcggattcgagtgggcgccaggtggaggtggggccagggttgtcaagggagcacgaaaggggtcgcggtgtgtccsgcaaggactgggtagggcakcgcctgctatggactaggggcgagggctacgaaagggttgtbggaggggtggatgcgggtggatcccgaaaccaagcggctccgaggggcgactagaggtggggagggggcgcgcaggagttgccaaggtcggacagaggggagcgcggtctatccggctgggaatgggccggacagggcgcggggttccggggtcgcggagaggcgcggaggtagatctgagccgagtggagggcgcgtgggggtgggtgcagaggggcgccgaagggatccgggcccagcggccggtggagaggggccgcggagaggcgcaggtgggagctgggcggccgagcgagcgcagagggggcgcggcttgcgcggcttgcgcggctgggcgggaacaggcgctcggtcgggggcggggggtgcgccggggtagccgagaggcggacgcaacagcggggtcccgcgctgtctgggcggccccaggggctgtcggctcacttccgggaacgccggggaaccgcagtagccgcctgctagtggcgctgctagccggccggcgcaggctgccgagcgggtgagcgcgcaggccaggccaaagccctggtacccgcgcggtgcgggcctcagtctgcggccatgggggcgtccgcgcggctgctgcgagcggtgatcatgggggccccgggctcgggcaagggcaccgtgtcgtcgcgcatcactacacacttcgagctgaagcacctctccagcggggacctgctccgggacaacatgctgcggggcacaggtgggagctctgggcccagggccggccgtgcgctgtcacccgggtcggacttcgcgggcgaggggccgaagctgggcacgcgggtccctggctgcgggcgcggcatttccctcccgccgcccgggacagagacctcgggctgctgagcgactgcgccccaaaacctccggcctccgtgggccgcttcgggcgggttatggggtggcggtgggggaagggactggaaagttaggtcgagctcgaagttcagagatgaaaggaaaccaccgggctttgtttcagaggcccragtcctcccagtggcagccactcttgggggtccatcgagctgagccgcagcttgttcaacgtgctggtgcctttggaagactgtcattagccctgctagagtttgctygttctgttttgttttctttstttctttcttttctctttcttttttggtgtggttaagctctatgagatcttgtagttctgacctttcccccatattcccaaggccaagtattatttacccttgttgcagtcataaaattatctcattttgatatccttagatttcgtagacacgaaggctattcttgtgcatggttctataaaatattttgtttctcatgccaaataaattcttacagctcggcacgaaaggcagttaacaatctacactatacaatgggtgaatttgtggtatgtaaattctctcttaagagggttgtttttgaaaagccaatcgcaggagtttttttctcaaaaaatgttgaccttacttttcaaaatagaacccgttttgaaactcattttgaaacccatttacatagaaataatgcttccacaaggcctttttcttttgttttcctttytttttttttttttttttgtaaggatagcaaacaggatagacgtgcatagcataaaaaacaacgccctctttcgttccctacctcagtcccattcttcggaggggaacagagttttccttctagaaaggtttactttttaagcgcagatacgtgtaccttttttctttttttctttttggyttgtttgttttttgagacggagtcttgctctgtctgcctcctgggttcaagcaattctcctgtctcagcctccctagtagctgggactacaggcgcatgccaccacgccgggctaattttttgtatttttagtagcgatggggtttcactgtgttagccaggctggtccccatctcctgacctcgtgatccacccggctcggccttccaaagtgctsggattacaggcgtgagccaccgcgcccggccaacgtgtatcttttcttgtatgtaatatgkgagcatactatgtgtatatactctgcactagtgtggtttcactttgtgtctgggatatatttcacatgaaaacggacaaatccatttcattctgtttttgtagtatgtattttctgaatctagtatgatttatttaaccagttcacacttgtaatcccagcactttgtgaggtcaaggcgggcggatcacttgaccttagcagttctagaccagcctgggctacttggtgaaactgcgtctctataaaaaattcaaaaacaattagcgaggcgcagtggcaggcacctgtgatcctagctactcgggaggctgaggagagagaatcgcttgaacctgggaggcggaggttgctgtgagtcgagattgcaacrctgcactccagcctgagcaagaccccatctcgaaaaaaaagaaagaaagaacagagattgtttgacttgcttgctaaatgttgttaatgcgacataytgaagtagttaggtaacattaaacagtcccagatactgctactggttggggtcaggttaaccaaagtctaggagagtaggcctggcgcaatggctcatgcttgtaatcccagcactttgggggctgagtcgggcaggtcacttgargtcaggaattcaagaccagcctaggcaacatgacgaaacccccgtctctaccaaaaatacaaaaaattagctgggcatggtggctcgcgcctgtggtcccagcttytctggaggctgaggtgggagtatcacttgagcccgggatgcagaggttgtcatgagccgagattgtgctactacactccaagctgggtgacagacagagtgataccctgtctcaaaaaaaaaaaaaaaaaaaaaaaagtaaagcatatttattataaaagaaggaaactatatctatttcatgcaaatgtaaaaaaggtaaattaagatccctcataattctgccttgccacacagagatgattataattaactcttgggtgcattttcttttattctttttttttctttttcttttttatttctgttgcatttgtatttgcaaaatggttgtattctaaaattgtcatattctaaatgataggttacttttttattctcatttatagtgagcatgttcacacatcattaagcagtcttaaaaatgatgtttaagctgggcggggtgtctcacgcctgtaatcctagcactttgggaggctgaggtgggtgaatcaccagaggtcaggagttcaagaccagcctggccaacatggcaaaaccctgtctctactaaaaatacaaaaattagccaggcatggtggtgggcgcttgtaatcctagctacttgggaggctgaggcaggagaatcacttgaaactgggaggcggaggttgcagygagccgagatggcgccattgcattccagcctaggtgaaaagagcggaactctgtctcaaaaaaaaagatgtttaattttatcaaagttgtatagttattaaacatttttattggacgcgtatgttgttaactattgtttgttgtaataaatactgttatgactatccctgcacataaacatttggcaaatctttgcttatttccttcaaataaattcctagtatggaatttctacaaatatggtactatcaaataatacaacagaaggattgtgccaatttagtttccagtcattgtttcatgagggtgctatattttataacccatggctgtattttatagctaaggtktaaaatcatcmcaggagatatgataaggacactggaaactttaggcaactcattgacagtagcaaagctggaataactgtaggtcatcactgaaacttggagtcagggaacttgaatctgaccttaagacatttagtccagtcctctcttttattgtattttatttttttgagacagagtccccactctgtcgcccaggctggagtgcagtggcacgatctcggcttactgcgacctccgactcctgggttcaagcgattctcctgcttcagcttccgaactcaggtagctgggactacaggcttgcaccaccgtggctggctaatttattttcagtagagatggttttgccgtattggcaggctggtctcgaactcctgacctcaggtgatccaaccgccttggcctctcagagtcagacctctcttttagagatgaggagactgagttcaggagaacttgcttgatagtaaacagtatttattgggggattagggtgaaaacrtagatttctccatgttaaatactcttttctctatgcagtatttcccacattgagattcatgagatagacatgaattagacgatgagattcatgagatagacattttagatagacaaaaactttttatttattttaaagcagaattgaaacagacataaatctagcacatsaaagctgtatttcatgaaaattatagctattaatttttaaagctaagtcactttaaagaaaactatatagtaaagaactatatagtaaagaaaaactatatagtraagaactatatagtaaaaaaaactatatagtraataatagttcaactatggtagaaatcgtgaggttgaagtgtgattgcttagtctgagaaagctgcactgtagcatagtgcgtctcagagacataaccctggctaggtgtggtggcttatgcctgtaatctcaacactttgggaggccaaggctggagggtcatttgagcccaggagattgagactagcctgggtaacatggtgagaacccgtctctacaaaagataaaaacattagctggatgtggtggcacgtgcctgaagtctcagctctctgagaggctgaggcgagaggattgyttgaacycaggagttcgaggctgcagtgggctgtgatagcaccacagtactcacagtgacagagtgagaccctgtctcaaaaaaaaaaaggagacataaccctagactagacggccaacccttatgaatctcatttattctcatctatatgatgggggagatgaatgtagtagataatcttcaagacttctgtcagtccctggattctatatttcttcaaaacattattatgtacacctgtggcacataggcttgcataattagaatgatrctgatggcaaagcggagttttttttttttttttggaatggtaaaacatttaatttgtagtaggcaattccaaaaatataaaaggatatttcatgaaaagattcttccaagatattttatgcttatacaatcaaatgtttacctatgcttctctttgtgtatgtgttttttaaaacacagattatagcatgctgtatatactgttttatacctttaacaatactgctttgcatatggagtgccccatttcatttttttctaatagctttattgagatataattaacataccatataatgtatccatttaaagtataaaactcagtggactttaatatattcacagagttgtgcagacatcaccaaaatcaacttttttttttttttttttttgagatggagtctcgctctgttgcctaggctggagtgcagtggcacgatctcggctcactgtaacctccgcctcccacgttcaagtgcttctcctgcctcagcctcctgagtagctgggattacagctgtgagccaccatgcccagctaatttttgtatttttagtagagatggggtttcaccatgttagccgggctggtctcgaacttcctacctcaagtgatccacccacctcggcttctcaaagttctgggattacaggcgtgagctactgcacctggccttcatcaattttaaattaatatattttttcttttaaaatttttttctttttaaaatatttttttggccaggcatggtggctcacacctgtaatctcagcactttgggaggccgaggaaggtggatcatttgaggtcaggggtttgggatcagcctggtcaacatggtgagaccccgtctctactaacaatacaaaataaaattagttgggtatggtggcgggcacctgttgggaagctgaggcaggagaatggcttaagcccaggaggcggaggttgcattgagccaagatcatgccactgcactccagcctgggcaacacagtgagactctgtttccaaaaaaaaaaaatatatatatacacacatatactatgtatatatttatatatgtatatatatatttatatatgtatatatatatttatatatgtatatatatttatatatgtatgtatatttatatatgtaggtatatttatatatgtagrtatatttatatatgtaggtatatttatatatgtakatatatttatatatgtatatatatttatttgtgtatatatatatttatatatgtatatatatatttatatatgtatatatatatttatatatgtatatatatatatggggtctcaccatgttggtccaggcttgtcatgaactcctagcctcaagtaatcctcccctccttagcctctcaaggtgttgggattacaggcatgagccacagtgcccaaccttttaaaaaattaatattttttctttaataatcaattttagaacatacccatcaccccataaaagaaacttcatacctattagccgtcacttctgttcctaccccacacccctccacctgagcctctggcaacaccaactcacctcctgtctcttttgagttttctrtactggacatttcatacaaatgcaatcatacaatatgtggtcttttctgactggcttctttcatttagcttagtgttttcaaggctcatccacactatagcatgtttactacttcattcttttttatcgctgaatacaattccattttatggatgggccatgttttatttatccattcataagttggtgaacatttgggttgttttctctttttctgttatcttatgggtgtaccatagtttgtttaaataacttaaagaacaattttaaaaaggtaagcctggtcatgaatactgtctcaaagaaagtaggcttttgctagattggtattttttaacaaaataagttaggccttttaaaattccatggctagaatctagtagaatccagggagcttgtctctccatctatccatctcttcatccatctgtccatctaaccattcattcaggcaactatccgtggatcctttaagcatcagatatgtgctaggtagtggagacacagagagcaactgatttcactaggtgctcacagagtgtgggcatgggrgcaggagggcagatggacatgtgtgttagtcagctcaggctgccgtaacacaataccacacactagggggcttattttcytatagttctggaggctagaagtacaagaccaaggcactggtagagttggtttctggtgaggcccttcttcctggcctgtctagttgccttctcactttgttctcacatggcctttcctctgtaagcaggcaaccctgatgtctcctcctcctcttataaagacaccaggcttattggattagtgccctcccattatgacctcatttaatcttagttacctcctttaaagccctatttccaaatatagtcaccctgggggttaggttccaacatacagatttaggggagacatacttccrtctataacaacatgtaaacacrgtcattggagtgatatgtgtctcartagagacaagtctgtgacatttggaagtccagagggggagcttccagttccctaggaggttgagggacacttgaccatgaagggccgtttagggtgtgtgttgaaaaatcaataagagcttaccatgcggcttgagtaaaggctaggaggatccatgtgtgtagagctccttgctgggggtgtggtttcagggtgaagtgccaatggggaggatgagggaggaggagaaataagatgaggctggacccaggtgggcatttatgtaattgtcaaaatcagaatttatccgaagcagagtgaatgggaaggggagtrtagacctggaacaggaactctttctggatgcttcactgaagaggagagagattgagtgatggtgagcgggaggaacaatggtcaagggaggttttcatttttaatataattcttgtgcaatattccatgcatcagagtattataaggtctgtgtatggttagaagaagaataaaatgaacatgatttacccatcaccagagagaaacaaggactttgggggccctcccgttccccttccatgcacatctccttcctgcttcccagaggtaaccactttgttgastcaagtgtttattatttgagaaaggtttttttttaaagcccttgattgggtgtaaagctatcatttaactaatttcctgacattctcctagttttgttttgttctgacacatttttaaagttaagttttatgtcatttataatgatgctaaaagcattttggcaggagctaggttaattctctgtagccttttctcttggcacatgtgaaagagaactgctggttggcgggtggctcacccctgtaatcccagcactttgggaggctaaggcaggaggatcagtagagtccaggagtttgagaccagcctgggcaacatagtgagacccctatctctacaaaaaataaaaaaaaaattagccaggcatgatkstgcttgtctatagtcctaactacttgggaagctaagctgggaggatgcttgagcccaggggtttgagactgcagtgagttataatcatgccactgcattggctctttggaaaaaaaaaaaaaaagagagagagagagaactgttatttacagtttggtcaggtccctcttttgtgcttcataactgctcaaacagtaagtttgaataagctcattcagatatgaggtgtggttgatttgggtaacatgaaacttttaagggagatacagaatttaaaatggctttttatgtaatataaacatttatttctcatactaatgtctccatgttttaggatttctagttattatccttaaaagttggttttgagtttccctatttttctctaaccttcttttcctacttttgtgtataactttgtagaaaattagcttatcataaataatttacttttaaactgccttttgtgttttgtggaagtgcccaaatttgttaacttttgaatcaaaaaaggaaatacagttggccttgaacaactttggggttagggctgccgattcctagtgtagtcaaaaatccacatgtaacttttgacatccccaaaayttaaatagcctactgttgaccaggagccttaccaatagcatacacaattgattcacacatatttcatatgatatatgtattgtatactgtattcttataataaaccaagtgagagaaaaaaatgttattaagaaattatcagccatgtgcagtggctcatgccygtaatyccagcactttrggaagccaagatgggaggatcacttaagcccaggagttcaagaccagcttgggcaaagcaagactccctctctacaaaaaagtaaaaaaaattagccaggcattgtggtgtgtgcctgttttcccagctacttgggaggttgaggtgggaggatcacttggacccagcacgtcgaggctgcagtgagctatgatcataccactgcagtccagcatggatgtcagagtgagaccatgtctctaaaaaagaaaatcataagaaaagaaaatagatttactgtttgttaaatggaagtggatcgtcataaagatcttcatccccattgtcttcatgtcaagtagactgaggaggaggaggggtcagttttgttgcctaagagtggcagaggcagaggtagacccatgcggttcaaatccrtgttgttcaagggtccactctagaatttttatgaggagtctgttaagatgtaatgttaaatgtaggtaatcaaatggatraaagtttaccatatctccagagaacatgctggttaagagtctttgcatataattttgggagggggtaaatatatttgaaatgtaatatgttaactgcttagactcagattagggagttaagtcttttttttttttttaagtaagcttcaattgaagcattataggctccaggttttaataaatattgtggataaatgcttattgatatagaaagttcatgatatagacaccattaaatactgtgcagccataaaaatgaacaagattacgtcctttgcagggacatggatggagctggaggcctttatccttagcaaactaacgcaggaaaagaaaaccaaatacctcatgttctcacttataagtgggagctaaatgatgagaacacatggacgcatagagggaacaattcacactagggcctttcagaggatggaggtggggaggarggagaggatcaggaaaaataactaatgcatactagcttaatacctgggtgatgaaataatctgtacaacaaacccccatgacacaagttcacccaygtaacaaacctgcacatatatccctgaaattataatagaaattataaaacaacaacaagaacaataaaataaaaacactttacatttgagaaagaatgacaatatcagtaggtaaaaccaacatcarcagttacaagaccatccttccagccaagtaaggcagtcaaaagaggtgtagatctggtagcagaaactgggtccataattatcaaagtggaagttcacagagcaattataaytgagaagataaaaactcatgtaacttccattcagtactgcaatttaaaaatagatttttttcacaataactatatacaagataatatatttaacacataaaacaaaagagaaaaataacaattctttctcatcacacaaaaatctatttagaatgtttaagatatcaatctaatctcaatgtctktcttgttctaattaaatcatacaaacataaaaaagttcatgataaatgaaaaacagattattagactacacataggattatctatctatatataaacaaaactcaaaatacctggttttcgttttgkttttgtttttcctgagacaaggtcttgctctgtcaccaaggctggagtgcagtagtgcggtcatggctcactgcagccttgacctcctgggctcaagcaatcctcccacctcagtttcctgaatagctgggaccacaggcaatgaaagtttttatattatcattaataataattatctctgagtagtgatcagactatgagtggtttttttattttttttcttactgggaatttttcatctgttctattttttaaaawacaaaatctgtattgagatttaattcacataccatacaattagcccttgtaaagtgtatgattcagtggtttttagsatatccaaagttgtgcaaccatcacctcaatcaattttagaacatttttatcactccaaaaagaaacrctgttctcattagcagtcattacccatttctccccaaccctcccagcctttggcaactactaatcttctttccatctctttagatttgcctattctaaacattttatgcaaatggaatcatacgatatatagtcttttgtgtctggcttctttcactgagcatgtttgaagkttcatctatgctgtaacatgtatcagtacttcatttctttttttgctgaataatattccactgtcttgatataccacattttatttacctgttcatcagttgatggacatttgacttgtttctacttcttggttattttaaataatgccactatgaacattcatttacaagtttttgtgtagacatatttcttttttttttttttttaagagacacagtctcttctctgtcaccaagkctggagtgcagtggtgcaatcataactcaacagcagcagccttgaactcctgcacccaagtgatactcccacctgagcctcccaagtagctgggactacaggcatgcaccaccatgcccgtattttttttatttagatgtaggrtcttgctgtgttgcycaggctggtcaggaactcttaggcttgagcagtcttcctgtgttggctcccaaaacattgggattacaggcatgagccaccacagctggccatatgtttttatttctcatgggcatatagcgaggggaggaattgctatctcttatggtaactgtctttcccccctccctgcaagacagggtcttgctctgtcactcaggctggagtacagtggcgcgatcatggctcactgcagcgttgagctcctgggcctcagcctcctgcctcagcctcctgaatagctggaactagaaacacataccaagcacccagcaaatttaaaaaattttatttaagctgggtgcagtggctcatgcctgtaatcacagcactttgggaggcaaaggtgggtagatcacccaaagtcaggagttcagcaccagcctgaccaacatggtgaaaccctgtccctactaaaaatacagaattagctggctgtggtggcgcatgcctgtaatcccagctactcaggaggtggaggcaggagaatcgcttgaacccgggaggcagaggttgcagtgagccaagattgcgccattgcactccagcctgggcaacaagagcaaaattccgtctcaaaaaaaaaatatatatatatatatatatgtgtgtgtgtgtatatatatgtaggtatatatatgtatgtgtatatatatgtatgtatatatgtatgtatatatttatatgtatgtatatatataagtatgtgtatatatatatatgtatgtatgtatgtgtgtgtgtgtgtatatatatatatatttgtagagacatagtcttgctgtgttgcccaggctggtcttgaactcctggcctcaagtgaaactccttccttggcctcccaaagtgctgggattgcaggtgtgagtcaccacacagggcttggtaactgtgttcaacctttaaaaaaactaccacactgttttacaaattggctacaccattttataatgctaccagcaatatatgagggttacagtttctccacattcttaccaacacttgtttttatttatttttttgtttgagacacagtttcactctgttgcccaggctggagtgcagtggcagctattcagctcactgaaacctccgcctcccaggttcaagcamttctcctgcctcagcctcccaggtagctgggactacaggcrtgcaccaccacacccagctaatttttgtattactagtagagacagggtttcaccattttggtcaggctggtctcgaactcctgacctcaagtgatgcgcctgcctcggcctcccaaagtgccgggattacaggcatgagccattgtgcytggcctaacacttgtttttaaaggcatatgttgttttattgtgcttcacaggtactgtatctttttttacaaatctaagttttgtggcaactctgtgtcaagcaaggctattggccccattttcccaacaagtaygcacttcccatttctattttacatttttagtaacttttgcaatatttaaaatattttcatyattattatatctgttaaagtgatctgtgatcagtgatctttgatgttactattataattgtkttggggtgccaygaactatacccatataagatggcaaacttaattgataaatgttatgtgtgttctgactgttccactaaccagccattcccttgtctctctctcctcgagcttccctattccctgagacacaacaatattgaaattaggccaactaataaccctacagtggcctctaagtgttcaagttaaaggaagagagtggcacatctctcactttaaatcaaaagctagaaatgattaagcttagtgaggaaggcrtgctgaaaaccaagacaggctgaaaccaggcttcttgcaccagttagccaagttgtaagtgcaaaggaagaccttgaaggaaattaaaagtgctgctccagtaaacactggagcacaagaaagcaaaacaaccttgttgttgatatggagaaagcttgagtggtctagaaagaagatcaraccagccacatcatccattaagccaaagcccartccagagcaaggccctaattctcttcatttcagtgaaggctgagagatgtgttgaagctgcagaataaaaatttgaagctagcagaggttggttcatgaggtttaaggaaagaagccgtctctataacaggaaagtgcragtgctgatgtagaagctgcagcaaggtatccagaaaatctagctaagatcattgatgaaggtgtctacactaacagattttcaatgtaaacraaacagccttctattggaaraagatgccatctaggacttccattgctggagaagagaagtcaatgcttgacttcaaagcttcaaaggacaggctgactctcttgctagggactaatgcagctggtgactttaagttgaagccaatgctcatttaccattccaaaaatccgagggtcttgagaattatctaaatctaccctgcctgtgctctgtaaatggaatgacaaagcctggatgacagcacatcggtttatagcatggtttactgactatttgaagcccactgttgagaactattgttgagagaaaaagattcgtttgaaagtattactgctcattgacaatgcacctggtcacccaaaagctctgctggagatgtacacggaaattcatgttgttttcatgcctgctgacacaacatccattctgtagcccacgcatcaaggagtaatttcaactctcaagttttgttatttaaaaaacacatttcataaggttcagctgctatatagatagtgattcctctgatggatttgggcaaagtaaatagaaaaacttagggaaaggatgcgccattctagatgccaggaagaacactcatgattcaggaagaaggtcaaagtgtcaacattaacaggagtttggaagaagttgattccaaccctcatggatgactttaaggggttcaagccttcagtgtaggaagtaactacacatatggtggaaatagcaagagaactagaattagaagtgcagcctgaagatgtaactggattgctgcaatctcataaaacttgaatggatgaggagttgcttttaatgaatgagcaaagaacgtggtttcttgaggtrgaatctagtcctggtgaagatgctgtgagcattattcaactggcaacgagggatttagaatatgacttaaacttagttgaaaaaggagcagcgggtctgagaggatagacyacagttttgaaagaagttctactgtggataaaatactatcacacaacactgcatgctacagagaagtttttggtgaaaagaagagtcagttgatgagrcagactttactgttgtcttattttatgcaattgcacagccacctcatcatttagcaacctccatcctgatcagtcagcagccatcagccatggaggcaagaccctccatcagcaaaaagattaagactctctgaaggctcagatgatcattaacattttttagcaataaaactattttaaattaaggtaggtacattgttattttagacataatgctattgcacttaatagactacartgtaatgtaaatatataacttttatatgcaccgagaaaccaaaaaatttgtgtgactcacatattcactttattgtggtagtctggaaccaaacccacaatatctccagggtaggcctgtatgtgtctttttgactataaccatgttcgtgaatgtgaagtagtatctccttgtggttttcatttgacttccctaatgattaaggacrttgatcatgtgttcatgggcttattggccatttgtatatcgttgaagaaatgtgtattcagatcctatgcccgtttaacatttttttaaaattgagttgtaagagttctttagatattctagatacaaattccttaccagmtacatgatttgcaaaatttttcttccatcccatgctatgcattgtcttttcacttcttttcttttcgtttcttttttaagagatggggtttcaccatgttggccaggctggtctcgaactcctgacctcaggtgatctgcccacctcagcctcccaaagtgctgggattacaggcaggagccactgcacccggcctcactttcttaatgatgttctttgaagcacaaaaagtttttaattttaatgaagtctaatgtatctatttttttcctttgttagttgtgctcttggttttttatctagaaaccattgcctaatgcatagtgatgaagatttatacctgtgttttctattaagagtttttaggctggacgcagtggctcacacctgtaatcccagcactttgggaggccgaggcgggcagatcacgaggtcaggatttcgagcctggccaacatggtgaaaccctgtctctactaaaaatacaaaaattagctgggcatggtggtgggcacctgtaatcccagctacttgggaggctgaggcaggagaatcacttgaacctgggaggggggaggttgcagtgagccaagattacatcattgcactttagcctgggtgacaagagygagactccatctcaaaaaaaaaaaaaaaaaagagtttagyagctttagcacttacatttaggtttatgacctatattgagttaatttttatgcatggtagaggtctaacttcattccttttcatctggatatttatttgtcccaggagcatttgttaaaaagactactttttcttcattcatttattttggcatcctattaaaaatcagtttactataaatttgaaaggttatttctggactttcaattctrtgattttttttttttctttttgaaacagggtctcactccgttgcccaggcgggagtgcagtagcatgatcatggctcactgtagccttgacctcttgggctcaagcaatcttcccacctcagtctcctgagtagctgagactacagccrtgagccaccacacccagctaattttttaatcttttgtagagatsgggtctcaccatgttgcctaagctggtctcaaaccgttggctttagacatagttttacttctttttttctggatgctttctatttctttttctggactaattgccttggctagaatctctaatattgtatagaagtggcaagggcagacartcttttcttacagctattcatatactgataaaattaagtactttattaattaaccccatcttctaacccatctgctgcagctggttcggatttagaagagggcttggcctgaagagtgagaggtgaggggagaggccaataacaggtgtttttgggacttggccctagagaattgcgtgtttttacatttttttttccaaatgctgttgatgaggttgaagctgtccctccccagagcagtagtcaaaagcctgtagacagagaagttcacacattaagtataaggctgttttagtgagtcctgagctctccatctgccaagccctcttctaagtgcagtctgcaaatccagcagcacacgtgccacatgacagcccgtgtccatgcagttactgttcttggttaaaaatctgaagtttcatgaatctgacaatttagaatctgttcttggttaaaaatctaaagtttcatgaatctgacaatttagaatctgttttggggtcagtatggcaattcataccaacagttaggaaaatgttcatatataccttgaccctttaatctgacatctgggmatttatttattggaaataatcccaaagaggagtaaaataaaagcaaaagaacaagagtctttggtgatgaggaaaaatcaagactaatttacacaatttaaatgtccagcagtactgctgtcataaagygtagttttatatatttatttcgaaatatcttatatttgragtgtaatatggttacctaaaatgactatataaaaccaccgaaaagtatttattaaataatgctaagtgacaaaaagaacataaaattgtagatacgcagattatgatggaattacggttctgaaggtgtagaaatagtttggtaagggaacatgaagaaattaaaatactattgcataagagtgacatatagttgtaggtaatattattaaattgttcataaatcattttccagagtgttttgttaataaaaatataacataatcacaatactaatctggttaaaaactgaattgtgtcacgatagcagcacctgttttayaggattggaaaagtctctccaataacatgatagcaggcatttaaactgaatcatttcaaaataatgatgatttcagattcttatttttaaagaaaataatttcagctatttcataattttttctggtagaaaatacagaaaagtacatatatattttcaaaaccactcaattctatcacacagaaataactactgttaacatattggtctatacctttacaatattttttctgtctatatatttacatttatatatttttccataatgaagaatctgaagtttagattattttgtaacctttgtttttgtttttgtttttgagacggagtctcactctgttgcccaggctgaagtgcaatggcacgatctcggctcactgcaacctctgcctcctgggttcaagcgattcccccgtctcccacctgggttcaagctacccccaagtagctgggattacaggcacccgccatcatgtccggctaatttttttatttctgtagagactgggtttcaccatgttggccgggctagtcttgaactcctgtcctcaggtgatctacccrcctgggcctcccaaagtgctggggttacaggtatgaaccactgttcccggccataacctttgtttttatcagaaaagttgatgatgcacattttcagatgagtatgccattcagacttcccctttaggcaactcgttccgasgtgcctggaatgggataaaacaaatgcacttactgayttttttccccgctttgctgtagaaattggcgtgttagccaaggctttcattgaccaagggaaactcatcccagatgatgtcatgactcggctggcccttcatgagctgaaaaatctcacccagtatagctggctgttggatggtaagtggagtctcatgagcatttcacctgcccaaaataatcantgctggcaggagaatgagcatttcatgggcttcagacagacgtcaaggatggtggtttggggagaggggtgcttgggactatcctgaaaccagtcatcttctctgggaccagttctatatccaaatggaaagagggaagtgaaktgcatgatttctaagctcccttcagatgtaactttagttcctttcccctttctttgagaatattttgtgatatgggaggatcaccacagaagaagcaagacccaagagtaatttacaataagctgtaaactttccctagccaggagtatggccgaatccttgagggtaggttgatttttagttttgttaatatagagaggacacaaaagagatttgtttcagttgagtcctcagctctcactaaaactgggataaacttgggataagccttttcttcaagaagatctgagtcataatatccttttttggaagaggatagctaatctagtcttctctcctactcaaccccattcacccaccttcgcacacaggcacgcgtgcactcagtgttgcccttgccaagccctgcagccctgacttgcttgctttatctaagaaggttctgaagtcttgtccttgtggaaagtacattctagtagaagacaagtagtaaacaagtaaacaaaaacttggataagcacagatataagtgctaagaggtaaattagaagttgatgtgggccagaggcagtggctcacgcctttaattccagcactttgggaggccaaggtgggcggatcacctgaggtcaggagttcaagaccagcctggccaacatggtgaaactccatctctactaaaaatacaaaaattagccgggcgtgatggcgcacacctgtaaccctagctactcgggaggctgagacaggggaattgcttgaactgggaggcagaggctgcggtgaaccgagattgccccactgcactccagcctgggtgacagagtgagattctgtctcagaaaaaaaaaagaagttgatgtgaacagagagtaatgtagttgaggagtaggcactttttttttttttttaatggagacagtgtctggctctgttgcccaggctggagtgtgatggtgcgatctcctctcactgcaacctcttcctcctcagttcaagtgattctcctgcctcagcctcctgagtagctgggattacaggtgcccaccagcacacgtggctaatttttgtatttttagtagagatagggtttcactatgttggccagactggtctcaaactcctggcctcaagtgatctgcccacctcagcctccaaaagtgctgggaytgcaagtatgagccatcgcacctggcatcttctcctttttaaaacaaaatatgttgcatggttcagaattcaaaattttgttttaaaaagtttaatgaaaagtcttgcttctttatgaggtgtaaggggctgaaaaacattcccatttgtgggaggtcttgaggaatgagtaggattacatgggtggagagacaggttatctttggcagcaggaacaaggtaaaccaaggtaggctggtgatgctgcccaggaaagggccattatttctcccgaatccaggtttcctgggtatagttttagtcgttatcattgtcattttagcacattgtaaggtctagatcactggcaaatttttccacatttcattgttaacaagaaaatgtaatttttcagatgatatttttgctctaacaaattatgcatgtgcggttttaacctttgtcactttttttttttttttggagacagtgtcttgctctgtcaccaggctgcagtgcaatggrgtcatcatggcttattgcagccttgacctcctgagctcaggcratcctcctgcctcagcctcctgagtagctgggaccataggcatgcaccaccacgccctgctaattttgttgtcgttgttatttatagagaaggggtcttgctatgttgcccaggctggtctcaaactcctgggctcaagcagtcctcccgcctcagcctctcaaagtgctgagattacaggtgtgagccaccatgtgtggcctaacttttgtcatttttgaaaatatattatttctactaattttaatttttttctggtattctggacaaaatgtccttagtaacaacattgcaaagtcagaagtttgtgatcaaagtattattttaaattccctaatatrcttgggtgtatttctgaattcactcattaggtacatttgcctgtctctctgtttttgaaccacattgtttagctatataacacatctctttgtctgttagggttttatcyttttgcattaatagttttcctttagctggactttagtttcattttgtcatatttcagaaatagcctctggagtgtttgtttgtttgtttttgaggagtcttgctctgtcayccaggctggagtgcactggtgtagrattttggttcactacaacctcccctccygggttcaagcgattctcccacctcgcctcccaactagctgggattacaggsacctgccatcatgccaggctaatttttgtatttttgtagagatgggatttcaccatgttggctaggctggtcttgaactcctgasctcaggtgatccgccctcctcrgcctcccaaaatgctgggattrcaggtgtgagccactgcgcccggccagtccctggatttgggtgaagatcatgagttcagtttgagtttaaaggcgggaaaagtcctgtgtcccagttagaggtagcaggcaggaggaattctttgttatttgggtgagggtcagccttttgttctactcaggccttaaaattgattagataaggcccacccatattaagaagggcaatgtactttatcagtctgcctatttacatgataatttcataacaaaagcagcctgacagatatacccagcataatatttgccaaatatctgggcactcatgccccagtcaagttgacaggtaaccatcacagttgcaccgcagctgtgatcggcctgcctggtgagcctcattccttttgttcagattgtccaacattaattctttctttttctttcttctttctccacccgccccacccccaccccatacttcctttcttttttcttcttctttttcttttttactttataaaggttttccaaggacacttccacaggcagaagccctagatagagcttatcagatcgacacagtgattaacctgaatgtgccctttgaggtcattaaacaacgccttactgctcgctggattcatcccgccagtggccgagtctataacattgaattcaaccctcccaaaactgtggtgagtagttgttgtggaactgtcacatagcagactgtccctgagtcctcttgccctaacagacataagttgagtgaacttggaaatcctctgaccaaaactcctgagggtatattctcaggttacttggtagagttgactgatcaagtccactgagcttggtgcgaaaggttgccccaggagcagcaggggtttgttactcattcaaaaacakttgttgatttcctrctctgccaaggagtgtgttaggagttgcgctgatagagattcataacaccttggtttatttaggacttgcagttgaaattccaagtttatagctgaatctttttgaatatatatgaacttacttagaggctgcttagaaaaccttttactctaaggctaaagtgactgataactgtagaaatgaaactggcgtaccctgtttctgttgcgatgatctcttttgaggttggattccatttwtttaaaagttagcacatttttgtgcttggcacttgcacagagatgtctgtttaaaaataattgaactgcttatgaaaatatctttcagaaatatgatatctgatactagtctcttctaatcctgtttagggcattgatgacctgactggggagcctctcattcagcgtgaggatgataaaccagagacggttatcaagagactaaaggcttatgaagaccaaacaaagccagtcctggaatattaccagtgagtttttgcttttcagaacttctcttgcrtagtggtgcactaagtctagttttgattttccttcytctacagctgaaatgctaaaatgccraaagacccagttcacatgggcttaagtaataaaggaaatacattagcttgtgtaacagaagtccagaaggtaggttgggcttcagtcacacctgggtttgatcagtgtagccgttctcttggttttgccttcctgtgtgtgtattggctttgtccttagscttcctgcatggtagcagacatttgtaggaacagccagggcttcctcttctatgaagggctgaggggtaacctttcctccagtgaatagaagcccagagcaccactcggatggagccaacttgaactacagtcagggaatgcctggcactaactgttacaggcttgggttactgcctactgcagaaccagtcattggggtgggaaggattccactgattacactgactagtccacttctagagttggcrgtgcgacagtctcatccatactctgctatgtgcagatgttccgcaatttacaatgaaattacatcctaataaatccattgtaatttgaaaataccaagcaccataacttagcctgccttaaacatgctcagaacacttagattagcctacagttgggcgaaatcatctaacacaaagcctgttttgtaataaagtgttgaatatctcacataatttactgaatattgtactgaaattgaaaagcaggatggttgtacaggtgctcgaggtacaatttctaytgaatgcatgttgctttcgcaccatcataaagctgaaaaatcctgcattgaataattgtaagctggggattgtcggtaggggaggcagggctggaatgaatgctggggaggcaaacttaatattgcccaccacatttgccaatacaggatgctatggtgtggaagaatctcagatggcagctaatccctcagactatgtaattggctagcagtctttaaaagcttacattttaacattgttttgtctgctcttgttttgtctgcaacacktataggaaccgtactgaatgagtatttgacttaggctaagaaatactccagttttcttactgagccttcctgcttcttacagaggattgactgcctcccctttcatttatgtacttattgaatactgatcctgatcagggcagaacagtatcttgggcagaacacagactctggagccagaatacctaagttcaagtcccagctcaccatcttcaccttcaccttctgcttaacctctgcctgttttttcctstgtaaattggggaagagaataaaggtttgaaagattaatatgggtaactcttagaactgggcctgacgcatagaaagcactatagaaatgttagctattgttattgttgttgtaatagcgtatgtatgcagtagaaatctgaagcaatagtttccaaactgttatttatttatttattttagagacagggtctcactctgtcacccaggttggagtgcagtggttctttcatagttcactacagccttgaattcctgggctcaagcaattctcctgtctcagcctcccaagtagccaggactataggcccgtgccaccagacctggccaattaaaaaaattttttttagagctggggctcttgccatgttgcacgggctactcaaactcctggcttcaggcaaccctcctgcctcggcctcccaaaacattgggattacaggtacgagccaccatgcctggcctttcaaaccatcttaattttttctggagcataaaattacaaggttggcaaaccattttttrtagtagctgttactataattttgtcatttgtttaatgaggctggttctgaaaattaccgtctcttttgccctwggcaagctatttaacctccatgccacaaatcccttatttgtaaaatcaggcaatattaaatagcatctgctttatagggttgttaaaagaattaagtgagagatcctggaaagtcctacaacagccctggtgtctattaaatcattcattgtcagcaattattgttcactctcttgacactgtgctaggcccttggtccacatggacaattagatccagtccctgtcaggctccaagaagctatgtttgtgggtgaggtggggagctgggtaaacagtatttatcatacaatatgatatgtgcttatattaactaagaacctaattcacaccaggttaagcaaaaggggaatttattggtaatgtaactgaaaagtcaaagatagatggatgggtccaggtgttcaaaaacamctatcatcaggcgtcagtcactcmgctccattgtcctgtgctggcttcagtctcaggtgtgccctccctgtgtagcagcccctcagctttccagtttacctcctaccagccagaaaccccagcagcaaagagcctcttttgccagcaaaagtcttggggtcggcaccgattagcwytgatcatgtccatccttgaagatggggagtggggacagtctctcctgaacctcgtcgactgagtttggtggagaggttrtttcccaaaggtaaccagaggaagggagaatgcattgttgctgggcagataacaccaccactgcaaggctatgaatgataatcccccaaagcagtgaagtaccaggggttgttgggattcgttctgtcaaaatatcaaaatatgggaaggggcctgggacagtggctcatgcctgtaatcccagcactttgggaggctaaggcaggaggatcgaaaaggcaggaattcaagatcagcctgggcaacatggtgaaactctgtctctacaaaacataaaaaaaaatattagccaggcatggtggcacatgcctatagtcccagctactggggagtctgaggtaagaagattgcttggacccagtgggtcaagactgcagtgatctatgattgctccactgcagtctagagcgcgggtgtcagagtgagaccctgtcttaaaaaaaaaaaaaaaaaaaaagtagtaagggaagttaaggaaagctgcgaagatgaagtgaaagacacgggyccctgtcttaggagatattttagaagtctttctaggctscttctggcttttgctgccttttgctgttaattcaagcttttcttttctttttctttccttctttcttttttttttttttttttttgagacggagtctcactctctctcaggttggagtgcagtggtgccatcccagctcactgcagcctcctcatcccaggttcaagcgattcttatgcctcagcctccccagtagctaggactacaggcacgtgccaccatgtcctgctaatttttgtatttttagtagagacggggtttcgccatgttggccaggctggtcttgaactcctgacctcaagtgatccaccctccttggcctcccaaagtgctgggattacagacttgagccaccacacccggccgaattcagtcttttcattctcagctcccacacgtagaactcagcgagacttgactaaaaactgaaagtttatttgcaagaatgttagtaatagtcagcattgttatttagaaatgctgacagttgtattgttggttgttttaaaaaaaaccttttagctgtgggacattatagagtaactggtctatgtttacaaacaacatgatgcccttactctttggaggaccaattgttgaagctggttccattttattacacagaaattaaaatgacaaatgttcacccacgatttaggatcgaataggtgcctgcaattgtgccctcagtaattaacccacttgtgacactggcttgatttttaaatcggctcttcaagaggcttacaacagttaagaagcttgttcccttgaaagcagtaccaggtgccagtgaatttagaagcaggagggtttctaatatcccaagaatgctgtatttgcataatttccttccttagcagatgtttcttaccgagaaaacagtgggtgttatttaagttaactgtggcaaattttatgaggtatcaagggaagaatgcttttgtccttagtgaaagccctgaaaacctcggaagaagggccacacaggtataaggaatcctcttttcacaaagtcataaaccagagttcgtaggttgtccttaagcagcctttacaccagtgtgwatgtgtggaggcgaatgtgtggaggtgtgtatgtgtggaggtgtgtgtatgtgtaggtgtatatgtggaggtgtgtgtatgtggaggtgtgtatatgtgtaggtgtgtatatgtggaggtgtgtatatgtgtaggtgtgtatatgtgtaggtgtgtatatgtgtagctgtatatgtggaggtgtatatgtgtagatgtatatgtgtagctgtatatgtgtaggtgtatatgtgtagatgtatatgtgtagctgtatatgtgtaggtgtatatgtgtaggcgtatatgtgtaggtgtgtaaatgtggaggtgtgtatatgtgtaggcgtgtatatgtggaggtgtgtatatgtggaggtgtatatgtgtaggcgtatatgtgtaggcatatatgtgtaggcgtatatgtgtaggtgtgtaaatgtgtacgtgtgtatatgtggaggtgtgtatatgtggaggtgtgtatatgtggaggtgtatatgtgtaggcgtatatgtgtaggcatatatgtgtaggcgtatatgtgtaggcgtatnnnnnnnnnnnnnnnnnnnnaaaaaaaaccttttagctgtgggacattatagagtaactggtctatgtttacaaacaacatgatgcccttactctttggaggaccaattgttgaagctggttccattttattacacagaaattaaaatgacaaatgttcacccacgatttaggatcgaataggtgcctgcaattgtgccctcagtaattaacccacttgtgacactggcttgatttttaaatcggctcttcaagaggcttacaacagttaagaagcttgttcccttgaaagcagtaccaggtgccagtgaatttagaagcaggagggtttctaatatcccaagaatgctgtatttgcataatttccttccttagcagatgtttcttaccgagaaaacagtgggtgttatttaagttaactgtggcaaattttatgaggtatcaagggaagaatgcttttgtccttagtgaaagccctgaaaacctcggaagaagggccacacaggtataaggaatcctsttttcacaaagtcataaaccagagttcktaggttgtccttatgcagyctttacaccagtgtgtatgtgtggaggcgaatgtgtggaggtgtatatgtggaggtgtgtgtatgtgkaggcgwatgtgtggaggtgtgtgtatgtggaggtgtgtatatgtgtaggtgtgtatatgtggaggtgtgtatatgtgtaggtgtgtatatgtgtaggtgtgtatatgtgtaggtgtgtatatgtgtaggtgtatatgtgtagatgtatatgtgtagctgtatatgtgtaggtgtatatgtgtaggcgtatatgtgtaggtgtgtaaatgtggaggtgtgtatatgtgtaggcgtgtatatgtggaggtgtgtatatgtggaggtgtatatgtgtaggcgtatatgtgtaggcatatatgtgtaggcgtatatgtgtaggtgtgtaaatgtgtacgtgtgtatatgtggaggtgtgtatatgtggaggtgtgtatatgtggaggtgtatatgtgtaggcgtatatgtgtaggcatatatgtgtaggcgtatatgtgtaggcgtatgtgtgtaggtgtgtgtatgtgcaggtgtgtatatgtgtaggtgtgtatatgtgtaggtgtatatgtgtaggcgtatatgtgtaggtgtgtatatgtggaggtgtgtatatgtgtaggcgtatatgtggaggtgtgtgtatgtggaggtgtgtatatgtggaggtgtgtatatgtgtaggcgtatatgtgtaggtgtgtatatgtggaggtgtgtatatgtggaggtgtgtatgtggaggtgtgtatgtgtaggtgtgtatatgtgtaggtgtattatgtggaggtgtgtatatgtggaggtgtgtatatgtgtaggcgtatatgtggaggtgtgtatatgtggaggtgtgtatatgtggaggtgtgtatatgtgtaggcatatatgtgtaggcatatatgtgtaggcatatatgtgtaggcatatatgtgtaggcatatatgtaggtgtgtatatgtggaggtgtgtgtatgtgtaggcatatatgtggaggtgtgtatatgtgtaggcatatatgtgtaggtgtgtatatgtgtaggtgtgtatatgtggaggtgtgtatatgtggaggtgtgtatatgtgtaggcgtatatgtgtaggcgtatatgtgtaggcgtatatgtggaggtgtgtatatgtggaggtgtgtatatgtgtaggcgtatatgtgtaggcgtatatgtgtaggtgtgtatatgtgcaggtgtgtatatgtgtaggcgtatatgtgtaggcgtatatgtgtaggtgtgtatatgtggaggtgtgtatatgtgtaggtgtgtatatgtgtaggtgtggaggtgtgtatatgtggaggtgtgtatatgtgtaggcgtatatgtgtaggcgtatatgtgtaggcatatatgtggaggtgtgtatatgtggaggtgtgtatatgtggaggcgtatatgtgtaggcgtatatgtgtaggygtatatgtgtaggcrtatatgtgtaggcgtatgtgtaggtgtgtatatgtggaggtgtgtgtatgtggaggtgtatatgtgtaggtgtatatgtgtaggtgtgtatgtgtaggtgtatatgtggaggtgtgtatatgtgcaggtgtatatgtgtaggtgtgtatatgtgtaggtgtatatgtgtaggtgtatatgtggaggtgtgtatatgtggaggtgtgtatatgtggaggtgtgtatatgtggaggtgtatacgtgtaggtgtatacgtgtaggcgtatatgtgtaggcgtgtatgtgtaggcgtgtatatgtgtaggcgtgtatatgtgtaggtgtatatgtgtaggtgtgtatatgtggaggcgtgtatatgtggaggatgttggcacatccttagtatccaaaataaaatcagtagaaataaaagtaatataattttcaaagaattcatacatactagaagtcttacgaaaagcagcttctaaatgcaaggactaggaggtttgcccatcttactattaatagttacacacatttctcctcatggagtaactgaagctttctggcttctttgtcgaactttagttcgtaggaaagcatatacatagggccaaatcttgttggtttctgttccggagaatgtttccagcaccccttttttcctacagatgaaacaaaaacaaaacaaacacacacaggcctgagtcttcctaataagctcattcaaagcctttatgtggaggcgtgtatatgtggaggtgtgtatatgtggaggtgtgtatgtggaggtgtgtatatgtggaggtgtatatgtgtaggtgtacgcatgggctagaggacgggtattagcaagaggaaggccagaatctttggagggaatctgtgtggcttgaaaagcacccccaggattctgatctcactcttcaccatgttatccacaggaaactggagtaaataaaatagactttggctgctggtctagtgacaagctagacaaatctgcctgggaagaaatgaagacagtcaataggaaacccaataaaaccaacactttttattcccmtttctgttaatattcagaagagtggaatagaggagaacataaatgttggcctgggcaaaaaggaaagatactcaagtattagaaagtagcttttgcaaaagagtaagtagaaaaaaaaggctgatgggtgttctggtatcttataggtcctgtttggaaatgtactaccaacttggtgatttgggctaagttacattacaaagggatgattttattagtaaaataagaaaatttgagctttggaaaggattaaacaaactataatatgtaaagcatgtagcacagcctttgacacacagtgcatgttcaataaataaaataaatgataggtgctgttatttttttaagcacccatttttgtaagccagagagcacaactgaaaccaaaatgtacattttccaatgcccagccaagtgcctttctctcctgattacacaaatntatacttaccaagactcctatatctacaatatsattatttacagaaaggctttgaaagagcttattaggaagactcagacctgtgtgtgtttgttttgtttttgtttcatctttaggaaaaaaggggtgctggaaacattctccggaacagaaaccaacaagatttggccctatgtatatgctttcctacaaactaaagttccacaaagaagccagaaagcttcagttactccatgaggagaaatgtgtgtaactattaatagtaagatgggcaaacctcctagtccttgcatttagaagctgcttttcctaagacttctagtatgtatgamttctttgaaaattatattacttttatttctactgattttattttggatactaaggatgtgccaaatgattcggatactaagatgcatcgtttgaaatcatctagtgtgttgtatgcagttatcctcaaaaacatcagcgatgtctgaacctttaaaacatctgttagagcaaaattaaaagagcatttggtagtaatctaactttttgttcagttaataagtggttgataaagtttccatatttttctggaaaagttaaaaaaagttacatgtcatttggagaaaatacgtaatcagaaatttgtgcatagattgatgccaaaaaagacatttccagcattgtggaacatggtgagacactatataaaattccagaaagaaagcaactggatttacagatttattgtgagacacaaattcactgctgcctttacactaagaaatgtatatgttaaccatatatgctgtatttattttgtcgttaagcatactttcagtttactcagaattttcaatttgctataaagatgtatcaattagcatatagaaaaatattactttaagatgacttgtttcctttgaaaatacctgtgtactgagggttatgatttktgtcaaaaattgacataagtgctyttacaagcaccaaagttgaatgaattttcaacaaaatgtaattaaagtctatgttttcagttatgactcaggttaagaaatgtgttttaggatctacttgctggtttttctttttgatccaaatgtgtgatctgccctgataaataacaagttatagtaccatctcccccgccaataaaaaagagaagaaaaaagagaaacccgtggcactatgtaaataaagtaagcatactttgttgttagtaaatagatgaggcatgcctgggaaatgctcccttggcataaatagcaatcaatyataattagtaaacaggtgtaccaataaaaagaatttacatgataggttaacaaggaccaggaaagtgagtttcctgaaggagttctttgttcctgatcaaagaaattgatacctgttagcattcactgccaccatattttaaggagaaagaactctattggtgtcgtctgagcagccatttaaaaattggaatctaaaggatggttgctgatgtactgtgtggyctggtagaagtggggaaatatgagagatggaggaaaaacttgattatgtcttccatggcatatttactcttactttacttcgtgccaaatcaaatgaaacaagccgtcttacaagtcgttattgcctttaaaaatctgttccgtttttttcccaggtacttaaaatacaagtgccagtaagtgrttcttatgtgttttggggggaaaattttatttcccttttcttctgatatttaaaaaattcatcgatctttcaagatgaaccaaggttttttaaaagaawtataggaaacacttcattctttataaaactttctataatgccttatttgaatgttaatcttatgtgctttctraaaaatgttgtgaaataccaaacttatggattatcactaggttatcaagcatatattagtctttatcagaataaaatgaaatttcataactgtggctattactttgttcttggtccttcacagggcctgctccatcccacctkcctttytgctgcctgatgtctcaatggcttctgaatgactgttctaataaatgatcttaaaacagtccataggctggtttcagtttatgcaatacttcatctcctgctatggtagccataccggccttcataatacccttaggggatttggaaatcaaagtgagcagtggaagaacatggctatgagaattaagactcttatttcctgtgaccattccctccccacccgcaaacacttagcccaaagttttgcacatacattcattactttaggaatgaatatgactgtaatacaacttttttctttatttttttttagacagggcctcactctgttgcccagactagagtgcagtggcataattgggtcactgtaacgttgaactcctgggctcaygcaattcttctacctcagcctcccaagtrgctgaaactacaggtatgtaccaccatgcctggctaattttatttttttgtagagacggcgtctcgatatgttgcccaggctagtctcctggcctcaaacagtcttcctgattcagcttcccaagtgctgagattacaggtgtaagccactgcccccacccaaaaaaataattctgtaatgaccatcattaagatttatgtaccacatggaaatacatgtatggagctgaatgccatggctaggagaaactactatacttttgttaaaagccaatgagaggccgggcgcggtggctcacgcctgtaatcccagcactttgggaggccgaggcgggcggatcacraggtcaggagatcgagaccatcctggctaacacggtgaaaccccgtctctactaaaaatacaaaaaaaaaaaaaaaaaattagccgggcatggtggcgggcgcctgtagtcccagctactcgggaggttgaggcaggagaatggtgtgaatccgggaggcggaggttgcagtgagctgagatcgtgccactgcactccagcctgggcgacagagggagactccgtctcaaaaaaaaaagccagggagaacagcacctcaactgatttattttatagagtaaaagttattttgctataccttttgtaagcagcgtgtactgtgggaaatgcaaactagcagttgttagcaccatccagaaatttctgtcagttccatttcaaatagtttaaatactggctcaaatctctaaaccccaccctatggctacttttcccccagctatatataatggcattctagcaagatattttggatcctcataacttgtgacaaaactgccctatactaacaacaaatcattgtaattatagatctcaaattatgttaaattgctatagttgcaaccaacagcaagaatttgtattttagaatrtgttgtgtcttctcattgaccaaaaaataaaaataaaaataaaaataaatcctcaggccctgataaactgtagaaayagcttttctatctttgcagttaaagattttcatcttggaagttatggttaaaaaatttttaaacagttaaaatagtgtagctgtgcttaaagcttctggtaaaagccagtatgctttgtagagcccttatccccctcctgctttttatttgtttttagctcactaaatratataaacactgatttttccatatatagcactgaataaactgtcatgcctaagtgtaaatcagtccagcactgtgtcatctttttctaaagcattccaagttaaatgtctgatgtgtaaataacatgaagaatcatgctgttaactgtgtgaaagatgtgggaattttaataatcattttctatatttagagatcaaacaagtctaattcttcaaagcttatgagaatggtttcayttcatattagatggtgaacaatccataatgaacttatattcaccctgtgtccccctcccgacccccttggctcacatagtgagcaaataattttcagataaatcaacttctcagaactatgcaattgtatatacatgtccattacagatgagagatggatggatttaagggttttgttaaaagtatgtttgctataatggcaaaattgaaatggaaagcccatgaaatggaaagcccaacctcaacccagacaagtacctcggttctgtcccacaccaatttaagaactgaaatacatgattgacttagaaaagtaaactgacatttcgttctcctctgaaaatacccaaaggttaacttcaggatcaccttgcctaaacctacagtcaacttttttcatcctgttagaaaatccacttactaaaacagattcatgttctttgggcagcatgttcattttcatttttagatgttgccaggctggagtgcagtggcgccatcttggctcactgcaacctctgcctcccrgggttcaagcgattctcctgcctcascctcctgagtaactgggactacagccacgcgccaccatgcccagctaatttttgtattttgggtagagacagggtttcaccatgttggccaggatggtctcgatctcctgacctcaggatccacccgcctcggcctcccaaagtgccgggattacaggcgtaagctactgcgcccggctgttcattcatttttaaaagggtaataatatgatatgccagtctgaaagaagaggaggacctgattttcctaaagagaagttataagagattgtgagctcattaggcaaaatttgaaagagctcactaatggtataattggaagagaatgttacccatctacctaagagtaataattttaaggcagtattatcttcactaccactgaaaaaatgacactgagttaacagagaataaatggacagctatttgatttaaaaatttttttattcaaatattaattttatcaaatgaaacaagaatctttgatgatactttgatgtaaaaaaatgtttcattcatgtgtttgcactttccatggtttaatttgtttagggtaaattktccaacctgaaatataaattatccctttgcttaatatactctttatttcttcagaaacaaaaaaaaggtaggaattagttcaaggatgtcaatttactgtttctagtactaaagtacggctaactatgtaatttatagcctttaagtgcaaattatggcatcagtcagtggttcccacaacagacccaatcacactttcatactcaaaacacagtatattcttttgcaagtaaaaatatataaatcaagtttcaaagaacatcttttcagtgcccctcaagaatagtttactcagtttgttgatactttctctcctgccagtcttcagtcattaaatacctctaacttagagaaggcaaaatgaaatycaaaacaatttgaatgcttacaggcaaatcctgggaaagaagggaaaataataattcaagtaacatttctgtgaaactaggaatatggctcctgtgtctgcccattctctcaatttggtagaaagggaaaaataagagcttgcttcagaacagaacaaaaagaaaaaaatgtctacgactaggtcatgggtttaaaaaaaaaaaaagtacaggctgacaaacactactatataaattagtcaaacattttattatagagtatatatttatatcaaaagcacaaaaacgtttattctgaaaaccaggaagattgtgatgttacagaagaagattcaataattccagtccatttctagggtactaagtgtctgatcacctcagygaaaacaagatacaaatgaggccaaggtcacaggtctggccaccctgagtcccttcgcactatttggtttctcaagttgagacacgtattcccagtcccagttagccaccttccaagtgtttgctactagccttaatgggtacttagccaaagactacacccaaatataaccaaagcttatgttaagtcataagattaatccttcaataataaggatagcataattggctttgttacctaattctacataaacaaaatcatcaaatatcctggcataactgaaatgacttacagaggaagtagtaaagcttggaagtattctatggtaactgagctgaaaaaggggaaatgccaaatgttgtaaatgccatcattaccaataagagtcaccaaattctcagaaataggtaattggcagctcaaggcagttagcactacaagatttctcttgcctttaaaaaaaaaatcatttttaagactccttttttaaaaggctacatcaaaaaataaaccaaaataacaaaaattaaaaggcaacatgagtaaaataacyacaaatttaaaaatcagattattattcctgtttgttcttacaagccattagtattcttttaaaacttactccctgagagatcccagactatgttaagaaagagtgagcttgaagttattcttatttaaaaagaaaatctatattagctcatcacatttgatattattataactcttaaagtcagcagggtaaaatcaaattctaaggaatatagttttgagaataatttgagggtaaatgtaatgtatatatcaaatttgtattatagtcaaggatttaactgatggtgccgaaagtcaagtatttaagagttaagacttttaaaaattgtaccccccaacttatttagtaaagtacattaccaactactgatttattgcttttaatgtgatgaaacaccaaatttgacagctaaagtagcagtgggatacaagtatgtttttatctttaatcatttttgtagaataggacatgtacatatccatataaaaagagactgtagcagatgcctcccagaatcaaccagttcttgtaaacattgcatttgtgcagattttcatacttgattccaaaattgagaacaataagattaaargcaaatttagtagccacaaaaagtccagtttgacttcctgcaacatatggtaccactcttctcttcagaacaaaacaaaacaaaaaacctagcagcacattaaaaaaaatttacaaaacatttcagtactctttccctcccatcaaaaaccnaacaaaaataaagtgcagcacccataaaagtgtcaagaaaatagccaagttcttcctttcttgtaacaaaatagcacttggcctcagcagtcttaaccaaattatacagtgtccatcattttgggttcatcatcttctttatgtaccaccgagtttaagctgcagagagctgtactgatagaatactgaagataatctggattctggggaaaaagaaaaggtagattggggggagaaaaagaacgcattataaccagttttatgacagtacatacatatatattcagtttcaccgtcctatttctctgcagtgtagtagagcagtaggaaagaagatggactttggagacagacttgggctgaatcccaagaaaataaagaaaaaaataggatgctatcacctatgagatgtgataaaagaatgatacatgtaaaaaacagaaatgttaacaaataccacctttcttctctgtttaatcatacaaggcaaggctacaacctccatgtgattatatatacatagctactgataatttaaatatggtttgaagttagcaatgcatttttaagattaccatctaattacaacagtaaatactaaaactgcaaatcatctaaataaagaaaaaatttactgggtaaaaattatggatatcttcagggtctattgtggtttcccaaaggttaaaacaaactcagtgagaaatctgtacacttttgagatgtatttacacccttattttttaaactgagaataaaacaacaggatttgttaaacaagcataaactcataaatgttatgcttgtcaatttcaaaaactgggaatagaaaacataaaatcttactcaataaatgcaaaaataaaaccattattaaagcaccatgaataagggtatagcccttaagacccagaactttagaaaattcttccccaattcaattttgtctactcaattgttccgaatatctgctagttacttaagacttttaccacttgtattactagttttacttatatttattttatttaataaacaccagtgaggacagtagtcaaacaggatagatgtcttaaacctcaccatccaataggaggttgggaggcagggttttctaaagatcctcctaagaaagtacaacactttgtgagattcctttattctaaaagtcaaaaagctagctggagttcggattattcccaatcaggtctttatgaaggaagtagcagggacaactgactgaggtctgggacactcacactgggcttcagttttaatcctgcctctatttagtaaagcaagcctcaaggagaacaaaattcacaatttagtaaaattaaaaactagyctacaggataaacctaaagttaactgttattatttctatatccaagaggccttggattagacctctcaaaactaaggataatgaatgstatttggcttatttcacacgattgctgtcaattattaaaaaaaagaaatgaaaagctaaatggttacccacacttaagctttatcaaaaatgaccaatattattgttacattgtctcattctccaaaaaaacagctttaagacctttttctaacaatccaagcctaattctctggaacagagcttacaattactctattaagactgggctccagttttccatggcacaacttttaataacagaattggctgaggagattctccaaaactcatccacccatcttcctaagaactgtaagatactatcatacagagactttaaaaaataagaaggaatcggtatacccgacctaacctayacttagatttcattgactgtcccatattttcatctagtaacattctcaacacatatgattcacagtctgtggtataggtgaataagcagtgaagcataatagaaatccaaaagtagaatattagattcatcacttattgtgttgacctcaggcaaatttcttaagttctatgaatttcagtttactcatctataaaaatgaatgaaaatgaatcacagggtgtttgagaaaattaaataatatgtgtgaaagtgctttacaacatataaactgatataaaaatgggawgttattattatggtaagatttttcttccaaacctctaaactgatgatttggtctttcaggtggcctctcattttacttccctcaactagtcgataatcctttccgcacatgtagcaagcatctaactgaaattttctccagcccttgtatccttcagaaggaccacatcaggatgctcaaattacttaccataaggaattggtctcccaccatgaggagattagcccagcttaattaaatctgaataaccctgataatatcagcaatacagaagtgtcagaattgtataattctagtccccccatgactataagggatgcctagcacctgatatcagttgctatctaatatatagttgctatctaataacaacaaggacttacttctctcaaaccagaggcaacttcttgataatataggcttaagatactataatgtgtatctttccctcttatatttagaatcagttacatccttccaaagtctcttttctccttcccatgcattatgtgacattttaattgcaggaggtttatatattggatttcacagtgacttggtcacagaattcccctggaaaaactacttccctatgggctatttcttaggaactgaagagaaaaatcatcactgaatttaaataaaattaagagataatctgtaggaatttgtagagggaatattctttacatgtctaactaagggggaacattactaattatttaaaaatcaaacattaattatttccatccttgagacttttttttttttttttcagccagagtaggctcagagactcctgataataatatttttgactggggtaaatatgatcaatcactttccttaaaggacatacatgtaattggaatggtgaaattacagtgagataaggtcaagccactgaaaatcccaatttttagcactttatgaggtttaaaactaaatataggactctcctcacattgtcttttgaataagactttccttctcacaatgtagacaacagattaaactggctaaagctggtcttaaaatcttggagcctggaaatgagagatgactgggctctattaaagtgctactagtaaaatcaaatgggtaggaattatctaataataacttaaacttgtaatcctaactagcatcaggcagaccagtggtctgatcatgtctcctttttgatgtaaattttttcatgctgcctatatgacatgatttttttttttttttttttttttttgagacggagtcttgctcygtcgcccaggctggagtgcagtggctcgatctcggctcactgcaagctctgcctcccgggttcacgccattctcctgcctcagcctcccgagtagctgggactgcaggtgcctgccaccacgcccggctaatttttttgtattttttttttttagaagagacggggtttcaccttgttagccaggatggtctcgatctcctgacctcgtgatctgcctgtctcggccttccaaagtgctgggattacaggcgcgagccactgcgcccagccgacatggttttatcttgatcaaaccactgaagacttcaaagaggctcaaacagttggccagtattaccagatacaatattatcagctacattaatgtgttctaaaaatgttatatctggtagacccaacatttaacaagaaaatactaaataaacttaagcaacagatcacactggttccatgtgcatgtccactttgaagctaatcatcctaaaaaattcaaaatggcatagttttaactcaggatgagatgttttaaggaagctcctgagggagccatcttgaagagtttatgattgagatgatcaatagctaagatttgttcttaagaatggttaggtataactaatcactactacattaaaaggagaggaaatctggtatctctaaatacttaagaggtgagattcagcaccaaaacatggcatgaagtaagattcaacmgttatcttctgaggcaggaatatttaaaatagtagcacatattaaaaaaaaaaaagagtggggcaaaataacaaaaattatgtgaattaataggcttataaaacaaatatttacttttccaacttacctgtggtaaggattctaataaacctatagatccaacaccagaatggggaacatgattctgaactgtcataggttgaaaactttgtgattgagaataaagtcttactcttgacttgaaagcttcaagttcatttttgaatgcttcaaaataaccttcttcctctgcctagaaaaaacaaaaaaaaaacaaagactgtgttcttcaagatttctagacatagtaaattccagaaagcatataacaggtttgaagtggaggaagtaatgacaaggtgaatagtctaaatatagaaaccaccacgatccctgtcacatttgtgaaaactacctgatttataggaacattaataattggtttgctccatttccttctgcttcagcaaaataagctaataaaaaacaacccctccctatgcatatgcacacaactaaaagaaaagaaggctttctctgtattttccttgacttatctagatccttaacaggatccaaaatagtcatttaatctgtccaattcattctatcttcttcctactaccaaacaatcaagggatattcttaaaaccttttaattctccaacaattaatgagggggcactattacctgttcctagtaattttctaactgtatattccctacttaaaagagctacgaaaaccaaatagaattcaatagtcaacgtcattatggaaccatcttgctctagttaagcaagtaccttcttttcaatattatggaaagaaaaagtatgataacttaggtcgagggagtggaactcttaggcaactccctattggcagctgcctctgtttatgtttcctctgaatatagagaaatgatacagagatttatcctaccaatagaatgcaggctttaagttcaagtagtggaagagatcttgtcaaatggattttaggttgcgtaacaggttaaaacctgtggattagttactaccatcagcttctattgaaataatgcagagagtgttctgtgctgccatcctatcttcttgtaaatttaggaagaatttccttaattacattttagcacctcactttataagaacttgtgtggacacagagtatgtaatatccataaggattctttctgaaaattaagaggcacaattgctgtcctcattgcatgcttaaggtttagggatttagatatagagtgatgacagattttgtattattaagtaatttgtgggccacttacttaatttctttatgccaatttcttcacccataagatagcaacagtaatcctcataaaatgttatatgaatttaatgagttaatacatgtaaagtgcttagaatagtccctggaacaaagtaagcataccatgaaagtgattatttcataatttaaaaaaaagtattattaagcatacaatgttaagattgaagaccagtgcctttccgttttactttggtaaagtaaatgtcaaacaatatatatgatttggccacattccattattttattaaacaccagtttaaacacatccattaatgtaagataaaaaggaaagtatgttttttactactcttaagtgtcaagtaaaaatttagaagagaccgggtgtggtggctcatgtctgtaatcccagtattttggaaggttaaggcaggaggacagcttgagcccagaagttcgagaccagcctgggcaacacagtgagaccgtgtctctacaaaaaattagctggggatggtggcatgtgcctrtagtcccagctacctgggaatctgaggcaggaggattgcttgagcccagaagttcaaggctgcagtgagcaatgattgcaccactgcactctagcctgagtgacagagcaggaccttatctctaaaaacaaacaaaagtttagactagtcaccagaagcagcctagctaaaatatcaagtcaagcatttgctattaaagttcaactgtttcaggaaaatttcatattttggttgcatttcagaagagtttagggtatttaagttaggactactgccacattgagagtttttttttaatataaaaatataattttatgtttataataggaaatgttcattgtagtacatgaaaaagaaaacggaaattatttataatttcaccacacaagtataaccaaagttaaacttttggtatacttccttttaacttctaattgtatatgttcaaatatatcctatgtgcagaagagcatgtaaaagatatrcgcacagtttattcagcaaaacccccactatttacccatagaaattaggatatggatcattactaggatcctagaaaccagttcccaagagcattccccctccctccctgaggttatcattattgtaacttttgtcttcttaattattcctttgctttttagttttactgcttatatatgtatccttcaacaatatattatttagttctgcctgtcactaaaaaaatactttataaaaaaatacaaaatacgaacattgatactagatatatccatttagcatctatctaaacagatacatcactctgtggtttgtttgattcactctcttgtttttccatccatgctgatgttggctagtattttacagaatgaatatacaggttgaatatctgaaatgcttggcaccagaagtttttcagattgtcagttttttcagatctgggaatatttgcattatacttaccagtgaagatctctaaattgaaaacacaaaatctgtgagtatttcccttgagtgtcatgtcgatgctcaaamagttttggattttggagcgttttggattttggattaggaatactcaacctacaccacaatttatttattgtttccaggcttttagctattacaatctmctatgaacattacggcaatctagtacatatgtgtaagagtttctctagcgcagcagttctctttacagtcttcaaaattattgaggaccctaaagagcttctgtttatgtgagttgtatctgtcagtatttactgttagaaatgaaaactgaggaatttttaaaacattaactaaaaataacaatgacaaactcattacactaccattaataacatttttatttaaaaaaaaagttttccaaaacaaaaaaatttagtgagaagagagctgctttttcctttaatttttctaaatctaatgtctgactttacagaagatggctagattctcatatttgtacttccgcattaatctctattgtacactactgaggaatgaaaatgaaaattaaaaataacatcttggtattattatgaaaatagtttcgacagagaacctcctgaaaaggtcttgaagcccctccgggttcctggaccccaccttgagaatctactctctaggatgcatacacctaggagaatttctgggtgttaaggcaggcacttgttcaactttactaggaaattttttaaagtggttkttccaatttatacttccactagcagtgaacgcaaattcttattgccctacttcttgggcagcttttaaattactgcaaatcttgtgagtgtgaaaggtacttaatctttctagacatctatttttcttcaacatagccaacatcatctagtatgtactgcttcctgtgaattcatagygtaagcatttcttcagctcattacaaaagttccataaatataattttaaagggtgcatgatattctatgtaccatgggtatttttaactattcccttaattgctgaatttttaggttgcttcctattttttctttataaaagtctgatttctcattaaactgctgagttctacacatgaagaatcctgtatctattttgctcaataatgcatcctgagcatctgaaacagctgtgctttgcattaggcactcagtatttactgaatgaattaatgatggaacgtaagtttcctgaatacacacattcatttaaatgggtctcaatttcatayacatgctgtagtacagcctcttatatagctcttttaagtttaaattagcaagaaattagcaatataaattttcttttcacaagaaaatctacagaatttagcctgtggcatcctgcttggatgccttctattgatatgaacagaacaaagaggtctcagctgggaccaaatcttcccatttatcaatatcaaataactacttactttggctttctggaaaaataaacgaaaacaccctcttggatccacattacagtttttggccatttccataataaactgcattacaacagcttgatgtgctatttgttccattaaagcccctttctgaaaaagatttaaatgatataagaaacaaatatataaatatatttaattggcatactgattcaaattttgaatttttaaaatacttttgattttactctcttaagttataagtcaaatactttacaaacatataaagagtatatcttagttttttttttattatttgtatgtggaccagaataactaaaggaagaccatgctctgaacttgatttaataccatgattaccgtctggatttttaaaatacgactttcaaattagtttgaaaaggattatagtaatatgaaaacaagagagatggaggtggagtggcagagaaagcatagtggaaaagtttctgtatgctaactgaaacaacaacaacaacaaaatcccacattaaactcaagtagatctggaagcaaaaaatggtaattccatctaatgaccttcctgctttcttttaaaggacttaatgtagaaaacaaaacaaaacatcaataaagtatgaaatcagatttccrctaaggttcccagaaactcaaggttcacataataataccttctcagcttccaggtgaaaacaccataaaataagatatttagcagtttcttcacatacaaggtatggatggtcagacaaaaatctctggctatcatcccatcgactcaacatacctgtaaaaaaaagaaktgaaccataagtgtcaaatattttctttcttcccataagggaagaaataccaaccattcttaattcattaatctctcaatggtatttttaaatgattctctttaaagacaattcatattaccagagcaacagattatggtaaaagagcaagtragggacantactctttaaagcaatactcastagactgsaaatagctcctaaaattcacaggaagttttatttcagataattaatcaggccagagtggccagttcaatattaaaaagtcctacatccatgaatgcccgcagtcttgggcaaattgagagttagttatgtaagccatttactcatgatgtctgttataaacaaagtcttttaaaaattagttaagcatatttgaaaatggttgtcattttgtttcaaggtgtcaaagaaatccaaatactatttaagttatatctacacctttatctaaattagcaggaaatttggtcaaagtcaataccaccaagaaatcacggaaccagcaaagtgttgactttttaatgttgtccagtcagtcataactgaatagatttttttcttttctttttttctcttcttttttttctccataaagatgagaggcttattatgttgctcaggctggtcttgaactcctggcctcaagatattctcctggctaggcctcccaaagtgctgggattatgggcatgagccactgtgcctggctaactgaataaattcaatatagcaatgttaggtttagattccttagactcatgcaaagaagtctggatattcatggaaattttgtagagctgactcaagagtttagcagtaaacttttcctgtaggtgcaaaatgaactcctatatatttaattccacatcagtacacaagaaagaacaaaactgaagacaaatgtcctactgagaatacacagcaacaatgtgagtcaatcaaaaataaatgattcattttctcctcacttaaaaaaagggggtggggccagccacggtggctcatgcctgcaatcccagcactttgggaggccaaggcaggcggatcacctgaggtcaggagttcgagaccagcctggccaacatggtaaaaccctgtctctactaaaaatataaaaattagttgggcatggtggcaggtaaatcccagctacttggaaggctgaggcacaagaatcacttgaacccaggaggcggaggttgcagcgagccgagattgcaccacagcactccagcctgggcgacagagcgagagactctgtctcaaaggagataagctgggcatggtggcacatgcttgtaatctcagcacttttggaggctgaggccagaggaatggtggagtccaggagttgcaggccaacctcagcaacatagtaagaccctgtctctacagaaaaagcttaaaaattagctgggtatggtagtgtgcacctgaagtcccagctacttgggagtctgagggggcaggatcacttgggagcctaggagctagaggctgcagaaggtatgatggaaccactatgctccagcttgggcaatacagcgagacctcatctcttaaaaggattaaaaaaaaggataaagactgtagcattttctcatagagtattctaagctttataaagttatttccccaacgctttggacataatgattaggtcatttgaagttctgagaaacagaatgattatggaagttacttaaaactacttcttaaagtataagaatattgctaggcgtggtgtaatccccactatttgggaggctgaggtgagagsacaccttgagcccagatggtggaggctgcagtgagctatgacctcaccactgcacttcagcctgggtgacagagcaagaccatatctcttaaaaaagcctaatgattcctgggactcagatttaaagaaagcacaatccttatttcttatacttgaacccacaaagtaaatcctatgaagcagttttgccttagctttcttacacttctggagaggtaatatyttcaactctatctaccatccacgataaagcattgctcctcttgtttacttcttcatggcagcattgtgacytactgaaataccaaaagccttatccattctggtttattttgcaggaaggataacatgaaagggttcctgacacttggggccatggggaagggtatcattaaatgttaattttttttttctttttgttgagatggagtctcactctgttgcccaggctggagtacagcaacacgatctcagctcactgcaacctccacctcctgggttcaagtaattctcctgcctcagcctcctggaagctgggattacaggcgtgtgtcaccacgcccagttaatttttgtatttttagtagagacaaggtttcaccatgttgatcaggctggtctcgaactcctaacctcatgatccacctgcctcggcctcccaaagtgctgggattgcaggtgtgagccaccactccctgccaaatgttaatattttttaactacctatttaatacctgagacgaattaacacttgacattgaaaatacattttttttttaaatctgagaaatactatcacttgatttcaaaaatgcacattgaattagtatgaaattgagaagttcagttacaggtagtcgatacagacctttgtggaaagagtgtggaattttatgaacaaaataaagacaggtggggcgcagtagctcacacctgtaatcccagcattttgggaggccaaggcaggagaatcacctgagcacaggagttttaggtcagtctaggcaacaaaatgagaccgtgtctccacacaaaatgagataattagccaggcatggcggagtacacttgtagtcccagctacttggaaggctggggcaagaggattgcttgagcttaggaaattgaggctgcagttgctatgatcttgtgactgtaatccagcctgggtgacagaaaatgactctgtttcaaaaataaaacacataaggagaatcaacaactcagtggaacagcatatacctcaaattactgatattattttggaatttgtaaacaaacttgtatacaaatggagagtaacaatttaagacagcggctgagaagacagactagagctaaatggcccaggttcaaatactggcttcaccattttactactgcagktccctttatatgcctccatttcctcctctgtaaaatagggctaaaaatagtacctaactcaggattttcatgacaattaaatgctattaattcatataaagcacttagaacagkgcctgagacatagtaaatactcgataaatgataagcacccattcaaaatgtttatttagctaatcctttggttaaggataatayagtcatttaaactagccaaacaatttctctgaatgcttggaaaacctcactttgacaagtttagatattttaatcatatgctttaacctatatatttccctagtgaacgtctaaatctcaatccatcatcaaccttcaatatgccacctgattcctaaaatggtcctgaaatacacgtccttccttattactgatttccctttcctctttcattacacttatagaattattattattattaattaatttatttctttatcttgagagacaggttattcctctgttgtctaggctagagtacactggtgcaatcacaactcattgcagcctcaacctccygggctcaagagatcctcccacctcagcctctgcagtagctgggactacaggtataagcctccacacctgacgaatttttttttttttttgtagagatgaggtttcactgtgttgcccaggctggtcttgaatccctgggctcaagtgatcctccagcctcagtttctcaaagtgctgggattacaggcagaaccactatgccaggcttagaatgatatattttaacaaactacactaattcattttaatttctctgtgtactaaaaatctcccagstagtttgtgaattacttgaggaaagttgtatgatcatttcccatattcctaaactccagatctcctctatttccaatcgtctaccaccatatgcatttctactgatatgcctgcacgtaaacccatcttacttgaaaccaaacccatacttgtctctctgccatcctacaatgtttcctaggctccatgttaccaaatcaagcattctagaaattcctctgacatttccatttctcccacatcaaattgaccaccaagtcctgtggttatactactatgatcagttaatacagtgaatcacattaatgagttttctaatgttaagccattttgattcttaggataaacgctttgaaaaatttttttcagattataaaaataaagtttatttattatgaagaatttttaaaatccrgaaaataaaagttagctgtaattctaccacaagagattactgttaacattttgatgtatttccttccaggcatatttttgaatgactttttaaaaaaccaaaattaaggctcagagtggtggctcacgcctgtaatcccagcactttgagaggccgaggcgggcggatcatttgaggtcaggagttcaaggccagcctggccaacatggtgaaaccccatctctactaaaaatacaaaaattagccaggcgtggtagcaggcgcctgtaatcccagctactcgggaggctgaggcagcaggaacgcttgaacccgggaggcrgaggttgcagtgagctgagatcacaccactgtactccagcctgggggacaagagcgagatttcgtctcaaaaaaaaaaaaaacattaaaatcatatacattttctattcatttcacttcatatgtaagagtgctttatattaaatgtttttcaaaaataagatattgatatgttttttaaaagcaatgaacaattacattgaagaggttgtaaatattcatagtcagaacaaacgaaaaaacttctatcatagtatttgagcaaacttttatagctcttggtaaaatttccagtgacaacatcctacacagattaaaaaaagctgaatcacagctaactttggctgaaagtgaagatgatgtgctctgaaaattagatgactcaaaaagcagctctgatgaccataaagccagtgatgtcaaacatgcatataactgtgaatataacggttgtgaaatttaagagataaaagcctttgtttttaaattaatattttatatttataaaacgtgaattaactaaattaataaactaaatacaaatgtagaggaaaaagtcagatttcaatgctttataatagtccatgatayattgtaccatttaccactaggtggtaaattccacctaattgtaagggtaaaagcagcacaagaaaggcagtcaacaaattgtataagggaaaagttaggaaaaactctgaagaatataagtacaaataagaccacagagaaacatgggtgtaaagcccctatagccctatacagcccccacacacaccaggcccrtgtcaaccaagagtccagaatgcaatccaagtccagaaagcctccaactggaagctttaattacatctcctattgcagatgtgtttagaagagtataccagaagccattatcctaagcaaactaacaaaggaacagaaaaccaaataccgcatattctcacctataagcgggagctaaatgatgagaatacatgcacacataaaggggaacaacacacactggagtttaccgaagggcggagggtgggaggatcaggaaaaataactaatgaatactaggcttaatacctgggtgatgtaataatctgtacaacaaatccccaagacacacgcttacctatgtaacaaacctgcacatcctgcacatgtacccctgaatttaaaacaaaagttaaacaacaacaaaaaaacaaaataaaggagtataccaatatagtcatcattttggtaagctttcttctttcatcacaataagcatacaacagaaatcttccatcaagcaggcatagccacaaattttcactgtcttgtgtcacacctctatcaactctgtgccataattcagtccacagggattattatctcatcattccccatgactacaagttggtccactctccactgatggaacttggtaaagcagaaattgcaggtattccaggtctcttgttaagatatatctattccagagtgggaaataaaacacatgaacattttgagagcctactacctttgtaacattcctggggatccagtgtgctgtggcaagtaatatatctcctttgaagttaaagacaacatgcattttcagtaagaaacaggcacattgtgactctgggaatggctattggtctggctgggtgtgaaaacagcaaggctctgatatttattacaagatagtatattggaagttcacaacacgtaacagcaaaatgattgcttattaatcacctgtggatgttaagtcagtttttttcctcaactatctcattatttgcacaatagtttcataaattcaggggtcgtggtggcataggtttgtgattatgcatagattcgacagtgtagactctcccctcaaggatgttctagtatcctaatccagtttagccactgaacacctaatttactagtagcgaaaaacaccaaaatctcaatacggcacaatgcactgcagagatcagccagccatcaagtagcaggttgactaccctggtcccacttcatctcagagggactggtaattcctcacttgaacgagcccactctagatgtggaagtgccctccctccttgccatgcttctaatcagtaatacatctgtagtcttactaaatgaattattcaccataccacactattttttgacccagaaactcattttacagcaaaagaaatgaagactgtagggttcatgaaattcactgttctcatcacgaacatcactacccagaagcaggttttataaaatgctgaagatacatagtgccagatgggttacaacactttgtgatatttggatattttcctacacaaaattgcttctgaacaaggcactcagcttacagcaaaagtgaaagaactgcttctcatttactaggtttctcatggcttcaaagcaaccaactttcagagtgccagctgggtgaaaacaccttgaggaatgttgtttcaccagatgcagtacatgctctgaaagagcaatcagtatatggtactatttttccttcagcagcaaaacatrggcctagaaagcaaggactgtaggcgggagtggcaattcacatatcacaactaagattcatgtgcaaattttttgctttctatccttatgactcaaggctctgctcattttaagattttactatctgtccaagggaggcctgtgtattcattttttttccattataaataataccacattgattatatgtagaaaaactttgtctttatttcyttgggtactattttttagttaaacacagtcttttttctttctttaaaatgaaaagtatgagcaaagtgaatattttacgaataaattacataaaaggaagggaaaaaatttaaagtaatatttattatattgacataactgaagcataaacgaaattcaaaaaacgytgggtaaataaacaccaacaggaaaaagatttcaaaatgccatgtaaaaagttcatgaacatattacaaataaaaaccatgtttactaaattaacatactacttggaattaaaaaaaaaaaaagttttaaaccttaactcctaacacttcccagcagcattttcatgccagcggtatcatgctgcctataattctcagaacacaccatgctgtttcctaactgcccgtctcatgctgttgctgttggcttgcctcccttatacatgaaaaactcctatctgttccttgaaatcaagctcagatgctggctcctctgggaagccttcacttgtatcaacccccctcttaccctttttccccaatagaaaaaacctatttttcagttctttatatatacatttctattactatatttatctgagtaacagttcaaggatctgcctgaattataaagcatcatatccaaaacctgaaaaaaaatgaataatctttaaaacataagataatcagattccaaggaagcaaagaggaaaaagaaaaaagcaaagactacttaggaaatggaaagaggctatggaatacataaagttgtcttaaaggtagtacactatataataatacttttgcttctctttaccatttggtttgcwctgtcaattaattttatttataaccaaaaaaaaaaaaaattctaaaacaagatctatacagctgtgccagaagctacaaaattggagtttgccacttttctttttggctctctttttataaatccattttttgcacatgtacatatgataccaaacattacaaagaaggaaatccaagtagtagacttaccaaaatgtctgattttttgctcatatttttgcataaatgattctgatttatcttcatcttctgtgtcttttcttttatcttgattaataaaactctaagaaaaaattttagaaatttaaatcagattttaaattctaattgaatcttctttctcagatactgaatatctagcaattcttcctatagacaatatatgtggtatagtatcatactgatattacatgattaaattcatctggtaaactatttttaaaaattaaaattttcttgtatgggagtcttattaattttgtttaaaatgatgtatgaggccgggtgtggtggctcacgcctgtaatcccagcactttgggaggccgaggcgggtggatcacgaggtcaggagttcaagaccagcctggccaacatagtgaaaccccgtctctactaaaaatacaaaaaatagctgggcatggtggtggatgcctgtaatcccggctactcgggaggctgaggcaggagaatcttgcgtgaacccaggaggcagaggttgtagtgagctgagatcatgccactgcactccagcccaggcgacagaacaagactccatctcacaaaaaaatacatacgatatatgtgtggatataggttcatcttagaaatcatacagaaaaacaactgaattaacctttttggtaagctgaatttcccaattaaaagcaggtatagaaacatcctttatattttatatgcatagtttacttgtgcattatttaattcctataaatatttgcaactcttgcctaatctttcgagttcttgctggaaataaactcagaaattcaaagcacatagagaataaatgatatttaccgtaaattctttattaagacataaacaagaaatagactgttgttgttgcgtgtctttttttttttttttttttttttgagatggggtcttgctctgtcacccaggctggagtacagtggcacaatcatagctcactgcagcctcaacctcttggggtcaagtgatcctcccaccttagcctccagagtagctgggactacaggtgtgagccaccatacccagctaatttttaaattttttgtagagacgtggtcttgctatgttgcccaggctggtcttgaactcgtgggttcaagcaatcccttcaccttggccttccaacgtgctgggattataggcatgagccactgtgcctggccctttgttgcatttctaataaacttcttagaagagaccaaacagtttgatttttaaagtcaagtacaaatttctattaaggaagtacttattttcagttaaataagtcataaaatataccaagaataaagtttgtatctagctagaaaaactggcagaagtttcttagaacattctgtgatcatatttataccccgttatcatcactgccaaaaataaaaattgcaaactagatcactgccagtttataatcaggaagcactcaaaagtttacatatttcaaaataaaagattttttcttcatgcagtctgacatctagaccagcactgtccaatagaaatacaatccaagtcacaaatgtaatttaaagttttctattagccacgttaaaaagcaaaaagaaacagatgacattaataaattattttatttatcttaacatatccagcctattatcatttcaacatgtaagcaatacaaaacaattattaatattttactttttttggcactacatcattggaatctggtgtgtattttacacttacagcacatctcaattcggactagccacatttcaagcactcaatagcacatgtggctagtggctatcaagttggatagtgcagatctagaccagtcctctcaagtctcaagctcccagacaaaaccagtgtaggattttgagcaaatgactggaacataaagatagtcctaattaatttgtgagataaatgtaggctgtcttagaaccttagaacctaagtttaaagaaataattaaaagcagagacaaaatgaaaatattttctttgtgaccactgtgttaaagaagagacattaactttacaaaacaagaaatattactttgaacattccttctggaagaaaaaaaattattttcaatagttttgggatataaatgcagaacagaaaataacacaagatgcaccccttaaaacaatatatacagatatagcaaatgactcagataaagaatgatcccattgtggagggggagaaaaagtatatataaattagtacaggcacagagaaagtcgagaaagatatgactcactgttaaagtactgatagggctagtggcgatgtacacttatctgtgtgtgttactgactgctgtagcagaactagagctggtccagggaaaggcaattaaaaaagttcatgagagtgggtgaaagcagatgccaagaggacaattaagaagtttgagatgtgtttcactgttgcccaggctggagtgtagtggcacgatctcggttcactgcaacctctacctcctgggttcaagtaatcctcaagcctcagcctccgaagtagctgggactaaggcaatacaggcacatgccatcatactcagctaattttcgtattttttatagagacagggtttcatcatgtcaaccaaactggttttgaactcctggacttaagtgatctgcctgccttggcctcccaaagcgctgggattacaggtgtggacaactaagcctggcctatttttcaataaatatcattttattccacatttaaaatactagttcatgaagttttgccttttctccccttttcatgcatttgaaaatcaatcgctaaaaactctagttttcaaatggaaaactgaggtataaaaccctgaagtttgaaaaacatgagattttaaaagtctaagccttcattcttaaaggcacttaataaaggatattcaacacttctctttatcttatctctcaatcccagagtcaggaatttctcacatttaacccaccactaagttatcaagtcactctacttatttttccacttagtttcttcatttataaaaagaaggtagttgcattaaaggaactctaaagtagtgataatcagtgtagggggtacaaaatatatgtggaggaaaatatttcataactgatatattttcccatccttatatcaaattcttgtgaatgttttttaatatatgtaatatttgttcagcagtacatttatataaatatgtatttcagtctggtcacttaactgcctggagtctgcrgctctacagcaagagctttgagactttttgactttcataaacttttcaagcacctttcataaactgtcaaaattgaacactgtttatgggattctgctgctttgctaccaaatacgcacaactggtttgtacaaacacttcagtttttcttctttcattatggcccagtaaaagctcataccttattaaaaacatccttgctaatggcatccgtgctccacagacacatcttctctctttgtactagagcttcttctttctgtcgccactcttcttcccgttgcctcagttctgatactgctgtttgtgctttggcatgctcctgatccaangactcagaattatgcagtgctaagctaccaagtttctgttgagcttcagcaagattccatttgcacgccacagagctcttcacaaactctttctgcttttggcaagccaattcaattccatggctatacatctggataaaaacaatatttgtaagaaatgaagaaagcaatggatgtttgtgcagcacagttcaatttttcttaattcaaaggatttctgtacaatattttggtatayagtatatcctgtgttctaggtctgcagtcatgtttttatatcttagtccttgtttcatcaactaacttctaaacttctttgttaatttaggcctatcccctgacaactaacagcaacaaaaagcctggcaactatcacagtgtcttgcataaagctagtgcttaacaaacgtttaattaatagtcttcataatcctgaacaagcagaataatgagaacaaagcttaaatctagttcatcacctcaatactcaacatgctgacaaccaggcctttataattttgttctccaaattcttcactacaaaaaaacctccttttatctagaagtaatcgtttcttggtttctattttctatctgtatttttccaatcattggtgatttgagaagttcttattggatatttccatttataactgattatatcagacagatatcctttaatttattcctaatcaaaataggcaaattatatatatatatattttgtgatggagtcttgctctgtcaccaggctagagtgcaaaggtgcgatctcagttcactgcaacctctgcctctggggtttacgtgattttcctgcctcagcctcccaagtacctgggactacaggcatgtgccaccatgcccagctaatttttgtatttttagtagagacagggtttcaccatgttggccaagatggtcttgatctcttgacctcgtgatctacacaccttggcctcccaaagtgctgggattacaggcatgagccactgcgcctggccacaaagttacatttcttaaaagtgacaatggtctaccctgctgaccgtactactccgaagcagtagtaattacttttatttacttaattactacatgtaaagtactgtgatagacattcaataccctatattccttggctctataaaacaaaagctgaaggcacattctttatgagttcttcgtcaaatgtacatcaacttcagaataatttctctccaatctgttcccatatctgcatcactattcaagcccttataatttcacatgtgaattatacaaatgcagactcttatcccaagccgttctccactccactagactggagtgatctttccaaaaaatgaatctgatcttttttttcattcttagctttgggataaagtacatactctgtggcaaagcccttcgtgatgttatttcccattacctctttagactcagttcccattgctcttctacttgtttgcttattcttccctttcccacccttgtccctcacttcaatttggcaatcctctttcttcgaggtaactcctacagaaactcctatcttcatccagattctggcatgccctaaactttttctgacccagtgtctcccgacccaagttatgcatatttctgttgtggtgtttgtcatacaatatcatgcttatttgtttactgactggtggtggtaaacaattctgaggcaagtagtaaccaaggaccctacctcttagctgagtcttcaggcaaactcacgtttgtactgggacaaatgtggacacttgctattcagatgttttatttactcattcagcaggtttggagccaaggtactataaaccatgtccctaagtatattttataatatatattcatatattataaaatatatataaaatatattttatatataaaaataaaatatatatataaaatatataaagtatattttaaaatatattttaaaatatattttatatataaatataatatatatttaatatatatattatattttaatataaaatattttaatataaaatataatattttaaaataaaatatttatttttactttttgttatcttagaataggatcaagaatagttatcttagaataggatcaagaataactgtagactagctatgcttaaaacagagccaggaaaaggagaaaaattaagctatataacttattttgtaagaaaagatgtaagaacttttgtatataaaacttcttttggctgggctcagtggctcacgcctgtaatcccagcactttgggaggctgaggcgggcggattacctgaggtcaggagttcgaaaccagcttggccaacatggcgaaaccccgtttctactaaaaatattttaaaacttagctgggcatggccgggagtggtggcttacacctgtaatcccagcacttcaggaggccgaggcgggcggatcacgaggaggagctcgagaccatcctggctaacgtggtgaaacctcatctctactaaaaatacaaaaaattagccgggcatggtggcgggtgcctgtagtcccagctacttgggaggctaaggcaggagaatggcatgaacccagaatggcagaggttgcagtgagccgagattgcaccactgcactccagcctgggtgacacagcgagactccatctcaaaaaaaaaaaaaaattagctgggcacagtggtgggcacctgtaatcccagctactcaggaggctgaggcaggagaatcacatgagcctgggaggcggaggctgtggtgagccaatatcgtgccattgcactccagcctgggcaacacagcaagacactgcctcaaaaaaaaaaaaaaaaaaaagaaaggataatatatcaagaaaagtaatatggtaatatggataaatagaaattatcttgcattttcaaattatttgggagcaaatattcttttctcaaatcgaaaaattctaaaaataatgtatgtcttaattctccacaaactacccagacaacatttggccatttgggcaaactatccaacatgtattcagatattaaataaaatattaggtcacattctaatccatgaccatacagaagttttagagggacattaaacatgatctgcctttacattaattggatctaagaactacatatcacatactacattaagaagtctagatcccccttatttgataaaattaagccaaagctttttttaggattataaaatgttaatcaattaaacattttattttttccaaatattccaatccaaaaatttaagtcttaaagccagtaagaccaataagtaggtttgtaataaacacatgaactcagaattaataatcagtttgcaaaaaaaatttttttttttgagacaagagtttcgctcttgttgcccaggctggaatgcaatggtgtgatctcggctcactgtaacctttgcctccaacaattctcctgcctcagcctcccragtagctgggatcacaggcatgcgccaccacaccaggctgattttgtatttttggtagagacagsgtttctccatgttggtcaggctggtctcgaactctggtgggcagtgcagtaggtgggaaaatatactggactaggagtcataagtgggttctagttttaacctggccactaactagttacatggcctcagggaaaacacttttaatgagagagataagcttactcacttctaaaatctcttccagctaaacaaatttagaagtgcacaagtaagaaattaacatacagatatttctctagattacttctgtaattcaaccacaatgcactgaaattcttgacacccttttttctcttcatatgccttcaaaattgacaatggcatctgctgttcattcttctttcctccctagcacatcatgtgcttataatacattttgtatataaagatgacactagtgatccaaaattagtgggtgactaatgatggacccatcaactctcattctgtcctcctaaaaaatgtcttgtagttccccagtgacttagctggccaaagtacagacagtggttatgaaacagcatttttctctgtgtgaagccaactaaccctgttagctggacataagattgataatgtcacgcttactggtaagcaatttaactcattctcattaacatctagcaaaataagttgagaggaaaactactattaaatctgttacactcttgggaaccccattttgcaagaaggcggcagacacttatgatccattgaatatattagtgtttagtctgtgattctgaaatatacttccaaaacacacacggattcggagaaaaaaacaggacaaggtgatgcgagtatgtaagtatcycctaagataggtccctgaaaaatccttaatagtatatcacatttggatacgtttcagtcgcaggaaggcaggaatgctggattgaaaacacaataccaggaacctaagagaagtctgaaggaaaacacaagtatatgcgtatatattttcactggagaatgacgtgaagcaaaactaaaaaacaaaacagtaaggcaaagatggtcacgcgaatgggagaggtrtacgccagcgtcaaaagcgagrtttaaagaatttactcagttgtcaacatcggtgaaaatcgcatgtgaaatctttgtcaggactcagtgtgatgctgaactacaatcattcactgttcctagcaactgtgcacaagtatgctagagcctttaacagaataaagtgcttggggaaaacctctcacaagaggacaaagggtcaatgttacagcatgagccgccccaaatctgagtgctgtcaggaaggggagatggaggaaggtattccaagagtgaacaggaatcagccaaggcgaaagaaaacatgtgcktggaggtggaggttggtaatatatggccaccccgtctgccctccgaagatgccataaaaggggtgggatggcatcaggcgtcaggtcccaggtccccggccccnggcagtgaggtgggcgtagaaaaaggcgtagaagagggtctgggagacgcggcattccaggggtttggcgacagcaccactccatccctccgcagaacgcaggccccntctcacctgggcgccgccgcctggcagctgcgggcagcggggagaactggggaacacgtcgaagtcactctcttcctcagcctcaccctcggcccgagggaggctccagggtcccggaggcggccacggttgttccatgtccggctgctccgggtcctacaaccgcccttggccctacaactgccactgccaacagacttggcgtgaatggaacctgctgcgccgagccagaagcccagccgggggtccgggccgttacccagaatccctctactggccgcgacgccgctgcacacccggcracagcctgggcctcgccaccggcggacggcggaagaaatagtcggcgcggtgcgtcacttccggttggggcggggctgtggaggcgcgtcccgggccctttgcgtgtagygggtggatctgcaattgtattcctgtttcaagccccgttttcttgcagctcttcggcactgcaaacctaaccgctaatggcgctgtgggtggagaaacgtttgttaggtagcgttatatattgttatctgktgttccctataccgaaaacggcgggtcctggccgccgggaggtactcagaccaggtgtscactttacatgttgcttaaaaattgcaactcattcctttacattgacatttaaaccagtgattctaaggcagagttggggcggagggaggagaattttgaacaagcggagccaattttygtctcatttctaattacaggcaacaacagaattctgcgaaacttggttggttggaggagcacaccaaaaataaagtaccggagccggcacggcttcaaaaaaattaggatcagtaccgctagtagcgaacgcataagaagggcttcctgtatgcctgcgtatcttgtttaagcctaaagatatgtactctctttatcctctttttttgagacgaggaagtagacccagcatgcccgagatcacacattttacaaggaagaagtaggatccagacccagggagtttaacttcaaaacttgaacgtttaacaatcaggtcttgctgccctactcataaagagacccaaataaaaacaacatgacgccatttttttccatgtrtttagaytggcaaacttgtgaagtcgcttaataccaaatgtgtaccaagaygtaaggaaatgatgtgagaatgtcattagtatawmcttttaggaggagtaatttgacaatatgagaggcttgagcggattgattcagcaatttcaccactaagaaagtatgcaacaattatttttgcaccaatatccaaagatttactacaaagatttctggcagcaatttttgtgtgtgtgtggcaagaaaaaaaaaagcattctaattgtccatcgatagaggaacttaaagtatggaatattaatacaatggcatattaccctttttwaaaaaagkaaattgtatctgaatatgctgatatataaatacctccaaaaggtattgagttttaaacaaagcaacttgcagaattaaacatatgcgtacgtatacagagagagaagagagagggatggtatttgtttgcgtccgtgtgtgtgtgtgtgtgtgtgtgtgtgtgtgtgtgtgtttgcgcagaacattcctggaggatatgcaagaaactgttaatgattacctctggtgggtgagcctaggaaggaaagcttctgaggatctttactttccacatttagcttccctgtactgtgctgtttgaatatttttccaatgaatgtatactataattatagtattataacagtacaagattataacagtacaagattactataaaattaattacaaataaaagctgagaatcacttttgcacctaaaccttttgaatttaggggtgaaagtcacaggagagactggaaagggaggaagaaaagaaaaacatttttctctttgcttccatgaagccacaaagtgctttgaatagtgcctggcataaagtaagccctatataaacgctaatgctgttagtttttctcctacctctttcactacttctcctcagtcttcttcccttctagctgacctctaactttagagttcctcatattttggccagtgaggagaatcctgtttattcctgtggctttaaataacatctgtgtatctataattctcaaattgaaatccaagtcctgaccttacccctgtgctccagactcatgtctacccgctgatttgtcatctcattttaatggttcatacacatcttaaatttaacacatccraacccttgatctcaccsccttccccaaacttctttgggtcttctccgtgtcaatcaatggcatcaccatccagtccaaaacctagagttcagccttagttcctccctctcctttacctctcataccaacagcaagtcctactgtttttacccccaaatacatcttgaatctatgttctttcctgctttactgcrtactccctaggccagaacactatgattgcttctcagaactactgcagtagtcttccatgcttctgttccattcttgctccttacaatctcttcatactgttgccagagagatttttaaaaaatacataaatcatatcatgtctcacccctgctatatcaattatatgctttcaatgcaaataactgaaacctcagctaaaagaaacctaaactataaggacatttattgtgtatktaacaaaaagaatgatcccaggataggcttagcagtttgaagatgtcattaaatattcaggttcaggccaggcgtggtagcctacacctgtaatcccagcactttgtgaggccaaggcgggtggatcacttgaggccaggagttcgagactagcctggccaacatggcaaaaccccgtctctactgaaaatacaaaaattaggcagacctggtggtgcatgcctgtaatcccagctacccgggaggtggaggttgcagtgagctgagatcacagcattgtactccacctgggtgacagagcgagactgtgtcgcaaaagaaagaaaggaaaggaagggaaaggaaaaggaggggaggggaggggaggggaagggaagggaaggaaaggaaaaggaaaggaagattcaggttctttcaatccctatccctcctccccagcatcctaaatctgtttactttcatcttcaggcttsttacatcatggttgcaggatggctgctacagctctggacatcacatcaaaatatggcagaagctaaagcaggaagacagagaaggaggcaaaacagctttattcacttgtggctctcatatgaagaataaagmtatttctcgaaaccttctagtgaaatccttatatcttattggccagaactggcttacataaattatgatttgttgtctggagctggatgcattgctacctaaacaaaactggagttctgttagcaaggaggaagagtttgtggcagtaaggtaggcaatcacattctctgccataattgataaagttcctgtgaaacctagtggcascctaattcctgagtgtcattcctttcttttttttttttgagatggagtctcgctctgtctcccaggctggagtgcatggactgcagtggcgccatctcagctcacggcaacctccacctcctgggttcaagcgattctcctacctcagcctcccgagtagctgggattacagatgtgcaccaccacacccagctgatttttgtatttttagtagagacggggttttactatgttggccaggctggtctcgaactcctgacctcaggtgatccgtccgcctcggcctcccaaagtgctgagactaccggtgtgcaccactgcacccggccctgaatgtcgtttcttaaaccctctccctaacaccttccttgccctctcccaccccaaaatctgtcttggactcctttcagttcctcaaacatggcagttcctttcctaactcatggccctttcgagttgctattccctttgccttttctcttactttgaaaggcttgctagtggtcatgcttttcttcttagatcttagaccaaatctcatactcttaggccaatctggccagtgagtctaaatgaagttctcgtttcttcttcaacctgttctattttaccaccttgtatatttcctttctactattcatcatactattattttatgttcacttagttattatgtttcttaccccaatagaatgtaagctccatgagagcacagattgtttcttattcactcttgtacttacatggctcagaacaatacctggcttacagtagacactcaataaatgtgggctgaataaatggatagagaatgaatgaatggaaacaaggataaaagaaaaggttaaataaaggcagaaggtggtgaaaaaggaatagaaagaagtatattttggtaggagataaggagtggatataatgatatcagaagtagcctcatcttgagccattgctgacttcaggatctgaatcctgtgccctggcatagtaaacacttatttttggaaacagttcttgctatgttacctaggtcggtctcaaactcctgggctcaagagatcctcctgcttcggcctctcaagtggctgggattacaggcatgtaccaccacgcccagctccagtagacactttttaaacaagtcttggaacttaatcatacacttctactttcttattttggataataaataaaattccttggaaattgctttgggtcataatttgcctattactcccatggacatagagctagccagctgaaactcaaaggagcaaattaggtttttttctgagtagaaattacttttaaatggaaagactatgtagtccaaaaagcccaagggcagcccttgtggaaggacttgtgttgcatcattatgtaagcattgagcctacaaatgccagtaaatgaaagcacaagccaaagagaaacatgagtctgactcataaactctaataaagttgggtgaaacagaacccatgtgtgggtccacatcccaaatgacttcaagattgttaaaagctgtgcaattgcaatttgattccttccttggaagattcctggaaaattcttgagaagtgtgtatatgtaaagaaatactcaaattgccagctcctgttttggatattcatgcagagatcactattataatacagcgctggccaggcgcagtggctcacacctgtaatcccagcactttgggaggctgaggcaggcggatcatgaggtcaggagatcgagaccatcctggctaacacagtgaaaccctgtctctactaaaaatacaaaaaattagctgggcatggtggtggtcgcctgtagtcccagctactcgggaggctgaggcaggagaatggcgtggacctgggaggcggagcttgcagtgagccgagattgtgccattgcactccagcctgggcaacagagctagactcggcctgaaaaaagaaaaaaaagcaaaacaaccagcgctactttttcccctttaagtggatgtccctctgaattacttgtaaagcattattacacaccacaataattttctcatctcatctgcatttgaggtgaatagatccattacattttctctttcagtatgtgtaagacttatattgaagggaattttatatgttaaaggtttttttaaattgttattatgattttttttaagagcaagattgtgctctgtcacacaggctggagtgcagtagcaagatgatagcacactgcagcttccaacatctgggctcaagggatcctcccacctcagcctcctgagtagctaggactacgagtgcatgctgctatgcccacctaatttttttttaatgtagacatgggttctctctatgttgtccaggctggtcttgaactcctgacctcaagcaatcctctggcctctgcctcacaaagcactgggattacaggtgtcagccaccatgcccagcctattgtgagtatctttttaacacaaaaaagaataaaattacagaaaccccattcatccatcacccacagtcaataattatcaagattttacaacatttgctttatctattccttttattcattgactggaatacttaaaagcaaaatcttagacattaaatcattttaccactgcataccttaatatatgtctctaaacaatgttaatatttgccttacataaacacaagggcattatcatatatatataatgcccatttatcatgtatataaaaattaattgcttggtgttatctaatgtccaaaccataawcaaatttccctgataggctgggcatagtggctcatgcctgtaatcccagcactttgggaggccaacgcgggcagatcaactgaggtcaggatttggagactagcctgaccaacgtggagaaaccctgtctctactaaagttacaaaaaattagccgggcatggtggtgcatgcctgtaatcccatctactcgggaggctgaggcaggagaatcacttgaacccaggaggcggaggttgagatgagccaagagtgcaccattgcactccagcctgagtaacaggagtgaaactctgtctcaaaaaaaaaaaaaaaaaaattccctgatagtctcaaatattgcatttggtttgtttgaattaatgtcccaacaaagtccacatattccatttggttgtgaggtctcttaagtatcttttaatctaaatcagttccctcacctcttcctttttttttttttttttaaatgccattgacttattgcagattaactgggttaggggtcctatagaatgtcccagattctatttattcatttatttatagacagagtttcactcttgttgcccaggctggagtgcaatggcacgatctcagctcaccgcaacttctgcctcccaggttcaagtgattcttctgcctcagcctcccgagtagctggaattacagacatgtaccaccatgcccggctaagttttttgcatttttagtagagacagggtttctccatgttggtcaggctgatctcgaactcccgacctcaagtgattcacctgcctcggcctcccaaagtgttgggattacaggcgtgagccactgcgccaggctctatttatttatttgtttgtttgtttgtttgtttacttatttatttattgagacaaggtctcactctgtgggccaggctggagtgcatggcacaatcatggctcactgcggcctcaaccacccaggctcggatgatcctcccacctcagcctctcaggtagctgggactgcacgtatgtgctggaatgtcccatgttctgttataaatatgtctgcctgcttccttttgttgtcattaacatgtttttctatcctccatatttcctttaagtgaagttaactctagagcaatgctgcccattagaactttctgtgatgataaaaatattctgcctgcattacctaataccagtagccactggcaacatatgggtatgtgtgctttaaatgtgactaatgcaatgaggaactggattttaaatgtatttagttggccgggcacggtggctcacacctgtaatcctagcactttgggaggctgaggcgggcggatcacctgaggtcagaagttcgagaccagcctggccaacatggcaacaccccatctctactaaaaacacaaaaaattagctgggtgtggcggcggatgcctgtaaacccagctactcaggagactgaggcaggagaattgcttgaacccagtaggcagaggttgcagtcagccaagattgtgccactgcaccccagcctgggtgacaagagcgagactccatctctaaataaataaataaataaatgtatttagttttagttcagttagatagctataaatggctaccatatttttatcatcagacagtgcaacactcagtgtagttgattagattcaactacaactttcttggtaaatgtgcttcataggtacttcctatgaatcatatagggaagcatataatgtacctataatgatgcagagtggggctggaattgatcagtgagttcatatggtgacagccagattctgctaatgtaaagtttgcctacaggatattaacattaatatatataaattatatatgtgtatatatgtatgtatgtatatatgtatgtgtgcatatatatgtatgtatatatgtatatacacacttcatcttttttatttatttatttattttttgagatggagtctcgctctgttgcccagggtggagtgcagtggcgcgatctcagctcactgcaaactctatctcctgggtttaagcgattatcctgcctcagcctcccaagtagctgggattacaggcgtgtgccaccacaccccactaatttctgtatttttagtagaggcagggtttcacttgttgtccaggttggtctcaaactcctgacctcaggtgatccgcccacctcagcctcccgaagtgctgggattacaggcgtgagccactgcaccctgctatacttcatctttaggcagtttgttagaatcaaggaaagaactcagtgtagttcattgagctttctcatacatacaaaagtgagaaaggtaaaactttcttctctgtatatcagagtttgagaaaactaaactattacagaacattttagagaaagactttggagaaggccaaatataagacaattatttcttgggtcttgagactgggcccatgctttaaaagaaataaaaaatcattgacctggaaatgcactactactgaaataatccagatcatttcatgttcttgggtgttttttcgtttttgtgtttcttccttttcaggcatttcttacaaatgcaaatgactaactcactttggaaactcaatctgctggtgttattcatacttgctaatgaataattcactgctcaaaagattggagggcctgacaaatgaagtctgttgagtccagatataaacaaatggcttacaacaggactttgagggtctttttttaatcacttattatgaaatacagctgtccttttgctctaataagggagtgtgggtgtgacggagagaacaggccctcttttcttacctgccgccttgtctgacaacccaggtagcctttctttttgctgtagatggggaaccgctggcaggaagaggagtcagcatgcactgaacagtgctgtaaaacctgacttgactaacatttcccctttcagattatgaaagccacagactcttttcctggaaaaatgcatatatgcacatgtaggaaatgctgcctaccatttcaggaggtttaagacccctgagatagccar

SEQ ID NO: 94592 - DNA, 65249 bp, Homo sapiens
  misc_feature (1)...(65249): n = A,T,C or G
taaaaagtaatgagattgaatgaatatttaacagagtaagatataggctgaatttaacaagacaaagtcaaagttacctatgaggcccaaagttgtccatgagcaattggataaaagagaggcatagggacaagacaggtggagttaatgctattcttttttttttttttttgagacagagtcttgctctgtcacccagactggagtgcagtggcacgatctcagctcactgcaagctccgcctcccgggttcacaccattctcctgcctcagcctcccgagtagctgggactacaggtgcccactacctcctggctaattttttgtatttttagtacagacagggtttcaccgtgttagcccagatggtctcgatctcctgaccttgtgatctgcccgcctgggcctcccaaagtgctgggattacaggcgtgagccactgcgcccggtcggagttaatgctattctaaatcatgctcacctgagagcactgagttctcagtgtcacactttaagaacaaacatagaaaacattctgaagaggcctgggccaatgaatagcctgtttcctacagcacagctgtaggaaatgaagacaaataatccagattgtgggcacagtgaatgctcaacgtttgctggatgaagtaatgaaagagaagaaaagggagggataggtgaagaagagatgggacgttacattttaaaatatttgtctggcaagggaaataggtattaccttagtcccagatggctttggggaacaatggatacatgttacagggagacgattcagctcagtacactcaatacaaagagaaggtcaaagacccaaatgagttaccttggaaggtgacatgacagtttcagctttggtgagtcactcctttcagttcaagatggaggaccccttgatggatatgttacagaggtaattcaagcagggactagggagttggactccagtgatatttatgtgtttttccaacctcaaaacctaggcttctgtaaacgtttccctaaccaaggtaacaatcacaatgataaaataagttggttgtcagcaatgaagtctatcaaatggaacacagaacttgacggcatacagattcacccctaaacagctttcatgaatgaatcagaactgagtctaaaatggaagtatacttcttttcctgttttctgccaattaagacagcagtacttgtgcaattgaaagtaaatgtttctgaggctgatatgactagtaataaaactccagtttcccatttagctggctctacatgcattacactctttctctattgcaattcccctgtcttgataaattggctgtatctgggcagcaggcaatataaacccattaaaaaagaaaaagaaagtaaatgtttctaaaagaaaccaaatacatacacaattttcttttgtaattccaggggtgtcataaaaccagtgggcatctttcacatcttgtgcagtcaattctacttgtttggtggatttgtgtgtacccataacagggtcattttccatgtcaaaggcaagtgaatcagcatcaaactcaaagggaatgttatccttctgttcttctgaatacaagaatgtccttccaactcttcctagaacaagttatagtaaggttattagtcactcctttaatacttttaactccagacataatttttatgtttccctcaaacaagttactaagattacagtgtagggaagtgagaccataatgatacttttgcttttttttttttccaaaaagcagtgggagtcaactcttgcaataatcaagcgtgtggctggctgtgtacatggagtggcgggggcaagggtgtgtggaaatcagactgttttaaagaaaggctgaaaagatataccaaggaaagacagacaacctaatctaaagctgctgcatggagtaaaaacttttactacctgtactgctctgggtttccaaacagtagccttatcgctaaagggcctctttgttgcagaataaggaaggcagtctctccccacaaaaactggctagcctcggacagctgtatttcaggttgcttaacaaagaattttagcatagtaccaacgagggttttcccatagaggatgcttacctacgacataaccatgctttttgaggacattaagctgattttgttcttgctcactaagatcttcttcagcttgagttgaatcttttttaagtctttgatgccttttaaacattctgtaaggagttgggttgcaaataggaaacttcagaaggtttaatgtagtacctgaaatacacagaataaatacatctttacaaaagggaataagggggaagaaaatgaacatttttgaggatctacactgtgttggttactgtaataaaatataaaattactgccactttacaaatgaggaaataggttaagagattagttcacaggggaaaccagaattggaatccaaaatctgtaggcccgatttctttccatttttatcacattaccattcagtataaaagtaatttttctgtaaaattcaaagtgcaagacagagaagagcagcttactaaatgaaactttggtttcaagggaacaaatggggcagtcagttttgtcaacttaaatttaagcctggctgagcgtagtggctcacacctgtaatcccagcactttgggaggcccaggcgggtggatcacttgaggtcaggagttcgagacctgccttgccaacatggtgaaaccctgtctctactaaaaatacaaaaaattagctgggtgtggtggtgcacacttgtagtccagctatttgggaggctgaggcaggagaatcgcttgaacctgggaggtgagggttgccgtgaggcgagatcgcaccactgcactccaacctgggcgacagagtgagcctctgtctcaaaaaaaaaaaaaaatttaaaccatagaaggactcattttctaattacagaagtttgtttctttctttcttgtttttgagacagcgtcttgctctgttgcccaggctggagtgcagtggtgtgatcttggctcagcctcccaggttcaagcgattcttcaccctcagcctcctgagtagctgggattacaggcaccagctaccaaacccggctaagttttgtatttttagtagacatgggagtttcaccatgtgggcaggtctggtctggaactcctgacctcaggtgatctgcccaccttggcctcccaaagtgctcggattacaggtgtgacccactgcacctggccacagaagtttcttaaagtcacaagactgatacttctgtttttttgggtctctgttgtccaggctggattggagtgcagtggcccaattagggctcactgccacctcaaccttccaggctcaggtgattctcccacctcaacctcctgagtagctgggactacaggcacgcaccaccagcctgactaatttttgtatctttagtagagacagggtttcaccatgttgcccaggctggtcctgaactcctgagctcaagcaatctgcccaccttggcctcccaaagtgctagaattacagatgtgagccactgagcccggcaaagccacacatcaaattgcactaatgggctgggagcagtggctcacacctgtaatcccagcactttgggaggacgaggtgggcagatcacgtgaggtcaggagttggagacctgcctggccaacatgttgaaaccctgtctctaccaaagatacaaaaattagctgggcatggtggtgcttgcctgtaatcccagcgctttgggaggccaagagttccagaccagcctggccaacaaggtgaaaccccatctctactgaaaatacaaaaattaggccaggcgcggtggctcacacctgtaatcccagcactttgggatgctgaggcgggcggatcacgaggtcaggggtttgagaccagcctgaccaacatagtgaaaccccgtctctactaaaaatataaaaattagctgggcatagtggcgtgcgcctgtaatcccagctactcaggaggctgagggaggagaatcactggaacccgggaggcggaggttacagtgagccactgcactctagcctgggcaacagagcaagacaagactccgtctcaaaaaacaaaacaaaacaaacacaaaaattagcttggtgtggtggcgcatgcctcgaatcccagctactagggaggctgaggcaggagaatcacttgaacccgggaggcggaggttgcagtgagccgagatcacgccactgcactccagcctgggcgacagagtgagactctgtctccaaaacaaaacaaacaaacaaaacacaaagttcattaggttcagacagtaaaaaggacgcacactttctggaacaatatacaaagaagttacaaagcaaatctccagaacaggaactttgctttgttccctggtctatctccagtgcttagtgactgggaacagagacgtgctccataaacacttccattgaaaattactacaacacatcctcaattttccctagcagtaagctgacacagaagagaggtgtgaccagagtggggagagaatttgtaaagggaagggtacaggcagcccgcagtggacattaagggaggatgtactcggtgcctcggccaggaccagacgtccaccttgccaggaaacgaagagggcgagcctcctaaaactcacctggccaaggggagatggtggctctgtcgatggcctcggagcccttggcagtgcagtaatcggactccaggagcgtgttaaagagagtggatttgccggcgttggtggcgcccactaagtagacgtccccacggtagcgccaggagcgctgaagggcagagatcaactcttccactccatagccggtcttggcgctgatcagccgcacgtccctgaccactgtgcgggaccagttcggcggattcggattctccccgtcctgtggctcgtccttgacggggcgctgtggcccttggtggccaggggccagcaggagcccggcgcgggcacagtcctcccacagtcgctcccgcagcctctgccggtagccaggagcatcctggggcaggaggtccactttgtttcccagcacgatcagctgcttggggcccaccagcgcgggcaagtcgggcagcagggcgtcgggcaggtccagcaggtccaccatgtagagcaccagggaggggccgggccgccgcaacgcggcgctcaccagctccaggtactgctcgcggctcacctgcaggcgtagagcgcgccggtggtgcgacagcagccagcagcgctggcacacggtccgtgccagcccgccgtctgcctccgccgtgcggaggaacttctctcggggcaggtagccgggcactccggcgtcctggcagtgcagctctgccccgcagcccgagcagttcacgccgctgggcggcaatgccgggtccgggtgccccacgaccgggtgctcccgggacctggcccgtaggttttgctgtcgccgctcctcccgccgctgctgcctctgtcgctcctcctcctcctgctgttgctggagctcctgcagctgcttttcgcgggtgggttgcggctccggatccaggatgtactccgggaacagaaaacgctcctgcatgtcaccaccttctccaaagccctccgtgtccacggggtcataaggaagctcgcgtcccagactcgatgagtgctggaaggaggaggcggcagcgcacctcctctccaggagcggctcccggaggccatggcgcgctgccgtgggagcggatccacgaaggaaaaggctcagcagcctgaacggtaggcgagcgggcagcatgaggaagtagctccaaaggggcggagccaccagcgcgcacgcgcactagggtccgaggcgcgcatttgacccgagacgaaagcgcgtgggtacttgggagctgtcctggttggttttgcgtctaatcccgtcagttctcgcgatttaagctctgagactgagaacctacttaaagctatggcaaaggcactggaggattgagctaggtgggcagaaaagagcagtgagtgttttgggttttttcactttcaggcttaacgcctcactgctagcacaagccgcccttaataaatcacacttaaaaaggagcttccggggtcgggcgcggtggctcacgcctgtaatcccagcaatttgggaggccgaggcgggcggatcatgaggtcaggagatcgagaccatcctggcttacacggtgaaacccccatctctgctaaaaatacaaaaaattagccaggcgtggtggcgggcgcctgtagtcccagctactcgggaggctgaggcaggagaatggcttgaacgcgggaggcggaggttgcagtgagccgagatcgcgccactgcactccagcctgggcgacagagcgagcctgtctcaaaaaaacaaaacaaaacaaaaacagaaaggagcttccggccgggcgcgtggctcacgcctgtaatcccagcactttgggaggccgaggcgggtggatcacctgaggtcagcagttcgagaccagcctggccaacgtggtgaaaccccgtctctactaaaaatacaaaaattacccgggcgtggtgacccttgcctgtaatcccagctatttgggaggccgaggcaggagaatcgcttgaacccgggagacggaggttgcagtgagccgagatcgctccactgcactccagcctgggcgacagagcgagactccatttcaaaaaataataaataaataaaaataaaaaatagcttcgtgttttggtcyttataaaggcaaataaattgagcatcccaatgttgcggattcacaggacgaacactttttaataataagtatacctggttttgttttcaggtgtcgttatttgtgcamcaacattgaaaaacaagcagaaataaaacattgacggaacggatacgaccgcagattgcgggagctgtcctctcaatcrgcccggcagcggcggcccacaatttacgcgtgtgcaaccctaaccccggcccaagcttgacctacaatttgcgcaggcgcagatcctaactttggcgtccctgtgggcggcctttggtgtgagacgcgtggtattctgggaacgtcggagacggaagttacttcgtctttagctcctggcgctgctggyttctgggcggtttttgtcttttgatttcaagagttaggagctcgagaaccgtktggcaatatgtacgacgcggatgagggtaggtgaacgctcaaaacacacgccgtggcggtccatttaagcagkaaagcgttgggaactgattggattgaggatttggggccttcccatgcgccgkctgcacagtccccagccttgttcccacacttaccaggccgggaacgaaactggggtagggagaggcggagggtgcagggaacatagtgttaatgttccaggttacgttcactgctgctctctgcactttctcgttccgttagatctgatcctcgtttcctgtggtgaagtagcgtgcagaatcgtaagataaattacgttttgaatttgaagcaaagggcaccctttaaaaattttccttaaagccacagtcgacttaacgaatagctcaattgttgagtgtcagcctgtgtcaggcagtgtggaaggtcctggaaatattccgggacagagaatatcggggggtgggggtggcgggggggactcggtttagtctgacatttcttcatactgtttgtaagtcaaagtaaattgtcttaaaggatgacttttaacttcctcttctcacaatgtcacagttctcagatgataygtattctgctgcactgggccaatgtataatacctgtttgtttgcgcatatggaattcttagtagtggccgagcgcggtggctcccgtcagcactttgggaggccgagatgtgcagatcgcttgagaccaacctgacaaacatggggaaatcctgtatctactaaaaatacaaaaattagcctagtgtgatggcgtgcgcctgtaatcccagctactcgggaggctgaggccggacgatcgcttgagcccaggaggcggagtttgcagtgagctgagatcgcaccactacaccacagcctgagtgacagagttagactgtctcaaaaaaaaaaaaaaaaaattcttagttgagtctagtgtattttcgtagccgccttttccattctccatatctgctaattcaaaccttattttcttatagctctcaattccttggccaccccctacatctcctctctctattccctcaggtacttctgataaatcagatggaaaaaattgaagcaaaagcttaattttttttttttttttttaagagatggggtctggccatgttgcccaggctggtctcaaactcctgaggtcaaaccatctgcctgtctcggcctcccaaagtgctgggattacaagcatgatccaatgtgcccagccaaaagcttaaacttttaaagctgtttaaacttctgtctcatttatatcttgtgttgtagaaatttattagcatcattatattccttgttcttttttaactactatctcagtagaagaaaaattcgaaaaaaaagatttttaaagcataatttttggctgggtaatatattctcatagctcacaagccagaaaatttaaaaatgttaaagtggggtggctggtgcagtggctcacgcctgttatcccagcattttgggagtctgaggcgggtggattacttgagctcaggagttcgagagcagcctgggcaacatgggagacccctctctataagaaatagaaaaattagctgggcgtggtcttgctcacctatagtcccagctacttgtggggctgaggctggaggatcgcttgagcctgggaagttgacactgctatgagctgagaacaaagtgagaccttgtctcaaaaaaaacaagttaaagtgtcacgtctccttcttacccaccatctgcccagtttgaactctccacrgtgggtaactacagttataacagttataagaggttcttatcactccacagtttctttttttttttttgatggtcttgctctgttgcccaggcttgagtgtggtggcgcaatctcggctcactgtaacctccatctcccaggttcaagcagttctcctgcctcagcctcccgagtagctgagattacaggcgtacaccaccgtgcccagctaattttagtatttttagtagagatggtttctccacgttggccaggctgatctcaaactcctgacctcaggtgattcacctgcctcggcctccgaaagtgctgggattgcaggtgtgaacctccaagcccagcctccacagtttccttatgcatatttaagcaaatataaatgggattttctctttttttaaagacagtaatattcacacttttctccacttttagattttgtttaatgtgtccaggagattttcgtatcagtacacagaaagcatcgcgccccccctcccgtgtccccacccccagttacttagtttgtgtggatgtaccataacttaagtagtctcttgatggatattcggtttatttctagtcattttcgggttcaaacagtgctgtaaatgaataatcttgtacgtataatttgcccaagtatgtctgtgggatacatttctacatataaaattgtcaggtcaaatgatatgcacgtttaacattttgctagatgatgccaagtgaccaccatagtggtgattgtactaattttgcattcttattagcaatgtataatgatcctgtggaaaaagagtttatcagggttgctttagcagtgaacctacattttattgcccatgtcctctgaaatgtttattagataaygtcctcatcagttttcagtcactatgtgaaaatgtcagatttctgtcatccacatggaaacaagttaaattcttttcattgttacctttttcttctagtattttacctttcttctttcactcacagccaaacttataaaaataataagctgtccttgtttctaattttcatctttcatgtgcttttcaactgattacaatatgtttctactcatgctactacattaagatagctctaagattgacagcgacttctcaattgataaatgagatggatatttaaaacttatctaaaccctgtggtcttcaaaactgttgatgacatcttcccggaaactcactcagctttctagcgacatcactttcacttgatttttcttatctgacttttctcattttctttcctgttcacattctccttgggtgatctcatccattttccattgtttcagttaccatctgtatgcggataacttctgaatgtgtayacttctagtttaaaatctggggtatctaactgccactagccaactaggatatctcccaggctgcttaaccttgtcaactgcccaaactgagctaattattttcttttgctattcccctcccaaagccactgcctcctgtcttctctgtctcggtgaagggcacatttggccctctgtatctgtaggtttcacatctgtatattcaattaaccttggattgaaaatattaaaaagcttgaggccaggaatttgagaccagcctgggcaacatagggagacctcatctctacaaaaaaatttaaaaaattagctgggcatggtggcatgtgcctgtgatcccagctcctcgggatactgaggtgggaggactgcttgagccctaagaatttgaggctacagtgagctgtgatcacaccactgcacttcagcctgggtaacagcaaggccctgtctcaaaaaacaaaaaagagaatattaaaaaaaaattgcrtccttgtaaaaatgtacagactttttttttcttgccattattccataaacattacaagtaaataattatttatatagcatttacattgtattaggtattataaataatctagagataatttaaaagatacaggaggatgtgtgcctagggtatataacagtgccatttcatgtcagggacttaagcatctgtgtttggtatctatgggaggtcctgaaaccagtctccaatggacactgaggtacaactgttgtaccctctgttgttgaaaccgaaagcctgggcatcatttttgactcctctctttcacctctatatctaatcagtcaccaagccctgttggttctgtctcctaaatatgtcaaatctggccacttctctatcccctccaccatcattctagttcatgttgctgccatcccttgcctagattactcctaactgatttgtatacttccaatccactctccacactggcyatagggatctttcagaaatgaaaatctgacctagccacaaccctgctaaactcatatctcttggtaaaggccaaactcttcttattccacttccaacttcacaatctgtgcttccgctacattggccttctatcattctttgaatatgccatcctgtcttgcattatggggtcttttgcacaatttgtttttttctatttggtaggattctttcttgactcctacctttgtcccttccttttgcctgattactcctgtttataacacgagatctctgctcaggtttttttttttttttttttttgagatggagtttccctttgtcccccaggctggagtgcagtggtgtgatatcggctcactgcaacctctgcctcccaggttcaagtgattcttcgcctcagcctcctgagtagctgggatttcagggatgcgccaccatgcccttctaatttttgtatttttagtagagacggggttttaccatgctggccaggctgctctcaaactcytggccttgtgatccacctgccttgggttcccaaactgctgggattacaagcgtgagccactgcgcccggccagctttttaaagaaaattttagagacgggggtctcgctttgtggctcaggctggtctcgaactcctgggttcaagtgatcctgctgccttggccttccagtggtgggattactgacatgagccactgcacctggcctctgcccagcttttgggaagtcttccctaaccttttcagatctttgtcaggaatattcatatcactttttttttttttttagacagggtcgcactctcacccaggctggagtgcagtggcgtgatctyggctcattgcaacctccaccttctgggttcaagcgattctcctgcctcagccttcctagtagctgggactacaggcaggtgccaccatgcctggctaatttttgtatttttagtagagatgggttttctccatgttggccaggctggtctcgaactcctggtctcaagtgatctgcctgcctcggcctcctaaagtgttgggattataggtgtgagccagtgcgcccagcctgaaaaaaaatmtgataaatggatgagtaaatgagtctccttcatgagttcattttcctttgtatgacttttaaagttgttcccagatatcctgccttcagccttccttgtctgtgtataatctcatttttctcccacccatttgttaatgattccaactatgtacttttttttttcaaattttaaaacgtttattttattgacacataatagatacacatttgttatatgccaatgtatatctattatgtgtcacatgttctttgtctataatgtagactcttcatttgagtttatattcatatatgtgtgcctactagaagtayttgaaggtattgtgatctatagatatctctaaagccgrtctcatcattacctctcctttttccaccatcttacttgcttctcctgtatggcagtgatgttaacttttaatctctcatcaaagctagaaatgtctgagctattatacatagctttgtctttcttacccttccctcaggtgtagggattartaattccagtccatttaagaagtatttattaaaaatttattttgtatatgtatcaaattttgaacccagatctcctgaatttcataggctatatatgtgtacattagaataaaagccaaaaatacagcacacttattctttcccttaagaagatgggactaatattagaggaccagtgcacactgatttttttttgaatgcatatttaaattactgttgcataactacgctaaaatttagctacttaaaaaattattttgttatgttcatggatactgtgggttaggattttggacagggcatagcaggcatgacttgcctgtgttccaccgtgactctggttcatttgggaagacattaaggccaagtgttgacagctgggtgagagatgatctgtagtattgactatgtctgacatgagacattagcttaggaggactcaaggactaaaattgctaatggagcatctgtaagtggcctctacttatggttcgggctttctcagtatgtagcagcctcagaatagtgtatgtctttacaaaaaaaattttattttatttttttaaatttttgagacagagtctcgctctgtkgcccaggctggagtgcagtggcgcgatctcagctcctgcgaggaggcggaccgcccattccgtgcccggtagccgcgagggaccggtggtagccgcgagggacgggcggcgggctcggtgctgtggcgaggcggggatggcactcccccccgccgccccgtggggcggccccgactttcgggcggtgagtgagaggcgggccctgcaacctctgtctcctgggttcaagcaattctcttgcctcagcctcctgagtagctgggattacaggcatgtgccaccctgcctggctaatttttgtcttttttagtagagacagggttttgccatattggcctggctggtctcgaactcctgacctcaggtgwtccaccgaccttggcctcccaaagtgctaggattacaggcctgagccacccctactttttaatgacagctcagggctccagaaggaagtgttttagcaaacatgacagaaacttcattgccttttctgacctggcttctgaagtcatgcagcattgcttcagctgcattctcttaagttacaggagagtcaaaatctacccgattcaaggagagggtgcatagaccactatatgtgatgataggagtgtcaagatcacattatagaagaccatgtcggatgggagmtaggcttgtggccatctttggaaaatgcaaactttcatacctgtacatgtatgaaatgttgctataatagattgccccaccttagggtattgcccagttgttggaatccttccatggctctgcccccttaccctgttctctgactctagtgtctgaaaatcttgctgatcaataaaatggaaaacttaacattcatacaacttacattgaacctttctaataaacctctttttatattggaagaatacctgtgtgacatagacataaattattttattaatgtaattgaaattttagaaaagtggggtgaaagcattacttattcagcagaaagtaaatatgtttctgctacttaaagtcataggagcaagatgttaactaagtggcatctcattgcaaatgagtacaatatttttgtttttacagatatgcaatatgatgaggatgatgatgaaatcaccccggatttgtggcaagaagcatgctggattgtaatcaggtaactttggaccaaactgaattagcctgaaaaggcactttagatttcctgcttattcttcttgataaatagctcttctatataaatatgctacatgagagtagttattttatttatatatttaacattttaagtatttcagatctaaaagttacacaaagaattcatttaatcattttaaccagattccgaaaatgttaccctgtactacatttctttgtctttttctctttttgtatatatatatttttttctgaaacatgtgagagtaacttgcagatcatttgaccctgggaggttgaggttacagtgagcgaaggtcgcaccgctgcactccagtcttggtgatagagtgagaccctgtttccaaaaaaaaaaaagaataactgcagacataagaacattcttttacataatcacaattatggtgatcttatttaatctatagaccttacccacattttgccagttgtcccactggtgtttatagcaaaatacaaatttttctgatcctggatccaacctaggatcacatattgcatttacttgtcatgscatgttcttttgtttcctttaatctggaacagttcctcagtgtgtctgttcttttttttaccttgacatttttgaagaatacgggccagttactttttaggatgcctttccgtttaggtttgtctgatatttctcataattagattcagatgattacttttggcagaagtgacatagtctcagtgcatcatatcaggaggcatgtttgtttcattactagtaatgttaatttgattgcttggttttctcattattttaaatggacaaagttaaaattggttgtatttcattccaaattcccatccaattctaagtgtaactaaatgtaataaaattacgagaagccttgtataggtaagaaaagtaacttataagtgataaagtaacatcctgtaaggttaggatgttaaaggcttataactcttctctcatcccctgacacctgttttatatacaataagatgatgatggatgcctctctgagccccatcagctccaaggtgcatgtccttttggtcaacattctctcttttcaaagaacacatgcttccaacattctgccagttgtattcagagtataactgaataacctttcttgaacgttgttttgtgaaagagatactgatttgcctataatcccagcactttgggatgctgaggcagtcagatcacttgaggtcaggagttggagaccagcctggccaacayagtgaagctccgtctttactaaaaaatacaaaaattagatgggtgtggtggcrcacacctgtaatcccagctacttgggaggctgaggcaggagaatcacctgaaattgggaggcagagtttgcagttagctgagatgatgtcactgcactccagcctgggtggcagagtgagactctgtctcaaaaaaaaaaagatgttgattcagcatgttgtccagaatcttacaaaaaaaagtattgaaagccaggtgctgtggtgtgtgcctatatagtcccagctacctgggaggctgaggcagaaggatcacttgagctcaggagtttgagtgttgcctgggtaacatagtgagaccttgtctctaaaaataaataattaaaaaatatatattgagtttttgggatataagtatatatttttccataaggagttgakggtgaggataggagctctgtttctggtggcagggtttggagaaggggccggggcggcagttgccatgtttggttgcaaaggtagcaagaagcccctgaaacagcccaagaagcaggccaaggagatggacgaggaagatacagctttcaagcagaaacaaaaagaggagcagaaaaagctttaaaatmgaaggctgtggggaaagggcccctggccacaggtagaattaagaaatttgacaaaaagtcttggcgaggtggctcgcacctgcccgtaatcccaacactttgggaggctgaggccggtggatgacttgagctcaggagtttgagaccagcctatgcaacatagccagaccctstctatctcttttttttttaaagaaagaaaaaaagagaaatctggcaaaaagtcagcttttcattgtgcctgaggtgatggtgacctttgattccatttgtatttaaacatctgtattccctgccataatatcttttgccacctatagctagaatgaagcattgtcctggagccatttaagagtaaacttttgtaaacacaaaaaataaaacaaattggctgtagaagactaaactttactgagacagttacatcttctgtgatgtttgggtgttaaacaccaagagatattttattaggaaacaataaccaggtagatgttctgtggagtgtgcctatattctacattctcccggtagaaaaaatattttatcttaggtgaaaagaagttgttttcaacatatgtggtagattgctcaaggataaaatactctattgtgaactgtcatagcatttatcatttgttacaaaataaattatttgatttttaagtttaaattgactgtagatactttggctattgagaaatgaattttgatttttttttactttttaatatcaagtgatcttgtgaatgtgatattagttaatatcacaagtaacttcataagatgacttcaggtaaaataaacagagtagagatcataaatatgaaatatttatatagtttaggtgtttaagcaccattctaatgattttgggkaaagtagctatagttcagcttcctggggtaatgaaacttatctatagtttagaagctattcatcttaaattgcctataaaaaaccatggctatgtatattacaggcaatgccatgtttttcttacaatatcaatggctaatccacatggttgtgagaaatttctttcccattatgtgacagtctctactgaaataaattgccccaactgttatttaggtcataccttacacatgtgtgattgtctgctgtgttttctaccataggacctaacttctaatwttggtggccatacttgactggatcagggtggggccaatttgtyggcctgtcactgatgtgcgaggtgacctgatgaagccaaaatgggaggctgatgattagttggactctgcatattgtcttagaaaattgatgtgaagatgggggagtcagtagttggggagtagaagctaagaargtctcacagatataagatgacagaggtcacaagatataggagtggagacgtggaggtgtggtggggcacttcctactgctgaagggtgatgggataatcttgagggttgtgctacatcctccagcctctgtgatgcccagctttgcagctgtccctggatggtaatagggagtgatctgttgakaycctcttgcacgtgtatctacttgtctctgtatgtctttccccacccctcacctgaaaagtatctgttccttataaatatgatgtctrctttttagattgcagctctctcagccatgctgcatttttatcaccagtcttttgctgagtatttttatgtaaagacttattcttcttatcctacctttaagaattcaaaatagaactaatgatctataacctaaagttggcattctcatgcattattttagtcattaatatcactaccctccgtcctattcaaatgaaagttcttattgttatctttgacttttctttagttttctctcctgacatatttgtcaagaagtacttcaaagaggtggaataaaatttgtccataaagggcataaagtttttttttttctttgagatagggtttcgctgtctcctaggctggagtgcaatgatgcaatcatgactcaatgcagcctcaaactcctgggctcaagtgatccccctacctcatcctcttgaatatgtgggactataggcacatgccaccatgcctggctaatttttttcttatttgttgaaatgaggtctcattgcgttgcccaggctgaactcaagcaatcctcctgccttggcctcccaggagctgggatccttatagttcttatattgtgctttaagtattttacccccaaatataagctgcttttccccaaataataagttctacaaagaaaatatgcccggtttcatcctttttaagatacctcatagtgtcttgtttagtggttgacatataatggttggtattttatgactgtttcttgaataatgaaaatggggaaataatgaaaatggggaattatgctagaaattatcactgagttgcaactgactgaactcaaatattttcccagttcctattttgacgagaaaggcttggttagacaacagctggattcttttgatgagtttattcagatgtctgttcaaagaattgtggaagacgctcctcctatagacctacaggctgaagctcagcatgctagtggagaagttgaagaaccggtaagatagttctaatagttacacaggtacaagaagcgtattggtttgaaattttagcccttctcttacctggcttaaaggttaaaaaaagtcagttggagcttttagcaaagtacttacagcaccgtctgatttattttctctaatgaagaggtgtgtttttttgcaagttatcccatccttattcacatagtaggtattgaatagctgggaagagaggactctgaaatatgaacaaataagagaagtgagccagagatggtcacattgctttagatagataaccccgcttttttctctcacagtgtaaaaataataaaaaatgtttgaaggaattttcatctgattttatatattgcatgaagtacattattataaccatatgagataagaaaggaaaatcacccaaacatagcagctatctttactaagtttcttgtagcttttgctcacatatatgcaggttttttagcattgttaaaatcatactaagggtataattttataatttggttttacatgagtgattataagaaggatgtagtccaaaataatgactgtcccagttttagagaagttgagaggcagctgttggaacatattggactttgagagacagggaaaactgagaaacaaagtgaggtagggaaagcccccaaaatagagctagacacagggagagttcattgtttctagcctgatcagtttctcttctgtgtagcttatctcctaagtgctggtctgttatttccattttagttggacatgctgtacagaattttgctgttaagaatgaaagtgattggctcttctagggctgtgctggaaagggggacattaagtttcttttttattcttgggtcatttttttcttttttacagggtctataggtgcccacccccgcccggggattatttttttgtatttttagtagagacagggttttgccgtattagccaggatggtctcgatctcctgacctcatgatctgccctccttggcctcccaaagtgctgggattacagggcttctctatttttaataggcattaggaagataagatggaacccgattgttgaaagctttgaatgtcattggatgttatgaggaattactgagagactgtcaaagaatatacataaagcattattttagaaaagttactttggaaagtgatgcttgcttggaatagaaagaggctagaggaggccagatgtggtggctcatgcctgtaatcccagcactttgggaggcctaggcaggcagatctcttgaggccaggagtttgagaccatcctggccagcttggtgaagccccatctctaccaaaaaatacaaaaattagccgggcctggtggtgcgcctgtagtcccagctacttgggaggctgaggcaggagaatcacttgaacccaggaggtggaggctgcagtgagccgagatcacgccactgcactccatcctgggtgacagagtgagaccctgtctcaaacaaaacaaaacaaaatgaaacaaaacaaaagagactggaggagataaaaatcttagaatagsctatgattaagataataatgacctagactagatgatggcacagataaggagtagaggaytggcttccctttggttcgttatcaccaccgttctctttgccctttatccagcccagcttgggagacttgagtgtcaataattaatcattagtaaaacgtctgcttactcctgttttcttctctgagacttgatttagagaaaagyacactatccatttatctctagaaagttgtcctcatggatcttgttttattaggcagcaagtgaatgtttaattgaaaaatttctttttttttctatgaactaagctatattccagccagagttggaaattctcagccctttatatagaatgattaggatattttgtgtgttttttaaaataaaaaaatctttttattttgttaactctactcctttgacagattaatttgtatatttaactgaagagaggtttattttttaaaatgttctattgattagattagagcatagttctagttgtctggatttgttatctttgttctctggtcactttgtatttttgatgatgcttaccaaggagagggcacaagaaactatgtagatcattaatgtaaatccattttaactgtttcatataaactcagagcacatgatgtgtacagtctttacttttagtatattaagtctctttttgtcttctgccttaagaaagcaattagcagatccttctgtagttgataagtgtgtgatgattgggtgtgagatgtgccttccttaaaccttgttacaaaccttgttagcacattacctgtctaatgtgaaaaaaaatttttaagaaaagaggaaaaaagaaagtgatttggtttaaaacttaacgtctatgcaatatggatattgactttgggaagtccccatttcagtaaaatggattaattttgccagtttgtagagttgcttgtacttaaaatgttaatgtcaattaaaatggaatcactaaaacttttatggaaaaaattatttacccttttcatgtttttttgtttaatttcagccacgatatttgctgaagtttgaacaaatttatctttccaagcctacccattgggaaagagatggtgctccttcaccaatgatgcccaatgaagctagattaaggaatctcacgtaagaaagaatttttccttgtcagcagtagatactgaaatagaattttgaaaatgtaattttaaccacttgaggatttgttttaacagataccctattgcttaactgtgatctacttttattttcaaaggtattctgctccgctttatgttgatataacaaaaacagtcattaaagaaggtgaagaacaacttcagactcagcatcagaaaacttttataggaaaaattccaattatgttgcggtcaacttactgccttttgaatggcttgacagatcgtgatctttgtgagttaaatgaatgccctttggatcctggtggctatttcattattaatggatcagaaaaggtatagtaacattattttaaaaaattacaaaatggtagttaaaatttagtttaaagttgaaatgaaaaaaaaaaaaaaaagaaaraaagattttcctgcaggataacctggcactgacagttgacttgtttagggtatgacagctaaacttatataaaccaaagctttatttagctgtatataacatgcactgggaatttggtcagttttggagtttatgtatttctatgaagcatttatgcaaaatggagtttgtaaagttgaagaattaaatatttcagtgagcctatatggtcagattaaattaagatgcagattttactctyttttctcttcagtgatgttttggattttatggctgtaactttcttattgtccaaataggttctgattgcccaagagaaaatggcaacaaacacagtttatgtgtttgccaaaaaggattctaaatatgcctacacaggagagtgtagatcatgtcttgagaattcttcccgacccaccagtactatatgggttagcatgctggcaagaggaggacaggtatggactggatatgatgctatttgggtttattcctttgtgctttgttttaaaatttactagactgccttctttgtccatagaagcttttctggagcatattgttgttatatatcgtattgtttacctatcgctgtgtaacaaattactcctctagcaacatttatcatctcacggcttctgtgagtcaggaatctgggtgtagcttagctgggtcttttggccaagcaactctcacaaggctgcaatcagatgtttccctgggctgccgtaatctcaagagtcattcccatggttgtctgcaggatttagttcttcattggctgttggactgagtcccaggtctttgctcgctgttggctggaagcctttctttgttccttgccatgtgggcctctgcgtatagcagctgacagcagcatagcagcttgcttcttcagagagagtaagcaaaaagagccatagagagtacgagcaaggtggaaatcagtcttttataacttaaaagtggtagcaacatcctgtcatttttgccatgttctttttgttggttgcaagtcagtatgtccagctcacactaaagagggtattacaagggcaatagtaggaggcaggaatcattgggtaccagcttagaagctgcagaccactggtatagttataagcataggttgcttataataatggaacctggtagtagctagcagttcttaaatatttgctgtatgccaattctgttactcagattgcttgatttaatttttacagctatcttggaaaacctctatttcagttcrtgtgtgtgtgtgtgtgtgtgtgtgtgtgtgtatgtatatgtgtgtgtgtgtgwatatatatatatatatatwttttttttttttttttttgagacggagtcttgccctgtcaccaggctgcagtgcagtggcatgatctcggctcagtgcaagctccgcctcctgggttcacgccattctcctgcctcagcctcccgagtagctgggactacaggcgcccgccaccgcgcccggctaattttttttttgtatttttagtagagatggggtttcaccgtgttagccaggatggtctcgatctcctgacctcgtgatccgcccgcctcggcctccaaaagtgctgggattacaggcgtgagccactgtgcccrgccttcaattttatttaataattatgcatgtgtgggatgcaatgtgatattttgatacgtgtatacaatgtgtaatgatcaaattagggtacttagcatacctgtcacctcaagaatgtttttcataatattttatttgtaagataagcattcttcccatgtgcacaacattgctgggtattgttaagagatcatgaaaacacacaatccttattgagaaggtggccaggtgtggtggctcatgcctgtaatcccagcactttgggaggctgaggtgggtggattgcttgagcccgggatgtgagaccagcctgggcaacatggcaaaacactttctctagcaaaacaacaacaacaaaaacccaaaaattagctggatgtggtggcaggcacctgtagtcccggttactcgggaagctgaggtgggaagatggcttgagtgctgaggttgcagtgagcccagattggcgccactgcacaccagcgtgggtgacagagccagagcctgttccaaaaagaaaaaaagagaaaaaaaagaatggttttattgggaatacaagctttagacattaaatggtagtaacacagtgcagaggccaaatgacacctattacatataacagttttatagaaatttggaggagaatgaggttactagtatggtgtggtccatgcaaagtttttttttttttttctgagacagggtctcattctgttgcctaggctggagcgtagtggcgcgatctgggctcactgcaaccaccacctcctggcccaagcgattctcgtacttcagcctccgaagtagttagattataggcatgctccaccacacctggctaatttttgtattttttgtagagacagggtttcactatgttgcctaggctggtctcgaactcctgagctcaagtgacctgcctgccttggccttccaaagtgctggcatgagccaccgcccctgaccagttcatgaaacttaatagagaagatgggacttgacttacactttgaaagatggtatggatttatataagcagagagaaactggaaggacattcttattagaggagagtggggatgagtatttggagaatcactggaagatagctctaattgagctggatgaagtatgttgaatagtgagtgacaagtagatgatcagggtggatctggattagtggatcttaactaaaggttcacctcaataacctaagactcttccaagtacaaaaggggcccatttccaaatctgctgactcaatagtgagaatgrgagtggaatggggcccaggtacaagtatttgaaagaggtccccaggtgattgtgatgtgcattctttgtcgagaggcatcggcctggatgacagagggcaaagacataaacagtatattagggagactatcatggcaactctgaacaaaatgaattaattagagacagagaaaggaaaatgatctggatttgatgataggtttgataagataaaaggatgagtcaattaagatactatgatttgtattctgaggttccaggagagcggtgaacttcgagtaactgatttaggagagaacataataagttcagttttagataagatttttggggagtgcatgttgtagacattttttttctttaaattttttttttttttttggagactaagtctggagtggctctatcccagctcactgcaacatctgcctcctgggttcaagtgattctcctgcctcagcctcctgrgtagctgggattacaggcgtgtgccaccatgcccagctaattttgtatatttagtagagacagggtttcaccatgttagccaggctgatctcgaactcccaacctctggtgatccacccgccttggcctcccagagtgctgggattacaggcatgtgagccactgtgcccggcctgtgagccaccgtgcccagcctaaaattttaaaaatatttatagagatgaggtcccactatgttgcccaggttggtcttgaaatgctgggctcaagcaatcctcccgccttggcctcccaaagtgccgggattacaggcatgagccactgtgcccagctgtattattttttaatgttctgcttgttctgggataagatccatgatgaaacaaataatagactaaatggaataattgatgtccaggtggaaacaaccaattgkcatttggagatatgggggctgagggtacaagaaaaagatcaagataaacatttgggtgtcatatatgaaaagttgttactgaacaagtccatgagaggagttctgaagcaggaggcctgtggtgggaggaggaagatgacagaagttattagagggattatagtaatgtagggttatgaggccaagggaagatagagtgaaattaatattgaagcaaacaaatatgattaaaactgagaagtcaggtatgtcataggttagtaacttttaatttgtctttgtatatgcgtacaattaaagagggagaaattggaaaaaagaagctgtgtgaaaggggctgttagttttgaaacactgagacaaggaaatgcctcacagaccagctctgatttaatatttattttttattgtgtgcttagcttttttccgtatttgtctatctgtattgtctcttttttttttttttttacctctcwtctatttctttcttccagaggtttaattttttggaggggggataggttggggagggtgaggaatcagtattcatatttttttgcagccaaaagtgatttccaaatacagtattgggtaattctgagagaatcttggcatgcagataggagagaatggaagttgtctcaggtctaagtgacctgagcctgtatgtaaaattagtatacttgtttcggtggttttgaaaagcagtcataggaggttcctcacagtattgggaggcrtgcttcttttgaaatgtgcacaaagaatatatatatattaaatagttctcttggtgtttttatattgctgtgagcttttgtatattcatgttctaatgatactttatttttctagggtgccaagaagagtgctattggtcagcgcattgtggcaactctaccatatatcaagcaagaagttcccatcattattgtgttcagagcattaggttttgtgtccgacagagatattttagaacatattatttatgattttgaagatccagagatgatggaaatggtaatgtgaaagcaaaatgtattcacagagctttataagagatttagagttactgattgttgctaaccttaaaacatagtagaaagctgttctgaagagtaatttagctgtcacaaatcttatgccatttactgtgtagtgaaagctttcagccctgcctgggtctcttttctgacagtttgttgtaaaatagacatgaaaaccagaggcagctggagttaatgacagcagcaagaagaaacattggtaaggaagctcgcagaagcacaccagcttggtgcaatttagtaaaaagggaaaatgagtagttgatacctgttgtttaactttttattttgaaataatttcagacttacagaaaagttacaaaaaggccagtcatggtgattcacgcctataatctcagcactttgggaggccagggcgggaggatcacttgagtccacaagaccagtctgggcaacacagggagacctgtctctacaaaaaatgcaaaaggttaaccaggcatggtggcatgttcctgtagtcccagctactgcggaggctgagttgggaagatcgcttgagcccaggaggtggaggctgcagtgaaccctaatcatgcctccccactccagcctgggtgacagagtaagaccttgtctcaaaataagaaaagttgcaagaataatatataaaagtcttatatgctcttcacccaaattcaacagttgttacttttgtcacatttgctttatcattcattctttctatatataacacattttttttctggaccatcggagagtaagttatagccaatagcctcttactcctaaagacttcagtgtatatttcctaagaatcagtacattcacttaaataatcgtagtataatcatttaaattagaacattttacttagatacaatactgtttttttkgggggggaggatagagtctcactccgttgcctaggctggagtgcagtggcacgatctcggctcaccacaacctccgtctcccaggttcaagtgattctcctgcctcagcctcccaagtaattgggactacaggcacgtgccaccacgcccagctaatttttgtatttttagtagagacggggtttcactgtgttggccaggctggtctcaaacccctgacctcaggtgatctgcccacctcggcctcccaaagtgataggattacaacaatactgttaatgtacagatctgactcagatttttgtcagttgtcctgataatattgaaaactattaagtaatragatctgtacattaatagtatatagtaattcaagtttaatctcttttatagttcagagttcaattcagaataacgcattgcattttgattatatgtctttttagtcttttacaatccttccttggccttattttttttggagacaaggtctcgctttgtcgcccaggctggagtgcagtggcacaatctcagctctgcctcctgggttcaagcgattctcctgcctcagccttgtgagtagctgggattacaggcgcgtgccaccacacctggctaatttttgtagttttagtagagacagggtttcactgtgttggccaaactggtcacaaactcctgatctcaagtgaggggcagcctgcgtaggcctcccaagtgctgggattacaggcatgagccagcgtgcctggcctcctcggcctttctttgtctttcataacaaagtatatagaggacaggccatttattttgtagaattgtcctcagttgtgtttttcacatatttccccatgattagattcaatttatgcacttttttggcagaaaaaatacttaagtaatattatatgcttcccagggcatctcaacaagagtcatgtgatgtcattttgccccattaatggtactgttaactttgatcgcttcacagtggtgtctgttaggtacctccactgtaaggttactatttttgtgggaaccttttatgggaaggatttttgaggttaaatgtccagttccttataaattttttccattgatgctccttatctgaacagtaaatgatattcttaaaattgtcttaaattgtccagagcgcttaagactacagagaaatctttgtcacagattttgcaggctaaatctttgtcacaaagttagaacagggagtatattttagttatttgaatatttgttggtgtggttacatgagaaaattgggttctggttagattttactttcagattttgccrgtagttacataccttattattatttgagaaagggtctcgctctgtcacccaggctggagtgcagtggtgaaattacagctcactgcaacctcgacttcccgggcaccagtaattctcccacctcagcctcctgagtagctgggaccacaggtgtgcacaatcatgcctggctaattttttrtatttttggtagagatggagttttgccgtgttgcccaggctgatcttaaactcctgagctcaagtggttcaccatcctcgggctcctgaagtgctgggattacaggcgtgaaccaccgtgtccaggcccgacctggagttttcgtagtaaagtgaaaaatatgatatgctttatgtatgttgtctttttgagtattactgttggttttttcagcacttaggaagcttaagccaatttttacaagtctctgagtcaagcattcacttcataaaactgctttattttttttcttccaaaagtacattattgttattccttttttctaatctatattttaacaaaatcattttttttaaacaacagtggcagtttcctttgaaaaatatcactttgatttactgtactatctgtgacctcactttggttgacatggcctttttctgatctttgtttccatgattggaattttgatgtttaaacttgtggaatggtcctcgcttctgtagcacatatactaatactggaacaatatgtaggttagcatgtctctgtgtaaggatgagacacaaatgagaagggttccatatttttgtttgacccctgggtcctccccctttctttaaaaaaaaaaaccaaacaaacaaatttgtggaccagtgataaaaagacataggaaatcaagggcaagaaaggcatttcagtgtctgggataagatcagagggcacttacagaggccagagttgtcaaatgttacccttcatttctcatgctcattatcgtgtatagttggaaatttagaatatgagaactggtatggaacttagaaattattttatataacccttttgtagatgaggaaatccattacatgccttctgagaggccacagatagtggcaggaatgggaggcaggtctctttcacagtgtgtttttaaaataacctttgggctgggtgcggtggctcacgcctgtaatcccagcactttgggaggctgaggcgggcagatcacgaggtcaggagatcgagaccatcctggccaacgtagtgaaaccctgtgtctactaaaaatacaaaaattagctgggcatggtggtgtgcgcctgttgtcccagctactcaggaggctgaggcaggagaatcgcttgaacctgggaggcggaggttgcagtgagccaagatcacgtcactgcactccagcctgtgtgacagagcaagactgtctcaaaaaaaataaaataacttttgggctggcatggtggctcacgcctgtaatcccagcactttgggaggaggattgcttgatcccagaagtttgagactggcctgggcaacataatgagacccctgtgtctgtagaaaagaaatagaatgggtgcagtggctcatgcctgtaatcctagcactttggaaggcctacatgggtagatcgtttgaggccaggagtttgagaccagcttgggaaactctgtctctacaaaaaawagaaaaattagctgggtgtggtagtgcatgcctgtaatcccagctactctggaggctgaggcacgagaatcactggaacccaggaggcagatgttgtagtaagccaagatggtgccattgcactccagcctgggtgacaaagggagactgactgtgtctcttaaaaaaaaaaagaaaaagaagaagaagaaatagttgggtgtggtggtgttgtctgtactcctcctagctaccactgcattccagccagggcgacagagtgagaccctgtctcaaaaaataaaataaataactgtctcctttgtaaaatattaggtttaatttaaattaaatcttttttttttttttttttttttgagatgaagtctcactctgttacccaagatggagtgcagtgtcatgatcttggctcactgcaacctccacctcccaggttcaagcaattctcctgcctcagcctcccaagtagctgggactgcaggcacacgcaaccatgcccggctaatttttgtaattttagtaragacggggtttcactgtgttggccaggctggtcttcactacgttggccaggctggccttgaactcctgaccttgtgatctgcccgccttggcctcccaaagtgctgggattataggcatgagcctccatkcccagcaaatctttttttttttttttttacatccrgggtacacgctggataaaaatttatttttcttttgtaratttaggttctcactttctttccctgggtggtcttgaactcctggactcaagccatcctcctgttttggccttccaaaatgctaggattataggagtaagccccaccccacgcaggccaaacattttttaataccaaaactgaaaacaatctggcacattaaccatttgtagttcagtaaattttaatttgactatgaaatttctgtaaattgattttagatatctggaactttatttttccattggtaaaatgtaaaaaagaaacgcaccactctttttccttttgagacggtgtctcactctgtcacccaggctggagtgcaatggcaccatcttggctcactgcatcctctgcctcccgggttcaagcgattctctcactttagcctcccaagtcgctgggactacaggcatgtgccactgcggcagctgatttttgtatttttagtagagatgggggtttcgccatgttgcctagactagttgcaaactcctggacttaagctatccacctacctcagcctcttaaagtgctgggattacaggcatgagccactgctcctggccatgcactactctttttataatggaattatttgtatctttctagaaaggtaatygcctgtgctgatgagtggtttttgtcagagatcgctagatctctgaggtatcttctaagagtttgtgattccttgattttctaaaaatactcacatattttattatgttcataggggtacttggcatgttataaactaagtgacagtttactcattttaaggtagcaacatgaatttgaaaataacttttatttaaattgtctgataggttaaaccttctctcgatgaagcttttgtcatccaagaacagaatgttgcactaaatttcattggttcaagaggagcaaagcctggtgttactaaagagaaaagaattaaatatgcaaaggaagttttacaaaaagaaatgctccctcatgttggtgtcagtgatttttgtgagaccaaaaaagcctatttcttggggtatgttaagtttcattgttttaagttctttatcaagatacagttgagataaaggtttttcttagagtcaaaaatgatgtttttaacatataaatcaaaaaaaagtccaaaactaagtgttttccctctttctttctttcttyttttttttttaaagatacatggttcataggttacttctggcagctttgggtagaagagaactagatgacagagatcactatggaaacaagagattggatcttgctgggccgctgcttgcattcttatttagagggtaaggaattacagaatgaagtcattaaagcagggagatttatttcactttagattgatcattgcatatggccaggctaaactgtgttggcatccacgttgggtacttatgaaattagctacattcttattgctatttgctcagatttagttttggttcatgtctaggaaagccaggtttatgaggacaatatattacgtgtttatatattttctttattcctctggtagctttgtaagatgtttgagaaagctgaattattgccttggttttcctaagggctaatattggattttgtcctgctttgtacacatatatacaaaagctggagataaatatataaaaatactgtcagtgattgtctcacagtattggtattatgtgcagtttttaattttattcttgatgtttgtatatttcccatattttctataattggaaaaaagttatttttaaaaatgaaatatgtagacagtacaaaaaggataacattagcattgtcttgcacgtgttttgttatttagtatgttatagactagtgtttttcaacctttttttgatattgccccactaaggagcctcttttaacatttttgtttattgagatggaatttcactcttgttgcccaggctggagtgcaatggtgccatctcggctcactgcaacctctgcctccagggttcaagcggttctcctatctcagcctcccaagtagctgggactacaggcgtgtgccatcacacccagctaatttttctgtttttagtagagacggtgtttctccatattggccaggctggtctcaaactcctgacctcaggtgatctgcccacatcagcttcccaaagtgctgggattacagatgtgagccaccatgccccacctctttgacatttttgtgtagttgctcccctgccatgtatgttcacgtactatacatatatctgtgctttagacataaaagagcaacaactttcactctgcccaaacaatttttgctcaccttccccacgcttttttttgcaatattcctcctgttgagaatatatgttgtagacctctacatgtttaaaataataccattttattcggcagtatgtttaagaatttgcttaaagaagtgcggatctatgcacagaaatttattgatcgaggaaaggattttaacttggagttggcaattaaaacacggatcatatctgatggcctaaaatactctttagctactggaaactggggtgatcaaaagaaagctcatcaagccagagctggagtatctcaggtaagtgtgccaactatgactacaggctcaataggaaacatgtttataggactagtagattcttttgtttgttgaatataaattattttgcttttctttcttggtcaaaggtaaaactactgggtgccgggtgtggtggctcacacctgtaatcccagcactttgggaggccgaggtgggctggatcacctgaggtcaggagtttgagaccaacctggccaacatggcgaaaccccatctctattaaagatacaaaaattagctgggcatggtggtgggtgtctgtaatcccagctactctacttgggaggctgaggcaggagaatcgcttgtacctgggaggtggaggttgcagtgagctgagatcatgccactgcactccagcctgggcaaaaagagtgagactccgtctcaaaaaacaaaaaaaaaaacttactggggacttttgaattatgaacatgaaattttcttaaattagctattagtattactaagatagatttttggcttgcagtttagaaactcaaagtaattaaaaaattagagtagctgcttagtgggtgagacagtccatgttagtgaaatttttatgtcttaaaagctccacattagaagccaactaagagataaaaatggtcatcgccctcctttgttggaaaatacagtacttctgacactggtttctatatgttggtctgttgcatatataatgactgcagtagctattctcagatggagtaatggagaaaagctttttaaagagtgtatcactgggcattttaattttttgtatttgcttttcatagatgattgaaaacctgtaatgtactttatgccatttttagggggatctccccctcctttccttgtttaaactggcctataccagtatcacctgattgatttggcattcggacaccaatttcaagctcctttttcctagaaatctggatgctgtaagaaattttgaggggctactgatagcaaagttaatatttaaattccttgtaattcagtaaggatttattgggtatatttgatatttgtgatactgagttcacacacatgaatgagatgctgatctcagccctcagggagctcatcagcatctagcagaggaaacagattcattcatgtgtagctcactatgccctgtgctgtgttatgacaaatgccacattgcaaattcagttcaaggaattggttttttttttttttttgagacagagtcttgctgtcttgcccaggctggagtacagtggcaatctccgctcactgcaagctccgccttctgggtttacaccattctcctgcctcagcctcccgagtagctgggactacaggcgcccgccaccacgcctggctaattttttgtatttttagtagagacggggttttgccgtgttagccaggatggtctcgatctcctgacatcgtgatctgcccgcctcggcctcccgaagtgctgggatcacaggtgtgagccaccgtgcctggcccagttcaaggaattgttattgggacctgtgatgtgccaggcactctgccacatgctggagatgcagtgatcctgatcttcagtagttgacagtctatgcttgtagatgtaaacagataattacagcatggcatggtaactgttataataagagatgtgcrctgctgctctgtggaaatgctggagaaagatacttagcacagcctgagaaggtgaaaagaagtccttgtttaggaggtaacacctgaactgaatcttgaagagtacttggaaaacgcccaagttgcgaggtaggtagaaccagcagctcataagagagcttagagaacttcttaatattctgaattaaaagagatggaggcaggaaggaatgtgtgtctgtcgggggagctagagcagttctgggttttcaaatcaaagtggaggcttaggaggatgggaaccagctcatgaagaggagtgacgtggtcatttttgttcttttggacagattcacagtaattggcaatgtggagaaaagacttgagaagggcaagtttggtggcaggaagattgttgcaacagcctggggtgagaagtaattagggactggactagagcagttttgtagagatggagagtaaattttggaaatatttaggaagtaagtttcgtaagactttgtgattgattagtagaatggttgaaaactccaatgagtacagaaaagagaatagttcttcctggtggtgtgtcagatggctttgtagaggtggtatcatttcaccaggcagagcagagtggagaagtgtatttcattctgtggcaatagcatggtcaaaggcttggaggtgagggtgtatggtgatgtcagtggagtacaggagtgtaaggagactggtaggggaaggttgtttttggggcttcattgaggaggactttaatgttgtgctcttctgtagccagtggctacctgtttaatttttaagtgggtaagtgttaataattctggcaagtgaagagggtagattggagggaaccaggcagggacttatgagctgatggacgtagtataggtgaggggaaatgggctggtctattactgtgacattgggaagggaggggctaggttttttagaatatttgaaaatagaattgatagggtatgtttatagatgggtagaaggaggaacttggagacaaaaatgattttgagatttccagattgagagaaaggtratgctgcttatccacgacagaagacttaggaaagaggaagaaagtttgaattgtttaaggactgggggaagatggagatttataaataattaataatatagagcttgagttgtctgctttatattgccctaaatattatcttatttataaataaaatcttgcttagtatcctgtaagtattagtaatggatgtttgcatttttctattagattcagaggcctcagtctggaaaaagtactgagatggattagtgatgtctgctatgatcagaggagtgtgagttggtagaatttaacttaacacttactgagtacttaatgaatgccaagtactgttctaggtgctgggatacaacagagaataaaacaattttaaaaaattccctgccttcatgaaactaatgtcctagtgtttgtttggagaccataaacagaatgtttatgtggtatgtttgaatatatttgccatccctgctgcaagtggcaggtaagttaaagtgtcaaacaacattattcagggaaagaatagagaaatggggaacagtttgatactcagtagattatatgtaaaaatatgactttgcctcagtgtaatagtatgaatcacagaaatgtccagactttaaagattggctatttttttctaggtgttaaaccgcctgacttttgcgtctactctttctcacctgcgtcgtttaaattctcctattggtagagacggcaagctagcaaaaccaagacagttgcataatacgttgtggggaatggtgtgtcctgccgagaccccagaggtaatacattagaatttacattcaggacaaaaagtcagtgggtaattatgtagggcataattacttttagaaatagatgtttgaaaaattatgcagagtggtttagaaataagttttttttataattgtattcttagaaagtaagaataaatcttgaaatcacattgaaggaaaaatgtttatggaaaagaagtttgataggcatgtaaaatcaraatgactaatacttggtttattttttagggccatgctgtaggacttgtgaagaatttagccttgatggcrtatatttcagttggatctcaaccatctccaattctggaatttttagaagaatggagtatggaaaatttagaagaaatttctcctgcagctattgctgagtgtgtatagatggaattagttttttaaactatagttaatctttagttgttgcttagtatagaattgttaagtgtaaaatgcttttgctttttcattgtagtgcaaccaagatttttgttaatggctgctgggttggaatacataaagatcccgaacaacttatgaacaccctaaggaaaytgagacgtcagatggacatcattgtgtctgaagtaagaatctttagttaagagggtgtggactgtgagatttttaaacaaggcataggactagtgaaagttatctttgcattggcatcttttctttgaactttattcccttgaactgtaaagtgtaaatttaattataagttattgctaggccgggtgcagtggctcatgcctgtaatcccagcactttgggaggccgaggcgcagatcacctgaggtcaggagttcaagcgcagcctggccaatatggcgaaaccccatctctactaaaaatacaacaattagccaggcacggtggcatgggcctgtaatcgcagctactcgggaggctgagacaggagaatcacttgaacccgggaggcgggggttatggtgaggtgagattgcacctctgcactccagcctgggtgacagagtgggtctctgtctcaaaaaataaaaaaaagcctgggcatggtggctcacgcctgtaatcccagcactttgggaggctaaggcaggcggatcacaaggtcaagagattgagaccatcctggccaacatggtgaaaccctgtctctactaaaaatacaaaaattagctgggcgtggtggcgcgcgcctgtagtcccagctactcaggaagctgaagcaggagaattgcttgaacccaggaggcggaggttgcagtgagccaagatcacaccactgcactccagcctggcgacagagcgagactccatctcaaaaaaagaagttattgcttgccttaatctttcgatgcatgcttccaaaaattttggcacattttaaattattaaattatattttagaactcaaattacattttaaagtaaaaattcttttgggaatctttttataaagctgagaatacttttwaaaagggaataaccatctgggatttatcctttgaatccagagattcattaataaaatgtgatataccactaatagattcttttatattttggaggatattgaagtgctttggrattaggatgggttttaaaaaaatcattacaataaggccgggcctggtggctcatgcctgtaatcccagcactttgggaagttgaggcaggcggatcacttgaggtcaggagtttgagaccagcctggccaacatggcaaaaccctgtctctactaaaaataaaaaaatcagctgggcatggtagcatgtgcctgtagtcccagctactcgggaagctgaggcatgagaattgcttaaatccgggaggcagaggttgcaatgagcagagattgcaccattgtactccagcctgggtgacagagtgagactctgtctccaaaaatttattaaaaaaaaaaaaatcattacaatatattgtgaactttattactctcccaartaagggttttagtatactgtttgcggaatgtagttcaggcttttaattttcccaaatctataccttgggtgaaagtggtttttgagagaaactgaacacgcttagccagtagctggtctttgtacctaaaacagcagagaagagagtttggttgttctgggccttttccagcagcagaccctgagtgtttttttgttattgttgttggggggcagggacagagtctggctttgttgcccaggctggagtagagtgttgctatcttagctcactgcaacctctgtctcccaggttcaagaaattctcatgcctcagcctcctgagtagctgggattacagatgtgtaccaccatgcccggctaatttttgtatttctatttttatttttttgaggtggagtctcactctcttgctcaggctggagtgcagtggcatgatctcggctcactgcaacgtctgcctcccgggttcaagcaattctcctgcttcagcctcctgagtagctgggattacaggtgcctgccaccatgcctggctaatttttgtatttttagtagagactgggtttctccatgttggccagcctggtctcgaactcctgacctcaggtgatccacctgcctcagcctcccaaagtgctgggattatagacgtgagccactgcacctggccaatttttgtatttttggtagagatggggttttgccatagttggccaggctggtcttgaagtcctgggctcaagccatctgcctgccttggccttccaaagtactgggataacaggtgtgagccactgagcccagcctggccctgggttttgacccaggcttatttacagcttgaagtcaggaagagagtgattcacttgagggcaggcaaggctaagagaaagctcaaaaaaatgtctctctctgtctctctatctctctatctctgtattttttaatagagagattaaaaaatctgggcactatgttgcccagttggtcttgaactcctgggctcaagcagtccttcctgccttggcttcccaaagtgttgggagctatgcagtaggttggctgtatttttttttcttttttttttgagaggatgtctctctgtcacccaggctggaatgcagtggcacaatcatggttcactgcagcctctacytcctgggccccaacgatcctcccacctcaggctcctaagtggctgagaccacaaggtgtgtgccaccacacccaggttttgttcatcacacagtgtgtattatgtatttagctctgctgttgtaatgagaaccaatcgtagataatacataaactgataaaactgtgtttacaaaaacagctggtgggtgaggtagagtggtcgggtgtggtggctcatgcctgtaatggcataacttgggctggctgaggtgggaggatcgcttaaagctaggaatttaggaccaaccaccctgggcaacatatcaagaccatgtttatattaaaaaaaaaaaaaaaagagaaaaagacccatagagctgtattctgttaggaatgttagttttctaagaacttaaggcagtgcatttgaaagaagaatctttcttggactttagaatmctactcatgatatttttgctcacagtgttcctccttaaattactttctaagracaggcagtagactaggaacttggaacatttttctctttcttgtcttttgactcattttagagaaaaacttgatgttttgttgttttgttttttgagacagggtcttactctattgcccaggctggagtgcagtggcatgatcttggctcactgcaacctctgcctcccgggttcaagtgattctttacctcagcctcctgaggggctgggattacaggcgcacaccaccacgcccagataatttttgtatttttagtagagacagggtttcaccatgtttgccaggctggtctcaaactcctgacctcaaggtgatctgcccacctttgcctcacaaagtgttgggattactggcatgagccaccgtgcctggtctttttttttcttttttttttttttttgagacggagtcttgctctgttgcccaggctggagtgcagtggcgtgatctaggctcactgcaagctctgcctcccgggttcatgccattctcctgccttagcctcctgagtagccgggactacaggcacctgccaccacacctggctaattttttttgtatttttagtagagatggggtttcaccgtgttagctaggatggtctcgatctcctgacctcgtgatccatccacctcggcctcccagagtgcgggattacaggcttgagccaccgtgcctggtctttaatagcatattttatttgacttgatacatcccaaagtattacatcaacattctattaatataaaaattattagtaaactattttacgttcttttttttctggtttggtgctgtctttcaaatgcattatgtagtttatacttacaacacatctcagttcagaatcgccacgtttcaagtgctcagtcacatgtggctatcccctgtattagatagctagactataagccatttgtctgagggtkggtgtgagcagtcaggcttacgtctgataggtgggkgtgagaagtcaggctaatgactgggaaagtatggtcaaagcaaagtgatatagggctggtttttgaaaggttacagggtgagatatatgtcatcagcaaagaaccaaaataagaaattgtcacatactagtgtttgtggtattgaaaaaatatttcctacgttaacttgcatgacattattaccagatagtattgtacaggtttataattgccaaggttagatttttcattcataaaattttaaattatacctaagtttttaatatgttaaacaatggtaaactaagatttgcacattttacttgataaattggttgctccagaaatttagtaggatttgtattgtatttttaactaagcctaataataaagagaaaataaaaatttgtggaactgttttttctttttatatgtaggtttctatgatcagagatattcgagagagggagattcggatctatacrgatgcaggccgtatttgtagaccacttctgattgtggaaaaacaaaagctacttttgaagaagaggcatattgaccaattgaaagagagagaatataacaactataggtaaaaacatgcagtgagaaaaatgtgtgtattaaaaattgagatagaatttacatactgtaaaattaacctttttttattttttatatttttatttaattttatttatttatttatttttttgacacagcctcagctgtgtcgcccatgctggagtgcagtgatgcgatcttggctcactaacctccacctcctgggttcaagcaattctcctgcctcaaccaccgtagtagctgggattacaggtgtgtgccaccacacccagctaatttttgtatttttggtagagacagggtttcgccatgttggccaggctggtcttgaactcctggtctcaggtgatccgcctgcttcagcctcccagagtgctgggattacaggcatgagccactgcgtccggcaagttaacgatttttaaaaagtatacaattagtggtttttagtgtgtttgcaatgttgtgcaaccatcaccactatcttaattttagaatactttcattgccccgaaaaaactctgtatccttaggagtcacatttgtttttcttaacttctattatgaagcaagataattaataggattttatttaagcttaaaagtcttttgattgcccaggtgtagtggctcatgcctgtaatctcagcactttgggaggtcaaggtgggaggattgcttgaggccaggagttcaagaccagtctgggcaacatattgagactcccatctctccaaaaaataaaaaaattagtcaagtgtrgtggaatgcacctgcagtccagctactcaggaggcaggaggatcacttgagcccaggagtagtgagttttgattgtaccagcctgggcaacagagcaagaccctgtctcaaaaaaaaaaagtttttgtgatatattaaaatctattaatagtaataatgcgaaataacctatataatctaarttattacatataatatgacaataatatgaataatataataagaaatttagtaaaaagatgaagctgctttaaatatttattttttagcaatatgaatgtatagttatgtatactaatataaaaatcattcaaacaatatgtatgataaatttaaaaaattgccctccaatgtatactctcttcttcacaagtatatactggtaacagttaggtgtgtattcttccagtgcttattctccagcagcttacctatttcacttgtcaacaatcatgtaactatgttggtcagttatatataatattaaactatatatatatataaatrtatatgtatatttaatatataatattaaacttatttaaatataaatataggaatacttttaagtaggaggaatagttagttaaaatacttsaggaagtagaaaattgagtgaattcttttttagttggcaggatcttgtggccagtggggtagtggagtatattgataccctggaagaagaaacagtgatgcttgcaatgactccagatgatttacaggagaaagaagtagcttattgttccacatatacacactgtgagattcatccctcaatgatccttggtgtctgtgcatctattattccctttcctgatcataaccaggttggtatcactttttgtcttctggtgtgaggaattgggagaagtaataaaaattgaaagtaactctgtagtcttatctggagggaaaaagccttttaatgaaaaggctattaactcctacggaatcagtatttgatataattgctgttgygtttcatggttaagagccgtaattgattattccaaatggttattacttactgtttttgaaaaaaatcaggagttttaccaatcatatttcttttgatttattgtcagagtcttttccattagtgatagtaactttttgttgtttctgcttttcatttttacgtttagtcccctagaaacacataccagtctgctatgggtaagcaggctatgggagtttacatcaccaacttccatgttcgcatggacacattggcccatgttctctattatcctcaaaagccacttgtgactacacggtctatggaatatctacgatttagagagctgccagcaggtatggtcagttttgctctacgttatttaagatccttctgtgcttaaggcacttttctgggtgcttgggaggwttaaaaaataaatatgacatagtgcctgttctcacggaatttataatatggtgggaaacatgaacataataaaaaggtaggtatgtggaaagtgttttggtggaggtacaaagtcctttggaagcacagactgatggaagcaattaattcctgttggaagtctagatccagtttcatggagaaggtggcattttagattggagcaaaattgatgaaggggtatttgcatttgagaggtggtttaagcaagggcccagatggacgaagacatgcaaaatgtacggtacagttagtcatgtcagcttagtgggagtggagtgtaaatatatggaagtgaaagcttggtctcagtgtggagagagcttgaacaggttgaattttattttgaaaatggagacccatccaaccttttggatcagggaagtaatacaattagaaatttgttttaggaataccattctgacagcrgcataaagagtagattacaatcaggtactgtattaacagggagctaatttaggggtttttgcagtagtataaatgtgaaatggcaaggtcctaaagaaatgaaaaagaatgatgggtaagataccttttgaaatacacttgataggacttgatgactggttgagtgtggagcaatgaagagaggaattggaaatactgttggtgtttgtggcttgggtgattaaagagaggtgctttgaataggttgggggaaaaataagattgggaacatgttagaaggggaaagaggttttagaggtaagacaataattttgttttggatatgttgatttagtgtcttagtgtcagaacactaagacgtgaacttccaacagtgagttgcaaacatgatttgaaagacggtcaagtctagagatgtaaaatttttaatttattaatgataattatagattactatgaaattgcctaaggagaatttagaatgagaaaaaggccagaggcagacaattttagacaccaggaagagaaattaagagagaagatttgagaagtagctgataaggaggggaattccaggtttgtaggagattctcagggagactggatggtgggtaaaayggtgaagagaaatctgaagggtatgagtgttgactattaaaggagacagtagagttctttggcactgttatcttttgtattaacagacttttggctttgaatgtgggtaacatttgttatytgttagtaaagtttatctttagtgtattgtaatggggctctaccattttgatagcaaattctcataggttaaaattacttattttcaaaatcctccacaaggggttcctcttgtctagaaaagcaaaatctgttaggttgtctacacagtatgcatgtatctttgggctgtgcttgcagtgctgtgttttctccaacatttagataatacagtttctttatggctagagaggaaaataaatatacagaaggactaggtttgaaagcaaatgttcctttggtactggtgtgaagtggagagtcatggctggcagggactgcagttctgttattcctgacttcatcatggcatctttattttgaaattctttttttttttgtagagatagggtctactttgttgcccaggctggtctcaaacttctgggctcaagtgattttcccacctcagcctcccaaagtgccgggattacagatgtaagccactacggccagcccatcgtaccatttttaaaaaaacttttaacattttaccacatttgctctattattctctccctttttatttctcctcctgaaccacatgagagtaagttgcaggcatgaagccatatcattctttaattcttcagtatgtgtttcctaagaacaaggacattctctgcagtgtagccatcaaaatcagggtaacattgatatccatatagtcagcagtcctcaattcaaattttgccagttgttcctaatgatgtcttttttttttttttttttttgagaaagcaactgttattgtattcaaacctaacgatgtctttaatgggtctaggagctaatccaggattgtgcattgcatttaattgcatggttctttagtttccttaatctagaacagtttctcagtctttccttgtctttcatgaccttgacatttgtgaagagttcaggaaagttatttttgcattgtgtctcaatttaggtttgactattgtttcctcatgatgatatccaggttatgaatatcaagttattttattttatttttttgagacggattctcgctctgccaccaggctggagtgcagtggcacgatcttggttcgctgcaacctctgcctcctgggtttaagcgattcttctgtctcagcctcctgagtagctgggactgcaggcgcgtgccaccacgcccagctagtttttgtatttttattagaggtggggtttcaccatgttggccaggatggtctcaatcgcttgaccttgtgatccacctgcctcggcctcccaaagtgctgggattacaggcgtgagccaccatgccygacctaaatatcaagttattttatgggctcatcaaacaaagtgttttggcagcagsaactaagaatttcattgtggtgggaaagatatgatattttcttggtggcagaaggagaggggaatggggtagtatcagtttcaaacctaaaagctggggcttgagtctattgcttattaattttgggatcatgggtagattattaattcactcctctgattcatgagaataataatgcttatcttgtttatggcacagagttgctgtgaggatcaggaaacttggtttggggaggcacttcctaagtaggaggtgactcatgtgtaatcacttactataagaatggatacattgggagtgactagtcctaggatttgcttgtgggagatatttagccatcagagtagttgcctcacagattgctrttccaggaggaatagactttggcagttaccakgataacaaacacccaagcatttawggcaaatatgatgtaattaaagttgatttaaagaaagggcagtttttctgttttccaggtgatgttttaatgtatgctcttaaattcactgcaggcatcaactcaattgtggccattgcatcatacactggatataatcaggaagactctgttatcatgaatcgttcagctgtagaccgyggcttcttcaggttagtattttgtaaatttgtcaaaacacagatacagtggaaacactaattttttatgcaaaaaaagttcttaaaatacagtttaactacrccgcactccagaaagtggaaggactggttgatggtcacaaacagctgaagatactacttgtatctctcaggattttcaaatgctagtattttgagcctttcttttggtaaggaaatatacagttgcatttagataatatagaaatgtccaaagaagaaataaaaataacttagaatccatagataactattgttaaaattatagtgtgttttcttttcrctctttttttccattatgtttcagtttgattgtcgacaaacagacctcaaattcaaggcatataaagattgttttaaaaactgggaatttagtagaggggatggattttcctttktctgtgtagtttcaaagggtagcactagaactcagaggacagatactatggcttaatgtaaaaactttttttttttttttttttttgagacagagtctttctgttgccaagactggaatgcagtggtgcaatcttggctcacttgcaatctctgcctcccaggtttcaagagattctcctacctcagcttcccaagtacctgggattacaggcacgcaccaccatgccagagtttttttttgttgttgtttggtatttttagtagagacggggtttcaccatgttggccaggctgtctcaaactcctgacttcagctgatccacccatctcggcttcccaaagtgctaggattacaggcgtgagccaccatgctcagccaatgttaaaacttctcactggaagtgtttgagtagaacctaggtgaccatctttcagggttattatgtaatggattcttaaatgtgtcggaggttggattcattgacccctgggtctcttccattttgacatataatactaggtggttaaggttatgggtcagatgctacatatgtataactcatgtgataacatttagagtttaactcagatccttaatgcagttactcttgtcccagattcgtagtttaaattgtctcccaaatttcaagtaaatgagaaattgttggtatagtctcagcccttttgttaaaagaaaatagactttacctttagaaccatgtgtktttaggtctgttttctatcgctcatacaaagaacaggagtctaaaaaaggatttgatcaagaagaagtttttgagaagcctacacgtgaaacatgccagggtaagtgacactaacatttaaatgatggaatccaaagttaacttactgtggttttcctaagtgattttgatgggttgtgtcaccctgtgcctgccccygtcctcctctccctttttttgtgcaatgaaagtgtgttttcatgttattcttagagttcacatctaagaaaacatgtgtatttgataaaagtctttgcacctaggagtgagcttgctatagaccttccttcctggtaggtcctgcattgaggagggagtttaggaaatcagagaggtcatgcaatttctggggacacacttcacacctgtcccccttcctttctaaattatggtgtgatcataatatttgttcagccacattgtttgtaaacatttaaaaaataaccagtgagaagaggatacctagcatttgttgtttcttctagaaaactcaaacttactttctagttatttattttgacagacacttaaaacctgcttatgcagtgggatggatgggatgttccagggaaatgcaatatctctgctacagtgttgactctgaatagcattgcatgaagtaaaatgtattttgtttcctttgccatcttcctgttactccccttccattgggtggctctgtgtagtagtgaattgatgtccagtggagttaagattgagttaagatgaaatccacaatttctgtgggaggatgtgtacagagggcatccatagatactctctttttaatttaaaaaaatttttctcctgtacccactgatggcagagatattctttctcttgtaatatagaaatcagaagatgacaaaaaacatatccaaagtcactcgataaatgtctgtcatggaagaatctgctttcccagtgctgattccartgttcttttccttcatagacttttttttttgttttctgtgtggrctgtagtattagagttcagaatagtttgtaatatttggaataagggtgtgattcatggtatagagactcctgtggccttctctctgacttggaactgattcatgtatgtggtttttaatctttgttggggattatgtgacattccgtgtctatttcctcacaggcatgaggcatgccatttacgacaagctggatgatgatggtttgatagctccaggggttcgtgtatcaggagatgatgttattataggcaaaacagtcaccttgcctgaaaatgaagatgaattggagagcaccaatagacgctataccaagagagactgtagcacttttctcagaactagngagacgggcattgtggatcaggttatggtaactctcaatcaggaaggatataaattttgtaaaataagggtgagtacaactttgttcatgtagctagttttagaaagtaaaccaaatccacttaactaacttatttttatatgaatttaggtacgctctgttaggattccacagattggagacaaatttgctagtcgacatggtcaaaagggtacttgtggtattcagtatagacaagaggtaggtatctttgatctccctcatgcccaaaccagttttgttaaatattttttttttaatcaaaatttgctttaacttaagagctcaaagatgatacaggttgaactttttgattttattgttgaataagtatatgaacataccatgtttaaacagaatttgggacatacagtaattcagttgggagaactgaaatgtcagttctagtttagtatatgtatctttgagtcccttttaaaatttttctttgtaggatatgcctttcacctgtgaaggtatcacccctgatatcatcatcaatccccatgccatcccctctcgtatgactattggtcacttaattgaatgccttcaagggaaggtaagagatgttcttcaaaaatatagattctaagctgatgcttcttctaaaactctgataggtgattgctctcacatttgagccagggtactttgtaaaaagctagtgtgagacttacttttctgctttcaaattgcttatgattctgccattttttttggcaatttgcaaagttatggacaagtcagaatttttgtgagatatactacattcaactaatacttacatatgtgattttccttttgactagttcttttctgtagatgaacagttaatttgttgatggagagttcaatgtgaacttaataattttatagttctattatcagctctgcatacatcttttggtggaggttttctatttttaagtattcttttaaggtaaagtggtaatagtctaacatatggatggcttggttttagggcattaaaatgtcattttcctttgagccatctgaagtacttaggagtctcactctttttgtacctgatcccatggatcgacttctatttgaatacttataattgagtttttcttttttaagcaagtttatttgttctaaatgttttgtgtaaggttataaaatgaaccttatatatcacagctttccataacatagattttgagttcaaaatctttgaattttaaaatacttaaaataatactttcaaattttaaaagtatttaaaaattttttgaatgcatttttattgatatgacttttagggggagacagactgaagcaacattttaaagagtacttttttttttaaaaggtatcggctaacaagggtgaaattggtgatgccactccatttaatgatgctgttaacgtgcagaagatttctaatcttttatctgattatggctatcatctcagaggaaatgaggtatatttgctcttatagtagtaatttgccacttgtttttttttgtatgtgtgtagttttattctgaaacaatrtaaccttttattgaagtatcatatgtgcacatatagaaatgtacagcttgatgaattttcacaaagtaaacacagctgcatgactaacaccaagatctaaaaatgtgaaggtagcgactgaaccttttttagtcgctacctttccaytcccaccccaagctaattactctcttaattgctaacattatagattagttctgtgctttaatttttatataaatggagtaacacaatatatacacatatcttctttgacgttgtttaatttttaggtctacacttcaaaatctgtgtttgttgcaggtcctgtacaatgggttcactggtcgaaaaatcacatcacaaatatttattggccccacttattaccagcgtttgaagcatatggtggatgataagattcactctcgtgctaggggacctattcagatcctcaatagacagcccatggagggtagatctcggtaagaactgtatcatcatcattattattaattaaccttayattatgaaaaatgtcaacacaccaaaatggagatagtggtatagtgaatgcctgtgtgcctgttacccccatttcaacaattatcgactgatggccagtcttgttgcattcatctctgtccttctaacctttgatattatcatcatgttttaaaggcagagtctcactctgtcacccaggctggagtgcagtggcatgcccacagctccctgcagccttgaactgggcacaagcaatcctaccttagcctcccaagtagctaaattaatattgtctcttaagtccttttttgaatttattggttgtcctccaaccttttttttaactacaggcatgtgccactacacctttaaaaaaaaaattttttttttgtagaggctaggcgcaatggctcatgtctgcaatcccagcactttgggaggccaagacgggtagatcacctgaggtcaggagtccaagaccagcctggtcaacatggcaaaacaccgtctctactaaaaatacaaaaaattagtcgggcatggtggcacacacctgtaatcccagctactcgggaggctgaggcatgagaatcacttgaacctgggaggcggaggttgcagtgagccgagatcacacccctgtgctccagcctgggtgacagagtgagacttcatctcaaaacaaaaaacaaaaaattttgtagagacgggggtctcactatgttgcccaggctggacttgaactcatgkccacaatcctctagcctcagccttccaaagtgttggaattacaggcgtgaaccactgcacccagccctcttgattatttttaagcaaagcccagacatcatataatttctcctataaatttttcagtgtatatctttaaaacaatggttctcaaatgtcttgatcccrggaacccaaaatgcttttgttttatgtgagttgtatttattgatatttatcatattagaagttaaagctgagattttaaatttattgttttaaaaatgctaataagctcattacgtgttaacataaataacatgttttggctgggcgtggtggctcacacctgtaatcccagctactcgggagcctgagggaagaattgcttgaacccaggaggtggaggttgcagtgagccaagatcgtgccactgcactccagcctgggcgacagagtgagactctgtctcgataacaaaacaaaacaaaacaaaaaaccatgtttaatgaaaaatatatctattttccagatgaatttagtgacaagaataacattggtttacatttttgcgaatctctctaatgacctggcttaatagaaacagctggattcttacatctacttctgcattcattccattgtagtattttattttttatatttaagtatatgaggaagttctaatttcatgcaaataagtggttggaaagagaggaatattttggctttttttttgtgagacagtctcactctgtcacccaggctggagtgcagtggtgcgatctcggctcacggcaacctccgcctcccggattcaagcaattctcgtgcctcggcctmccaagtagctgggattacaggtgtgcgccaccawgcccagctaatttttgtattttttgtagagccagggtttcaccattttgcccaggctggtctcaaatggttggcctcaagtgatccgcctgccttggccttccaaattgctgggattacaggcaagagccaccacgcccagcccaccccttccctttttttgagacagtttcatccctgttgcctaggctggagtgtggtggcacaatcacagctcactgcagcctctactttccaggctcaggtgatcctcccatctcagcctcaagtagctgggactacaggcatgcaccaccaagcccagctaattttttatattttttagtagagacagggttttgccatgtttcccagctggtctcaaactcctgagcttaagtgatccacctgtctgccttggcctcccaaagtgctgggattacaggcatgagccaaggcgcctggcctgtggatatttttttgatactacaccaaaacggtaagttgtagtttctcaaaggttggttttgatgtagaaactgaaaccatatgaatgaaccttctgtatttatgtttgaagttcattggtttgtcttgtacttcagatgtatcttttacacatgcatattttgtagcatcctaattggtcatttggaaaatattggtttgctgagttacgtagattttcaaatgttaacacacttcattataataaaaaaattgcatttgttaatatgactactgatgtcattagaaaagcctttaaatatatcaggaagctatcaagcccatagtggtgcatagaagtttcctaaaattctgatttttgcttgaagctcacaattttcatcattttcaacaaatacttaaaattattttcctcaaagacttacttttttcgtttgctttcatttctttttgttcatttctttgtctgccaaatatctacaacatcgtcaacttaattctaagtctgaattaacatcatgggtgttaacatgttgatgagttaacatagttggtgtcagctggctatttgagtaaaaaagatactccatgttaaaagggactagttcagaatcatgcaagtgcttttgttcaagacagtcatcttcactatgcagtagaagtgcttatgaagtgttccattttattttactttattttttatatagagactgggtcttactgtgttgctctggctggtcttgaactcctgggctcaatccagcctctcaccttggcctcccaaagtgctgggattataggtgtgagtcatcgtgcctggttgaggactttcatttttttaaaagtcacaggatatgaaagagatgtatactcaagggttaaggtttaataaaactatttattttcactgcttcattaaggacatttttaagtaaaactsgcttttctccccttcacttgaatggagaatatgactgctagtaatgtttggttctgctaccctgagttctgctaaggtgtcagcagttttattcatgtttccaccatcagtgcaaatgtaaacacagtgaaagaagcaaatatatgttgttagtattactattaaaaatagctttgactctcaggcggtccatgaaccacactctgagaacctctgctctaaaagattaggacactaaacctaaccacagtacctccttagtattaaatatccagatttacatttccctgattatcacataagttttttaaaggtttgttggttttaatcagtatacagataaggtccatgctttgcaattgattgatagtgtctcataagtccttttttgaatttattggttgccttccaaccttttttttccccttgtaatttgtttgttgaacaacctggactgtttgtccagggcttgagactgaattttgctgcttgcatcscaaatgctgtgcattgctgttttttgtttgtttgtttgttttttgttttttgtaaatagatcttgaggcttgagatttagcgtttgagttttttggcagtaatactttataggtggtattctatacttccagtatctggttgcctttctttttatgattttagcagctattactaaagaccttaattaaakggcgatttccaactgataccattctattttttctcagtccttcttcagtttttagccagactacttctaaaactttgtttcctcaactgtttggttacctagtgatgtagttcttatagtaagggcaggaataaatgcttgattctctttttttatttaccagttttcaaaatagtgagctggttgtctaatgatccagatcagtggtccaaagtcgaccaatgatttttttgttttggtggaatatcattataaacccattggttttattttgtatattttggatattaagtatgttaaggaagccatcaccatctatttgcctggccatctgaataatgcatttatttcacttcttatgttggggaaacctattatcatttacctgttctttccattacttcagccaacatgtatttatgatttcaaggttgattgcctgggacagtcattccattgacaagctgccttatttagattgtctttttcattattcatttttttagtatagagttgaattctagaaagttaaatgatagcatgatgaacctccactctatgctttattgtgtcttatgaggaaaattaaatgctctacttaagaatctaatgtatccactccatttggggaccttctgtttttatttttatttgttaaaaaatagagatggggtctcgccatgttgcccaggctcctgagctcaagagatccacccagtccacttcccaaagtgctgggattacaggggtgagccactttgcttagcccatttggggactttctaatgcacgtcaaatagttggtagacttctcctctccccaccaatagagagaatgctagggtataaaaattagagcctagttatccgtctttgcaaatattattctccacctttgccattattcaaggcggtgtttataataaaaaataagtacaaagtaataatttttttctcttaacagtgatggtggcctgcgttttggagaaatggaacgagattgtcagattgcccatggagcagcccagtttttaagggaaagattgtttgaggcatcagatccatatcaggttcatgtttgcaatctttgtggaataatggcgattgccaacaccaggacccatacatatgaatgcaggggctgccgcaataaaacccaggtgtgtatagactttactggcagttgatatttgtttagaggaaactgtgttggtctgattatccaggcagaattagtgtggcagaacagattggcattttcacaattttgatagcatgcttctgtgagattcckagttctaaataaggaaaagataatttgatttttctaaaaaccagtttaggttttagtgtggtaatttctctaagctattcatcttttggaaataataagactttgtacaagggattttaaacaatgagtttttgaaaaccttttagttgaggtgggtgaatataaattatgtctggcagaatgggtaaaataccaaagcctactaggagaaagaaccaccataagctgaggtagcagaatgtgtgttctcagctccactcatttattcattatctacagtaccagatctttgtctttttctggggtagagaagtggggtcacttcaatacaattctgctaattaccatttgttttttcttttcagatttctttggtgcgaatgccttacgcatgcaaactattgtttcagraacttatgtctatgagtattgcaccgcgaatgatgagtgtttagctattttacaggagtcaacaagataattaaatatcttggtgtcttgtttctattgtgtggctttttaaaaatgacaaatatgtactgtgttgtgataaaaagtattttatttgtttaatgatatgcatgcttttcttctgtaaatatataataaatttttgtagatagtcttgatgtgtgatctttattttgtatttctctgtgtaaaaccagtgaatataactaaagtgttagtggattggattaaaagaaacttattaggcaagaacaggtaatgtagttatccatgactacttttaaccatgcagactaataatattctggaggtttatagctcggcaccttcacctgtttaaaaaaaaaaaaagataaaaattagttacatatggggatgtggttgacttttgaattggcakgtagttgagtgtttccaaataaatgaagatgttaaaatatggggataaaggatatatgagtaattgtataaatgatatgctggagtgctctgtggaactcaagttacatgattttagctatgaaaggcaattttgctgtattggttgatgcatcaaaggtacatcttattatagaactggaagagcacatttcacaatgagattcagagaggttaaagacctttcctttgtagtccggatctccttcaaaaggtaaagtggaggaataattagtagcagagctgagactcaaaygcatggyttgactcttagctactgttctgtttcattgcctgacattacacattatggctgaagagaatctgaccaaatacttctttacttaatatttcttttcatatcacagctgagtgatctgcacagtggaatggtttgacacatggtgacggtaaattttgttcttttgtctaagggaaagccaattcagacatcagtttcatagaactatataaatgtaaagtagcactgctatgacacaggatgggttcttcagaggaagctttttggcagtgaaggaaggggaggcagaacagaactgggtatttgccaatatactctcctttgtggccttttcttttaaaagcaaaagtgaagggcgagaattgcccacaatcattttcttttaaataggaatttaatagtcacaacacaaagggaaaatgccaagtagataggtagaaagctatgggaaatagaagccattccaggcaagtttgattttgactcttacatgttagataaggtaaaagcatctaagtcataataacgatgttcagtcacccatccagataatcttttggagtctcatgctgtacattttaatggcatacttaatgcccttatgggttgctaactacagaatttcatcaatagctacgtctgatactttcatacttagttctgttctttttaaagcaaatgtactagtcatttttaaatggctgtgagatttattgtgtaccttttttcactggtatttcatgtaaggcatcaaccactgtaatttttgctgatgctgaagcctgtccttgggaattggatgcatggcactcatattctccagcatcttccttacttagaggagatacctgtgaaagaaaaaagatctagtattcctctgtggtggtcttctcttttgtcagtggttccagtgaggtcattatttcataaatttcctaagatgaccaggggattcatagcaaaggtactgctagaagcagtgcaagtcctgtgataggagacttcgataactaccatatttggtttgctgaggattcatatgaggaaatgtcatggacaacttttgatcatactgcataggttaaaaactggataggtacacattatcggtttaagggcaaccttgataagggtatatgatcaaagtattctccatgaatatccagggtcaagtaaaataaggtatttattaatcgataatcagttaaaacaatgcttgggccacgcagctccgtgtgaggattttgctttgaactcttaggaaaatactagttcttgttaattcattggttgttttcaaaacatgcaataaagcacttttcctttagtttctctgaaagaggagcagcgactccatggtaaggctattccaaacagatgtggaagagcaagcacctttaggctggcggtacatcaggcacctttgccaggtctgcttatgtctaatgctaagaatgaaactcttgccagctcttggtactggtactcaccagcacccagccagttacttcatgcttttctgggccaccccgggtctgaatggccaggttgtcccggtcaccaggcaggagttctgtcctttgaactccatagtgacccctttttacctgcaaaaacaaaaggagagtaatactgagttttgtacaccagatcatctacttggaagtggccacatccctacaattgcacatagtgtatgtcagactttctaacagagtaaacccagcattttactgaactatttccctttcctaaatacttttaaaatatagatcctcttttatttcttcctgccagtttcctgctaagcgtacatgttttaaactaatgtatttttctgcatgcctggggaatatacatggtcataatttcctgccactggtcaccatcattcattcactcatgctcttggaaattctgcttctcagttccaggccttttgcctgtcatgccatgttcaactgatgaactgtcacccagcactaggtttgatgcttgggaccttggggctcttcctgcaacagcttcatcaatggaaaataggctgagaccaaagccaataccattactttattctgagggctaagaattaatcaaatgatttactgaacacctaagataaaaaacacctatcaaaggagttcgagaccagactgaccaacatgacaaaaccctgtctctagtaaaaacacaaaaattagccgattgtgttggcgagcacctgtagtcccagctactctggaggctaaggtgggagaattgcttgaacctggaggcggaggttgcagtgagctgagatcgcgccactgcactgcagcctgggcaacagagtgagactccatctcaaaaaaaaaaaaaaaaaaaaacagctgtcaaatacatgtgctgtcattgttcttttatgacaaaacttgctgactgtttctgtgtatgtcatgtcaagattcagaagaaactcagtttctttggtgcaaggccaatactgaatagtatcctttttgccctcattttaaaaggcaaaatgttttattatataaactctggaaaatatacaaaagaatgaaattcacttgtagctcctcgatacatatacatttagcagctgagttacagagtacaaatattttaagccttgtgataatggtgagttttaaaaaaaaaaggatatacgaattgtttgttcattccatcccagatctcctttaagagccaacctgacatttattgatattacctttgtaattagaaaggatttacaacctcaaatagctagtttccttttcattttcttctataataaagcaaatcttaataaagaccagataatagtgtgtatatatagacaccgtatgtataaatataataaatatataaataaatatatacactttattaacttccatctcagtgttgcttttcccatgtggatcccactcctaccatgtgttttttggtactctgctgttgtgtcggcttcaaacctacactgtattttctcagctttatgatgccaggactgggattcagcaaaccacatgtgatctaggccaattcctgctctagaaaaaatatcttgcatgatttggaaagcctggctttttgcattttttttctggaattttcccacattgccactattagtgagagaaaaccacgtaacttaatgtctttctcataaatgctgtgaagacaaacatactcaataggtaccttttcccttagtttcccaagtagctggcagaaacggtttatgctaatacagcttttgaaatagttacttaaaaatgggttgtaagaatattttggtagaagtattaatttgatccaaggtctcaagtaatatgactctgacctttatttactgaatttcagaatcatatgagttttatgtgtgaccaaagcaagaaaataaacactgcagcactgaaatactgaatctcagcaactaagcctcaaatcccatagctcttagtaacagcattttatgctaattaacctgatccactatggaaagggaaatgtatcttgttaaatataatatttaacagaaatcacaatatagatatactttatttttcccttcttttcacaagtgttggcatggcgtattttaattaatgttacgtaattataaaaggttatacatcatgtagaaaacatagaaaaaagtgccaagaattttcatatgacaaatttttatatgtcaaactctcccttattcgtgtaaggggattctaagtgttgttaagtatgtgttttcttttttttttgagacagagtctcgctctgtcacccagggtggagtgcagtggtgcgatctcagctcactgcaacctctgcctccgcctccgggattccagtgattctcctgcctcagcttcccgagtagctgggattacaggcatgtgccaccacgcctggctaatttttatagttttagtagagacggggttttgccatattggccagggtggtctcgaactcctgaccttaagtgatccacttgccttggcctcccaaagtgctgggattacaggcatgagccactgtgcctggccaataaatatgtgttttctagttaaaattggaattaaaactaaaaaagagaggttaatattcagtgctagtaaagatgcagagaaatggcacttctccatttctggtgggagtgtgaattactacaatctatttagaaagtaatctgacaatgtctgttaacactgaaacaaatattttgacttaggtaactgttggggaatctatcttatagcaatacaatcactagtatgtatgatatgtgtactttgatgcttaaagtaggttttttaagttaacaaaaatttggaaacaacagaaaaaatacagaactgatttaataaattacagtattcatacttggaatattacgtagctgttgagaagcagacttggacggatgtccatgaagtatttgttgagaaaagcgagtttcagaataatttactggcacactatattctcatttcaccgtagggatatatgtttgaatatgcttggatatgaaaaagagtgtggaaagatacaaaccagggcagttcacattggttacctcaggcaggaggaggaggtggggggagattctcaactctttctttatacgtctttggataatttctgcttattactattaccttagaggtcactatttttgattaaaaaatattcttagaggtcaaggaagccctaatctgaagaaatattcaggcaagaaaagaattaaacagagagcctctccgtctcagaaacaaatattgggaaggtgttttgctttcgctgtgagcatcatctttgatttaaaagggttaagtcaaatatggctatttcagttcacgttcccatttcaaaatattgcctttcgaatctttctaggctaggagtttgctgaaaggtatggggcttgttaaagccagctttccttactaccagtaaggaaagtaaagaccactcgccaggctgtgccaaccgtaagaattgccaccgtagtctcaagtgtcatggagaaaaggcttgtaccattaattctgctgttgctaagaaaccttgagcaagaaggacatgctgtctttatttgagcctcagtttctcttgttttacaagtgaggattctaataatctatccaaaaaggtgttctactcttaaattggatttgaaacacacatgatagtaaatatgtttgtattcttaacagtctggttacaaggacagcgatgagaaaacaaataccctgtttaattatttaggtcagtgacttcccaagtttccttagttttgacatggaccaaactatcgtatatctggaatatacaaaagttttaggaaatgacaccttcataagtggtaagtgtgatgccttaacataggttctgttctattttttattttttataagaacatggtggttgtgatcgctacattagttccaggagtcactgatgggtcatggtctgcagtgtaagaaacattgctttgggtcatgcatgtggcaaattacattatgaaggtagaggaaaaccggcagagcatcacagttgggttttgcttgttctggaaagtctgcagaaaaaattgtttctctcctacttcctcttcacttctttacttcagcacccatctcgttgactgacatagtgggttttttggtttttttttttcagagacaggatcttgctctgttgcccaggctggagtgcagtggtgccatcatagctcactgcagccccaccttttgagctcaagcgatcctcccacctcagcctcccgagtggctagggactacaggtgcgagccaccacaccagcctcaactgccttggtgtttctgactagccctgaggacaagccctcagggaggccttgtctattgggatctgccctgtacagtcctaaaagggaaaagattcccgaggcagacgtattcctctggtatgtgaatactgtagctgggattgggtagagcaaggactgaagaaattattctttgccaagatttgccaataaggtcacatgccccaggacgcttgggtgaccctcgcttctcattgggtaagtatccctagaaaactgtagagaactgcaacggagcttttcatgggtattcctcggaacattatttctccacctccccacaccctgagcaaaccagcaatctccaaattagcagtgaggaacg

SEQ ID NO: 94593 - DNA, 15231 bp, Homo sapiens
gcacgcccgcattgaaagtggatcttacctgttgcagtccactgtctcacacaccaagctcccctggaaacactctcaccgacacacccagggaacaatgtttcaacagccgtcttggcatccctcaatccagtcaagctgactcgtaaattgaaccatcacaatgagagtgcaggtatctctccaacatactgatttcatttccttttaaaatacccagtagtgagttctttggatcatatgctagttctatttttaattttttgaggaacctcagtactgttgtccatattgcctgtactagtttacattcccatcaacaatgtataagatttcccctttctacacatcttcaccagcatttgttgtttctttaacataaagagtgtaaaatcactttattagaaagtttaactaatcagtcacaaatgaacagcatttttgagcactaaacagaggattaaaataatttccaaacactagagaaaattattgaaaattctaatattttaggcttaaaatatcattaccctcatgaaagcaaaaatcctatagatgatattttctaatatatatatatattctaagtactatgaaattataatagaaatcatcaattaaagtgtaacaagtaatatctaaccacgggcaaatttcttttaagatcactttattatattttatgttattaaattaaattttgatttttttaattattatgggtaaataatagttgtatatatttatggagtgcatgtgatgttttgatacaggcatacaatatgtaatgatcaaatcaggataattgaggtatctatcatttcaagcctttattatttctttgtgttaggaacactccagttctactctcttagttatttttaaatatacaataagttattgttaactatagttgccttattgtgctgccaaatactagatcttattcattctctctgtgtttgtacatactaaccatccttactttcagcctattttttgtctttttaatgatagccattgtaactggggtgaggtgatattgtggttttgatttgcatttccctaatgattagtgatgtggagcatttaaaaatatacccatttgccatttgtctgccttctttggagaaatatctattcagaacttttgtccatttttaagggaatatgtcttttttggttattgagtttgagttccttatatactccgggtattaatctcttgtagatgcatagtttgcaaacattttctcacattctgtgagttatctcttcactccgttgattgactgtttcttagaaattttcaaattacgatacattgttattaactatagtcatcacatggaaaaatagatcacttgaacttatttctctgatctaaaattatgtatcctctgagcaacatatccccaaccacccaaccactactccacaacccaccagcctctagtacccaccattctgctctctatttctatgatatcaactttttttttacattacacatatgagtgagatcatgcagtattgatatttctgtgcctggcttattttcacttaatgttctccaggttcatccatgttgtcacaaatgacaggactttcttctttttcaaggatgaatagtattccactttttatgcataccacattttctctatatacactcccatgtattctgcctagattgattttatatcttggctattgtgaatatttctgcaaagaacatggaagatatctctcggacatactgatttcatttcctttgggtatatacccagtggtgagattgctggatgatgtagtagttctacttttagctttttttagaaacctccgtattgttttccataatggctgcactaattcacattcccaccaacagtgtgcaagggttcacttatctccacatcctcatcaacattgttatcttttgtctttttaataatagccatcctaaggagtatgagatgatatcccgtggtggttttaatttgaatttatctgattactagtgatgttgagcactttttcatatacctcttggccatttgtatgtcttcttttgagaaatgtctatccagatcctttgcccatttttaaatcaggttatttgttttcttactattgagttgtttgagttcctcaaatattttagatattaaccccttatcagatgtatagtttgcaaatactttctcccattctgcaggttgtctcttcattcttttgtttcctttgctgtgcagaagcttttcagtttgatgcaatttcatttacctagtttttcttccgttgcttatacttttggatcatatccaaaaggtaattgtatagaccaatatcatagagttataccatgtgttttcttctagtagatttacggtgtcaggtcttacatgtaagcgtttaatccatttctagttgatttttgtatatgttgtaagaaaagggtctaatttcattcttctgcatgtggacatccagtttccccagcaccgtttattgaatgtataagagttcttttctctccacatacttgccaacgtctgtcatttttggtctttgtaataacagccattctacaatggccatattcccatactgtgggttgtttcttcactctgttgattgtttcccttgcctcacagaaactctttagtttaatccagtctcatttgtctatttctgggttttgtttcctgtgcttttggggaataaaatcttttcccagagcattatcctggagagtcatcccgaggttttcttctagcatttttataatttctatagctcctccaaggtcacacacctgaactgagattgtaatggtgatctaactgaaagcctatttatctacctatctgaaagcccaccagctttcacttacaccacaatacacaaatccatcaaatgcatcgtctgctcaattatggagctctcttgggaaatacttgtctgtcaactaagaagaaggataactttgttaaatcttcctagcttttcttgtcagataaatgcctgctttatttgctctcccctactcccacgtctctcttgcttcatatcaaagcaggaaaaaaaggaaaaactgcacaataatatgatggcatcactttgtgccaaagtccagaaatagtcttattctaatccaaagtattgcacaaccattttgcttatgtgtaatagacttttcctgctactttctctgttggctttagaaaacaccaccatctaatataaatagtgaataccaaattccatgtaagcttggacaaatcacaaggtcttatcattattttccttatctataaagtaagacaataacagctgtactacttacctcacgtggttatcatgcagagggtcaatcagatagtgtatatggaaacatttctaaactgcaaatctcagtttgaagtcaaaagattgtaagtgtgatctgtaaaaatgttgctctcatgaacaagcgtacacaggaattacgatcatttttctgttctctggtataaacaatgagttaaagaattaaggacacctgatttcaaaacctctctgctacgtatgaactctgtggcaggtctctaagtttcagttgccttaaatgtaagaggaggttaataacacctttccttctgggatgatgaaataagtaaattaaataatattttcacaaatgcctaacccagcactagaagtttctggaaatgacaatgggtgtcaacagcctggtgaagactgtgcttcctcactccattctccctccaggcatggctccttgaagcctgggaggatggactattatattctttttctttctttctttctttctttctttctttttttttctttgagacagagtctcgctctgtcgcccaggctggagtgcagtggcgcgatcttggctcactgcagcgtccgccacccaggttcaagtgattctcctgcctcagtctcccaagtagctgggactacaggcgcgtgccaccgcgcctggctaatttttttgttgttttgttttgtttgtatttttagtagagatggggtttcgccatgttggccaggctggtcttgaactcctggcctcaggtgatctgaccgctttggcctcccaaagtgctgggattacaggcgtgagccatcgcgcccggcctatttttgcatttgattcttgcagtagccctgtgagatcagctaagcagatgttattatgctcattttatatgcaacaaaactaagaatgttggctctgattgtgccatgtactatctaacactaaggaatattgcctgagatatccaaaaatggcaccattggatgttaatttatctttggaaagaatatctttggcagtatctagtaaatctgagcatacacataccttatgatccataagttccattcttaagtttatttcaaacaggagtgaatatatttgttcaccaaaagacatgtaatagaatgttcataacagcactgtttgtagtagttccaaaccggaaattactcatatgtccatcaacagtagaatggataaactgtggtgtgatcacgcactcaacttccatatagcaccaataaactattgctaagcaatgatgaaactcctaaacataatattaaatgaaagaagccagacacaaaatgaatacatattgtgattgcaattatataaagttttatataaacaggcaaaactaatctttggtgatagaagtcaggatggtagttacccgtgggttgggggatgggcgttactggaaaggggcataagggagggttctggggttctggtaatgatctgtttattgacctgggtgctagtgatatggatgcgattacatcatgaaaattcatcaagcttacgatttgtgtactttttccgtaatgtatagtatacttcagtaaaaagttaatttgccttaggcaaaacagaaacccattatcttaggcaaggtttttcagtggcttcccatggtactcagaataaaatccaaagtccttaccatggcctgcatggcaatatatacatgatctagcccctgactacctcctccacgtaatttctcccaccattattccccttgcttactcagctccagccacgtgaccttcttactggtcggcaaacagaataaaactccattccactccaaggctgtgtttttgcttttccctttgcctggaatgctctcccctcagcttgttacattgttggtctcgtatcatacaggtaacagctcaaatgtcgcttcttcaaaaagtccttcacttaacactccatgtgaaatagatttcccagtcgctctttattatataacactattattttttcatagcatttatagctagctgaaattactttgtttatgtatttattacttgtttatcatctatcttcctcaatagaaggtaaactctgtccaaagactgaggtcgtgtctgctgtattcgtccttgtatctttaatgcctgacgcactgcctagcatgtagctggtgcgcatataaatgttagggttgaacgaatgattgaagatccctgggtgaatggtccactaggctatagctgggattcctcccacaaagggagacacttaagttgtaagtcatcctgttaaaaggaaagctttgttagtacaacctctcttgtccaccccacctcagcttggtgaggagaaagctcagcgctttccccagtgcttccatgacctttggccagtaaagacttaaaatatcatatcataagatgagagaaaccagttggaacttaacttctatcccgtatccttagattattcaaagaaaaacaaaacacggtcaacaggcagtggaactcctcactccaatgtgatattcctgagagaatattgacttatcgtcacttcgtctctgggacaagtattgaacataggggaagccttatataaaattgttcaataaacaaaagatgtctttaacatgtgtttgagatctttcttctcatgattccatgttaggtacaacaactatgaccgggctgtcatcaataccgttccttatgatgtcgtccatcgctggtatacagcacaccggactctaacgatagagttgaggagacctgagaatgagttttgggtcaaactaaagcctggcagggtgggtcctaatctctaaagatgtcaagcaagcttgtaatactgaagcagtgaagaacgggtacttacttaatatgtgagtcacgatgttgcaaaggaaaaagagaaaagagtccttggttttgtttatggtcctgccgcccactcactgaatgctctggaagcaagcctcatcccatctctaaggcatcagtgactctatttgtatgatgaaggggtttaactagatgacccccaagggtccttccagcttcatgattccatagtttttatttttggtatttcctctggatgaaaaataccttcagcttagcataaaatgtcatgagataatttaaccctttgagaaagggtagaataagaattaaagaaaaagaaaaagaaacaaaccaattatctgatttactttgataagagaacaattacttgagaaacagaagctcctccagtgcagggcccattacctactgttgcctctgtaacttccatttagcctactacagggctatacacatcttagtttccaaaagtttgtttaatttcaaaagaaaaatatctcatttaatgcaaccagaaaacaacctaaaggttatcttttaaatgatctcttctgacttagggttcctttggtctgtccttcttctgacagtgttttctctctstkttttttttttttttggcccattcacaggtcctatttatagacaactggcgtgtcctacatggcagggaatgcttcactggctaccgccaactgtgtggctgctatttaacaagagatgatgtattaaacactgctcgcctcttggggcttcaggcttaaaattgacagcatctggattatgaatacacctggcaccctggctaccagaatttcatatgggcagaataatattgtgtcaaactctacttcagattgtctccttatcccatcccacaaaacagaatctgtccgtttctctagtaagggagacttgttggagaggcgggactctgagttatctaatgtcagacatctagtggggcagctctcttcctcatgttataacatggatccacttgtttkatttaaaccttttaatataattttggtcagtctccttcagaaatataatctccatattgataggaaagcaataattgccatgaggtaacgatttttttcccaagtagatcagttagaaagaaatgcattctagaaataacaaaaatcctgataaagcaacaatttgcaaaatgtttggtcttaggacaccttaacactcttaaaagttattgaaggccccaaggagttcttgggtgtgggttctatctattgatactaattattttaggtattaagactgagaaatatttaaagctcaagaagaacacagaagcacacatccctcagctatgagagagatgacataaccatatgtcatgtagcctctggaaaagtcctctgtatcctcatgagataacgagagggggaaaaaaagctactactgcctttgtaacttccacttagcctactacagggctatgcacatcttagtttccaaaagtctgcttaatttcaaaagaaaaatgcctaattgaatgtaactcatcttggtgttattatacaaaataatttttaatctgcagacccacgaaaagggtctcagggactcctccaggggtcttcagaccatactttgagaacccatgggctagcgactaccttgagacagtcctttacctaggcctgtggattaaagggtttagctgaaaccctagattcttctctgtagtctaatagaactccaaacattgtaagaattgcttggtagcataagctcagggataaggtgggaattgagttcaaatatagtgttttatcttccacacaaatcatctctataggagttaaattaggaagtcacaacagcgcctgttgaacaaactcatcagtgtggtaatcctatgagggataattgcagaaaggttttagagacttgtgaggttccatatgataattctttacacctcccccccccaagagaaagtacacagggctattctgtaatattgttcagggaaatcagcatgatagatgctgtgcctccagagagttctctggagattactacccaaatgtgtattttggcaatttggtggtatttaggatgtaatatgttttcctccatttctgctaattttctctctctctctctcataacatactatacatgctaattgccaagatttgaatgagtcaaatttagtagcttgctgcttttattttttaaatggcttcttttacgtattggcgggggcgggkggggggggcagggtatgaggcttcttttccctcagctttcattgaaagtgaagctgtacaataaccacattgaccactgtagaatgatgaaagagaatataggctaggatgcacacaagaggggggaaaaggcattattagtgaagataggagttacaaagcaaagcaaagtcagtattcagatagagaatagagcctaatctgatgtttgcagggagttcctagatcacatttggcaatttacacattattttattgacctatccagtgctccaaaatgtgttccaaaatattttggcattttatttgtactayataggaatctttaggggagtccctgaaatttgttttcctcttaggtcaaaggactgataattaactttggttcttaaggagtatgccctttagcaataagaacagcaataacattttaccctgcagttttttctctatacctactattatgcactcctaaaatatgtcatcattagtcttcatgaggatgtttaccatttctgaagttttgcgtaaattagccttgaagattacactataactgaggtcatcagcattgacttatggccagcaaaggacatgctcatggccctggagagatgaggacacaaaacaaatcaatttccccacttactgaaggactccccttaccttctgtctctcctgagaccttgactcattaattattttactctcctttttggaaatttgcaaccggtccttctcaacaatgtgctccctttagtacactgaagaaaaagagaagggaattatttgagtcctgatcacgatgcattgaaaacttcctatgtgagatgtttctgtttttatatctcttccaggtgtccctgagtatataagcatgggtctatgtctaccaagctcactgtagagtcacttttaccttttgctatggtggaatgggatctgtagggtcaggaacacagcacctaacacagtgccttatggatagtagttttataatacagatgtgttggaagaataaatgaatgggtccttttcaaacaaattcaccagaagttaccacattctctgtatgtatgtcctttttcgtttggcatttagctgacactgacttttgtttgctttcatctagagtgaccaaccatcctcttgtgcccagaactacaggactttccattttaaaactaggagagtcccacacaaaccaggactgttggtcagtcaccgtaccttcttgctgctagatatgtaattttctttggttttcatcaccggttcccatttctttgaaagtgtttgtaggtcacacactgtgtagtccatgatgaaaagaacaaaagatgtatgaattatggtgtgttgtggtggttcccaaagtagggtccccagaccaccagcagtggcatcatttgagaactccttagaaatgcaaattttcaaggcccaccccacgcctactaagtaagaaactctaggcatgggtaccagcagtttgttttagcaagtcctctgcaggattgtaacacatgacaaagtttgagaactactgacaggaagagtcctgctgctgagttctaggcccagttctgtcactggctcactaaatgacttcaggcatgtccctctcctattttgaacttcagttttctcttctgtgaaatgaaagccttggactaggcagcgtctaaaggctctgtcactccgtaattgtgtgactttggtaactttgtttgacttctccttgcttaagttttctcatatgggtatggtaaggaaaatacctacctcacaggattttctaacaattttgtgattattaagtatgatgactgatgactaatatatgacagccagctcttacacagtgctttctatatcctggactgttgtaagtgcttttaatccccgcaacaatcccatctccattttacaaatgaaaaatagaggtcacacggctaatacgtgtcagagtttggattaaaacccagaaaaatctgtccccagagacaatgattttaactagcatgcccttttgctcaataaatgttaattccctcaccctttccacacacacacagtctagctgaccattcatagacaataatcccactttcacagtccatccaacaagatcttaaaagaaccatgagaatctctaggtttcttttgcaaatagttttcaagcatttaaaaaaaaaaggtggggggcggggagggagtggccaagatggctgactagaagcagctagggtgagtggttctcatggaggggaaggaaaggggcgagtaaatacagcgccttcaactgaaacatccaggtacccacattgggtctaatcaaggaaacaactcgatccacagagaatgaagaaaagcaaggcaggatgacagcccacccaggagcaacatggagacagaggaacctcctccacccagggaagtcgtaagtgaatgtgcgatcctgggaaaccacgctcctcccatggatccttgcaacccttgggtcaggagatcccctggtgaacccactccaccagggccttcagtctgacacacagagatacatggagtctcagcagagtagccgcttgagcacgtgcagagacccagcagctttacatactccggccctgggtttcccagcaaaagtaactgcaactcctgcaaagcgggagattagacccctgtacatacccctaggaaagaggctgaatccagggggccaagcggcacgatctgcgggccccacttccactgcacctcacaggataagacccactggtttggaattccagccagccaccagcagcagtgttgcacctacctgggacrgaggtcccagggggaagggcaggctgctctctgggacagagctcccagaagtggtaccccagaacagcacagcacagctgctcttcagaagcatggccagactgcttctttaagcaggtgcccaatctgttcctcctcactgggtgggacttttcaaccaaggcctccagcaacccctactggtgttctctggctgacagagatttgaattctccctgggacagagttcccggagggagggaggggccaccatctttgctgtttgggcgacttagctgttccggcctccaggctttggagagcccacaccaaccaggggtggaagcagtgccccagcacagcacagctgatctgtgaaagcatggacagactgcttctttaagcagttccctgatcccgttcctcctgactgggtgagacctcccaaccagggtctccagccttgtcctgcaggcgcatttgggctggcaacaggtctgtacctcgctgggccggagctcccagaggaagaggcaggmtgacatctttgctgtttcacagccttcactggtgatagctccaggtactggaaaatccaaggagactaggaactggagaagaagcccagcaaagtacagcagccctacagaaacatggccagactgttaaaagaaaaaaaaaatccaaaggtcagcaacctcaaagactgaaggtagataagcccacaaagatgagaaagaatcagtgcaagaatgctgaaaactcaagaagccagagtgccctctttcctccaaatgactgcatcacctctctagcaagggttcggaattgggctgaggctgagatggctgaaatgacataagtagaattcagaatatggatagaaatgaacttcactgagttaaaagagtacattgtaacccaatgcaagcaagctaaaaatcatgataaaacattgcaggagctgacagacaaaatagcccatgtagagaagaatgtaaccaacctgacggaactgaaaaaacacactacaagaatttcataatgcaatcacaagtactaatagcagaatagacaaagcggaggaaagaatttcagagcttgaagactggctttctgaaataagactggcagacaagaatagagaaaaaagaatgaaaagcaatgaacaaaacctccgagaaatatgggatcatgtaaagagagcgaatctaagactgattggtgtccctgaaagagatggggaaaacggaaccaatttggaaaacgcatttcaggatatcatctatgagaaattccctaacctagctagagaggccaacattcaaattcaggaaatccagagaactccaggaagatactccacgaaaggaacatccccaacacacataatcatcagattctccaaggttgaaacgaaagaaaaaatgttaaaggcagctagagagaaaggccaggtcacctacaaagggaagcccttcagactaacagtggatgtctcagtggaaaacctacaagccagaagagattgggggtcaatactcaacattcttaaagaaactccaacccagaatttcatatctggccaaagtaagcttcacaagcgaagaagaaataagattattttcagacaagcaaatgttaagggaatttgttaccaccagacctgccctacaagagctcctgaaggaagcactaaatgtagaaaggaaagatggttaccagccactccaaaaacacactgaagtactcagaccagtgacactacagagcaaacatgtaagcaagtctgcaaaataaccagctagcatcatgatgaaaggatcaaatccaaacataccaatactaaccttaaattgtaaatgggctaaatgccccaattaaaagacacagagtagcaagctggataaggaactaagatccaatggtatgctgtcttcaagagaaccatctcacatgcaatgacacacataggctcaaaataaaaagatggatgaaaatctaccaagcaaacggaaaacataaaaaagcagcagttgcaatcctagtttctgacaaaacagactttaaatcaacaaagatcaaaaaacacaaagaagggcattacataatggtaaatggttcaattcaacaagaaaatctaactatcctaaatacatatggacccaacacaggagcacccagatttataaagcaagttcttagaggccttcacagagacttagactgccaggcaatgatagtgggagactttttaacaccccactgacaatattagacagatcattgagacagacagttaacaaagatattcaggacctgaactcagcactggatcaaatggacctggtggatatctacagaactctccaccccaaaacaacagaatatacattcttctgatcaccgcaaggcacttactctaaaatcgaccacataatcagaagtaaaacactcctcgacaaatgcaaaagaactgaaatcatgacaaacagtctcttgggccacagaagaatcaaatttgaaatcaagattaagaaattcactcaaaaccatgcaattacatggaaattgaataacctgctcctgaatgacttttgggtaaacaatgaaatttaggcagaaatcaagaagttctatgaaactaatgagaacaaagatacaaagtaccagaatctctgggatacagcaaaggcagtgttaagaaggaaatttatagcactaaatgcccacatcaaaaagttagaaagatctcaagttaataacctaacatcactactaaaagaactagagaagcgagagcaaacaaatcccaaaactagcagaagacaagaaataacaaaaatcagagctgaactgaaggagacagagacatgaaaaacccttcaaaaaatgaaagaatccagaagctgttttttttttctttgaaaaaaagtaataaaatagaccgctagctagacgaataaagaaggaaagagagaagatttgaataaacacaatcagaaatgataaggggaatatttatcactgaccccacagaaatacaaacaaccaccagagaatattgtgaacacctctgggcacataaactaggaagtctagaagaaatggacaaattcctggacacacacacctccccaaggctgaaccaggaagaaactgaatccctgaacagaccagtaatgagtttggaaattgaggcagtaataaatagcctaccaaccaaaaaaatcccaggaccagatggattcacagctgaattctaccagatgtacaaagaggaactggtagcattcctactgaaactatttcaaaaaattgagaaggagggactcctccctaactcattctatgaggccagcatcatcctgaaaccaaaacctggcagagatacaacaacaaaagaaaacttcaggccagtatccttcatgaacatcaatgcaaaaatcctcaacaaaatgctggcaaactgaatccagcagcacatcaaaaagcttatccaccacgatcaagttggcttcctccctgggatgcaaggttggttcaacatatgcagatcaataaatgtgactcatcacataaacagaactaaagacaaaaaccacatgattatctcaatagatgcagaaaaggcttttgataaaattcaacatcgcttcatgttaaaaactctcaataaactaggtattgaaggaccatgcctcaaaataataagagccatctgtgacaaacgcacagccaacatcatactgaatggacaacagctggaagcattccccttgaaaaccggcacaagacaaggatgccctctctcaccactcctattcaacatagtattggaagttctggccagggcaatcaggcaagtgaaagaaataaagggcatccaaattggaagggaggaagtcaacctatccctgcttgcagatgacatgatcctatatctagaaaaccccgttgtctcagccca

SEQ ID NO: 94594 - DNA, 122027 bp, Homo sapiens
  misc_feature (1)...(122027): n = A,T,C or G
nnnnnnnnnnnnnnnnnnnnnnnnnnnnnnnnnnnnnnnnnnnnnnnnnnnnnnnnnnnnnnnnnnnnnnnnnnnnnnnnnnnnnnnnnnnnnnnnnnnnnnnnnnnnnnagcgagactccatctcaaaaaaaaaaaaaaagaaaagaaatgaggcctcactatattgcccacgctggtctcaaactcctgggcttaagtgatccacccaccttggcccccgcaaagtatggaattataggcatgcaccaccacacccagctcccactcctgtttcaaagcccacttgcccaagtctcatgcccctaaagcctgtgggagatacctcaccatggctgcatccctttatcatggtgccaggtccataccagggctgacgcccacaagctggggcagaggaagaggaagagcctcctcaccacttttagcctcccaaagtgctagggttataggcatgagccactgcagccggcccaagaatttccttttttttttttgagatggagtttcactcttgtcatctaagctggagtgcaatggtgcgatcttggctcactgtaacctccgcctcccaggttcaagtaattctcctgcctcagcctcccaagtagctaggattacaggcgtgcgccaccacgcccagctgattttgtatttttttagtagagacgaggtttcaccatgttggccaggctggtctcaaacccctaacttcaagtgatccacctgcctcagccctacaaagtgctgggattacaggtgtgagccaccatgcccggcccagcccaagaacattttagagtgttagctattaagaaataataaagcaggcctacactcctagccttagggcagcccctcagctgctctgtaagggccccctgaacatcatttccctcccaacagagtcctgcggcctgtgttctctgcaccagagcttaaccttggccagccttccatagcacatctcagcccctctgtctggcttcagctgctgctgcatcctcctaggagctcagctaagtttcccaagctccccagatctcaggaatcaattgagtgcttgctaaaagaaaaaaaaaaaaaagcattgaaaagattactaggccccaccccaaactgactgaatcattatccacaggggtgggtgtgggtccaggaatctggttttgtttttatttttatatttatttatttatttattatttgagaccgagtttcgctcttgttgcccaggctggagtgcagtggtgcgatctcagctcactgcaacctctgcctcccgggttcaagtgattctcctgcctcagcctcccgagtagctgggattacaggcatgtgccaccacacctggctaatttttgtatttttaatagagacggggtttcaccatgttggccaggctggtctcgagctcctgacctcaggtgatccacctgcctcagcctctcaaagtgctgggattacaggcgtgagccactgtgcccggccttggttttgtttttaaagggccctggaagagtcttaccatccaggaagcctagatagtatttctctagcctccctgtgggtcttcatactgactccattagaaccacttggagagcttctaaaactagcactgcagtgcagggggtcttgtttctgaaacaccagggcctccatctaggtcctgctgctttctccacagaaagctaatcactgagacaattattgccaaggaagaaggctttaactgagtgctacagcctaggagatagaagatcagtctcaaatccatctccctgagtgactaaaattaagagttaacacagagggaagaaatgtaacaatgtgtaaaaaaacaagaactaggggccaggcatgatggctcacgcctgtaatcccagcactttgggaggccgaggtgggtgggtcacgaggtcaggagttcgagaccagcctgactaacatggtctactaaaaatacaaaaattagccaggtgtagtggtgggcacctgtaattccagctactcgggaggctgaggcaggagaactgcttgaacctgggaggtagaggttgcagtgagctgagatcacaccattgcattccagcctgggcaacacagcaagactccgtctcagaaaaaaaaaaaaagaaaaaaaaacaggaactagggagaagtaaggaagcaagcagggtgaaagtgggttctggcatcttgttgtctggatgccttgatctggtgagtttcagttctctgatacttttttttgagaggcctgagtgtcctttcctgaggaaggaactcagataaaacaaatgtaagtttcaagctttaagaccaaaagggtccatttctatgtttattaaaaaaaaaagtctatgggactattgggtcagtttcagtctcagtccctagagatggattgaagaggcaaaggtgactcaggtattctgctgatgattctaagacctctgagttggtggttaatatgcataagagcaatgggatggggctcaggaatctgtgtttcccaccttgtccccaggagattctgttgctagtggcacagaagcctacgctgagaagtactttttctttttctttctttcttttctttttttttttgagacagagtttttcactcttgttgcccaggctggaatgcaatgtgcaatcttggctcactgcaatctccggctcctgggttcaagcaattctcctgccacagcctccctagtagctgggattacaggcatgcaccaccacgcctggctaattttgtatttttagtagagacagggtttcgccatgttggccaagctggtctcgaacacctagcctcaagtgatccacccacctcggcctcccatagtgctgggattataggtgtgagccactgcacctggccaatttttattttttgagatggaggtttgctctgttgcccaggctggagtgcaatggcgcaatctcagctcactgcaaccaattttcctgtctcagcctcccgagtagctgggattacaggtgcccaccaccatacccagttaatttttgtatttttaatagagagggggtttcaccatgtttatcaggctggtcctgaactcctgacttcagatgatccacccacctcagcctcccaaagtgctgggattacaggcgtgagccaccgtgcccagcccattttttaatttttttttttttttgagatggagtctcgctctgtcacccaggctggagtgcagtggcatgatctcggctcactgcaacctccgcctcccgggttcaagcgattctcttgcctcagcctccccagtagctgggactacaggtgactgccaccacacccggctaatttttgtacttttttagtagagacgaggtttcaccatattggccaggctggtcttgaactcctgaccttgtgatctgctgcctcggcctcccaaagtgctgggattacaagtgtgagccacggagcccggccccattttttaatttttaaaagacagagatgaggtcttagtgtgttgccaatgctggtctcaaattcctgggctcaagtattcctccctactcagcctcccaaaggtgaactgggatcttaatccttgttctgttactaaaatagctgtgtcggatccaacccaaggttggagttcttcaggacgggtagaaggaatgacagggaagttggagtgagaaactacttatacaagaagtctgagagaagagtcagatctctccaggctcaataaacaatttctagttagcaagatgttctcatagtctttgattctcctttttggaagcaggttattttttctctttgcccttatcaccatctgatgtactatgtattaatctgggccgggcgcggtggctcacgcctataatcccagcactttgggaggccgaggcgggtggatcatgaggtcaggagatcgagaccatcctggctaacaaggtgaaaccccgtctctactaaaaatacaaaaaattagccgggcgcggtggcgggcgcctgtagtcccagctactcaggaggctgaggcaggagaatggcgtgaacccgggaagcggacttgcagtgagccgagattgcgccactgcagtccgcagtccggcctgggcgacagagcgagactccgtctcaaaaaaagaaaaaaaaaaatatatatgtttttttttttttttttttttttttcctccagagaacagaacatatagctcaggctgaacagtgcctggagcggtgatagacatgaacaccggcatgtagcacaaaaaaacagaggtagagtttccactcttccctcgcgatcgtgaatcggagcgttcacgagtagggtaggcttgcagacacgggacaatcaacacacaccacgcgatgggcagagtcacactgacagcgcagcacgtcgcacttgcgaattagnnnnnnnnnnnnnnnnnnnnatatatatatatatatatatatatattaatctgtctgctctcctttgaaggcaggattttggtttgtttggtcactcccttatcccctggttggcacagaccccagtttacgcagcggtgaatgaaagtaaaaatctcgggacccccccccagcgccccaattcatgcgaaagtgaagattaagccttgaagctgagtcactgcaacaccctcttccaaaagaatagctgttactagcattaggcatcagccatatccacacggaaaggtaaaaacctcaggcatttgggaagggctgcccccacagatcattcacaagtaaattcttgctggcctcccataaacaaggacaggtcaattgtagcttcaggtctacaatctaagtctagctcctaaaaattccacaataagaatgtcattacaagcttattttcccaggtgcagaacaaagtcaaaactacctactcagagacatctgcataactgactcttcctttactctctttttctcttcagacattcatctcatcttacgtagatttaccgggcattagctaaagtcccataggaatgtaactattgtcctaatcgcctacttgcccttcttcctacatgccttcccctcattccccctttaaggaaatgcataaatactaaacctcccgaaaacctcttcggaaaaacaaccacggatgtgtctgtggttcgtgtttttcccgagcacgccctcaaactggattaataagcctcgatgacagagacttatgcctcagtcacttgttccacttgtcaaagctttcctctttgacaagtgtcttgggtcttgtcaagtgtcttgtgtctcaaacaaggcttccaaaccccctaggtcctgagtagcttcgctctgcagatgacaaaaccgagactcagaggttaagttgcttgcccaaggtcacacagacgtactgtagacccccatcatcatctacgcagctgttaaaggacatagtcatgtaacccgtgtggcacaagcgccttctccttcctcctgcccttcgctaacgttagcttttcctgcgacctcttctccgctagccagcgcgtatctgcgtctagccgggatgcctgagccccagtgcgaactgttgtgcttgcagcttcgggagacacgtgctactcgggtgaatgaatcgaacgtccccacccccgccgacagccaataactgcgagccacagcccggccacttccgcctattgcgggcgtcggctagggtccggcggcccacgtgaggctccggagacaagggagtaggcggtggtgcgccaggggcgggctctcccagcctcgccacttatccaggcgctcgccggggacgggaggggcggggctgacgtggggcgccaaggcttaaacgtgacggacaggcgggcacagggaggagtccagagcctaggggcgaggagtgacggagaacactgcccaataacgggaggggttgggctgtctgggccaataggaagtccgtaaggcggggccgggactgcagcaagttcggttgcacggagaccgcagctgttctctgtcagtggaggcagcagcggtagaggcggcggcgaggactggcgacggcgaggaggtgagtgtccgccgcgctccgcacggtcctcttcccgcggcgggtcggagcgggtggacgtgcgccggcaccgctgcgagggacgcttatgtaagggtcgcgcgcgcaaaggcggcgcgggctccgcgagtgacggctggaggagacagcgacgggctgtgcgcggtgcgcgacgcgacgcagcggacggcgcccctccccctcgcgcgggggctcggccggctggacccgcccccggacccgcccccggctgcagcccccgagcgcccctccgcagcgtccgcctgcgggctgcctcattcttgctctcgggcccattttgcagatggagaaactgactaaagcgcctcgcgcgaggtccctgagggttcgaacccaagtctgtcaggatcgggagcccaagttgtccccatcgtactggatgtggctcagctctgcaggaagccgcggcgtgtaaggcgagggctttccttgttccttgctctcgcactccgcctcccgtaggatcctctactttgtttcagacggggaagctccaggcgcccagacgcagtgattcgcccaaggccgctcattcaggaggtggggctgggctcagccccttatttctccagcttttagtagtttacaaagcgcatcagagtcggaagccaagtccctaggtccctggcaactttgagattcttttgttttcttttcttttttagacagggtcttgctgtcacccacccaggctggagtgcagtggcgcgatctcggctcactgcagtctcgacctcccgggctcaagcgaccctcctgccacagtcccccagtgctgggactacaggcgggcgccaccacgcctagctaatttttgtattttttggtagagamraggttccgtcatgttgcccaggctggtctcgaactcctacgctcaagcgagcggcctgccctggcttcccaaagtgctgagattacaggcgtgcctcgtctgaaattctaaaaaatcagattgtgtctttattttgtgagaagaggtaggcctgggctccttacccgttctccagctgagaaaacaggctcagagaagtaccaacacttgctgatgacaaccagaacctccagagtgcctgccatctgcctccctattgctcccgtacccactgccaccatcagccctggctggcctcccccaaggcaccctttccctgtatgtgatgcaaacacttgtgctgggggtggatgtgctcagcatttctctcacttgcagctacagcttcctgcctgcaggctctccttaactgttgaactcttaatcacattcttttgcacacctacagtgttcctatccctacactgggccgagagacagcgtgggcgatgaggtcaatccttgtcctgcaactgctgacaaacccattgggggagagagaaaataaacaaaacctaagcagcaaggcagcctgctgcagatgtttgtagagagcctagtgggtgaggtattggccctaggaggacatggaagaggaagttcagtagaggccagtaaatcacagcaaaccacacactaaagcgagagagaggagaaatggcctggaaggggatgggcttgggaaggcttcgtggaggaggtgagttgtggacctctttttgatgccgctgcagtggagaaacagtgattggatttcagcagctagaaagttttattctggagaggttttgttaaagaggtttttttgtttttgttttttgagatggagtttcgctcttgtcgcccaggctggagtgcagcggtgtgatctcagctcaccacaacctccgcctcccgagttcaagcgattctcctgcctcagcatcctgagtagctgggattacaggcgcatgccaccacacctggctattttttgtatttttagtagagatggggtttcaccatgttggccaggctggtcttgaactcctgacctcaggtgatccgcccacctcgacctcccaaagtgctgggattataggcatgagccatcatgcctggccagttacagaggtttcaagcaattagaactggaagaggaaggctgaggaaggtggaaggagaatgtgggggaaacagcttcactgttgggtgtaagaaacttgattggtcactgggaagaggcctctacaggagatgtaaccaggtgagggcactaggatttgctaaggtgcaggtaagtcagtgactggaaaccaaactgaggaagcaagattagatgcaaaggtagacggggctgggcgcggtgctcatgcctgtaatcccagcactttgggaggccgaggcgggtggatcacctgaggtcaggagttcgagaccagcctggccaacatggtgaaaccccttctctgctaaaaatacaaaaactagccaggcctggtggcgggcacctgtaatcccagctactcaggaggctgaggcaggagaattgcttgaacctgggagttgaaggttgcagtaagctgagatcacgcccctgcactccagcctgggcgacagcatgaaactccctgtcaaaaaaaaagaaaaaaaaaagcccaaaaggcagacagggctctgagggcccagctgcaggcctgagctgcagattgtgtcccatggtgttctggtaagctccctgaaagcagccgtcatttgtttactaatggctccttcaccctgctgtgccctgctcttagggaaggggctttgttcactacagttgctcagtatctgctttttgaattaattaggctgtcatccaaagtttcctcagtttaccccaatgtaccctcatgtgtcataacgccttctgtctttctactgaagcccgctgcagcctggctgactcggttccctgtgccagtcctcacctccaagatctcccctagaaggttgtccctggtagcccacagtaggtcccccaggcccttttcccttttttgtcctgctccttgctttcacccggtctcacttccagtgccccaggcactgtgataggtacctgtcctcccaccaccactcatgggggctctgggaccagtggcagggcaggacctcagattcactactcttatcccaagccacagttccctgtgtccctcttccctctgtcctctcagtacctaatagtgccaggaacaagtaggtgcctaatgagtgttttgggtgaattagttgaaaaggggtcaaactgggaaccagtgaggagagaagggtgcaagatggggaatacggaaaggagttacttttggaggtggcagggatggccagcaccaaggtcagtatggcagtaaatctggcaatccacatttctcactggcaccttctgcatgggctggaggcctcgttcaggtcaacgttttctgtgtttttttttttttggagacggagtcttgttttgttgcccaggctgcagtacagtggcaccatcttggctcactgcagcctctgcctcccggattcaagtgattctcctgcctcagcctcctgagtagctgggattacaggcaccaaccctttgcctggctaatttttgtatctttagtagagatggggtttcactatgttgggcaggctggtctcgaactcctgacttcaggtgatcacctgccttggcctcccaaagtgctgggattacaggcgtgagccactgcacccggcctctggtcaacattttcattgaggatgagcatggccttctctttggctgcctcccaatatcgtcctgcccccatctgaatgggccccgtttcttgtatcctgaaagttcctgctttggggcaggtttctcacccagaggcctccttcacagcagcagggcattttgcctgctcactctgaaacctcacctgggcctgactgaccgtgccttcctctctttctcttagctgccttctagtctcacctgtggacactttgccaaaggagtcgggcctgacggtggaagatgggaaatggccaaaagaataaaccatttcctcttacttaccgaatgaaaagcttgcttcatcttggcgttcaagactctctaatatgattccacctgttgggctctttcttccatttgcctccgcaggtaccctcttctgtgtcagcccccatagtgagattagtcactgttaccccaaactcacttctcacggtcccccctctgctcttgttcttgttgactttgttttctgcagggccttgcttcttatcttgtcctgtcaaaattaaattattcttcgagacacaggactttattaaggcttgccaaatctattcagttggactgggctctcttttcataacgatgatgataagtaatgatttattgttattaataataaaagtcaactactgtgtggtggtgacggccttgctaagccccttacatacacataatgtgattatcacaacaatcctattacgaaggtcctattagatccatctcttacaaatgacggactctcataggtgaaactcagagaggtgaaataacgcccagagtaacacagccaggcaggctaggtggctcactgctggagtccctctcacgtgccatcccatttttgcttcttttaaccagcccctaacaacttgctttttggcactttgtgggcagggcctgagtgtacatacagttccttgtgcaaggcatgtgctcaataaatattttattgacttgagtgccccagacattgaatttcagccttgacgttatctgtcaaggcagctggttttctctgaacagggatttgagcttgctggcctgtttttccattytgctgttcattgactagtggctagggtaggtgtggctttttcggaaataagcagtcaataaaactccgaaaagtgattacacaataccaactgtgggctcccatgggcataaacacgaggtgggctcttacttatggcagagaggggtctctgcaggaaaggatttgaggaaatagccaggaaatagagtacacatctcaggtcacgtaagacagctccttattagtttcaagttgtggagtgagagaagaaccagactcccagtattcagagggagctcctgaaggattagagacagctctgcggagatgcagagaaagcgggcctgaggctggacggagtgggcaggaagagaaagcacttcagataaaacgaactgtttctagaacttcttgttcatgtgtagtgggtggcagaaaagggttttacttaagcgcttcccacctagcctgtcggttaacgtcccagtgtgtcctctgtgccaggcatggtgccactgctgtgcgtgtgctgcctcattgggtattccctagtacgctgtgagatgggcattgttattattcccattttacagatgaggaaacagactttgagtgattacagagcggctgtcagagtaacaagaggtgcagtccaggcagtgggacagcacagctggcgcttccagctctgtaccctcctggtgccctcagtggaagcaaagaaacagttcttggccgggtgcggtggctcacacctgtaatcccagcactttgggaggccgaggtgggtggatcacctgaggtcgggagttcgagaccagcctgaccaacatggagaaacccccatctctactaaaaatacmaaattagctgggcgtggtggcacatgcctgtaatcccaactacctcaggaggctgaggcaggagaatcgcttgaatccgggaagcagaggttgcagtgagccgggattgcgccattgcactccagcccgggtaacaagactgaaaaagttctctgggttctaaaatcggtgttcttgccactcctgttttctctgggaagttcctggagcaatgagggtaatgctgttttttcttttgctttagatagtgtctgccttctggagagctgaccaaacactaagggtaagtcctgtgcctgaatccaggctggcgggatgcatgggggtcttcaccaggagcagctgtggatgccagcagtttggcatgtcaggtcttaagctcaatcaataaaaaaaggctgcgctctgatttgtggataatatccgtttaagcagtcttgtctgtttccagttgctcctgatttttacaggaaagtgacatctggctccctgctggccccatttggcagctggccagcctcagcagaaggccctggttctggaagggtatggtcagcttgggaagctgggcaggaagaatccctggggctgggccgtctctgagaagaccccttgagtcagcatggagagcaggcagctgtggtgtgaggtggttctgccagctggttgtaaagtcacttgacacgggtttccagagggtgacgctcaacctttgccagtcacggtaacaacggggaaaaagggacctgcccttcttcccctgcacattttacaggcatgtgccaccacacctggctaagtttttttttttcttttttttttttgagacggagtcttgctctgttgccaggctggagtgcagtggcgcaagctcggcttactgcaacctctgcctcctgggttcaagcaattctcctgcctcagcctcccgagtagctgggactacaggtgtgtgctgccatgcccagctaatttttgtatttttagtagagacggggttttaccatgttggccaggatggtctcaatctcttgatcttgtgatccacccacctcagcccctcaaagtgctgggattacaggcatgaaccactgtgcccggcctaatttttgtatttttagtagagatgggattttaccatgttggtcaggctggtctcgaactcctgacctcaggtgatccgccctcttcggcctccccagatgctgggattacaggtgtgagccagcgcgtccggcctctactgcttttacagttcccccaacatggatttccatggtggcaggtgcctgggagattcagtggcctcccctcagcctaaattccacagccctcccgccggtcccctgctagtccagtcccctctccccctgctggtctgcaggagcagccgagccagggaaccaggtgctctcccagcatttgtgacaacaataatgctcttcccttcaggcccgctgtggccttggggactttgtggctcagggacaactttctccagagctcatatccagtgctgagtggggattccttggtataggagtttttctcggttttccacccattatgtgggggttttcctctgacgacccttcatgacgcaggagctggtttcctgtgtgagatttcccgcagtcctcccttggagctaggtcttgggccagcaggtgccgtctgcgtgctaccattgagtaagggcaatgggctcatggtgggaatggccgtaacgtggaagaactccaccctccacgartttcacccccttgttctctctctgcttgctctgtcctcttattcttggctgctagagttggatgttatttctcttacttgcatccctacaatgagaggtgggcatgttggggaaggttccccccaaaccacttgtcttatggaactgaagaaactgaagcctagagaaggctgcttagcagaatccaagatgctgatcccattgtttattcttcttttaaaattgccatattttattgatgtcttcccttagatccatcaatagagagggaaaatcagtcaccaagaagggacctcttcttccaggttatgtaatttgtcaaagcttgtttggctcctcagttcccaaggcactgctgacttgagctttgcctagggactaaggctctgtagtctaagcttgtcaccctcccctcctcttcagctttctcctggggggacatggatgtggccctttgttgtgttgttaagtgttatgcctgaaggcgttaccccaggtactcccagcactacctcgggtttcctactcttgtgttacctccttgtcctgatatgcctcgaggccagagaaagaggtggggccgggagggcacgggacagctgggagtacatttccactgcctgtgtgtggaagggcctgactgcttctgtggcagctcctttcctgatgacatccaccatgacatcacaacgaggctttgggaaaattccacgacctggccatgctgagtcatacttagtctctggggatgtgtgtcacctttctcttgtctgtcactgagtgctgcagttactatgaagtgacacatgctgcccatttattacgtttgcacatcactttatgctgctttggagcctcttctcatgtacatgctgtgtatcaatgtgaaatgtattaatattaaatcattaataataagtatattatttattctggaaaatatttgtctcttgcaatgtgtgaggaaccagaggttcagagagactagagactaagcgacttggtgagtttcgggtgactggtgcgtggcatgtctgagggaggtttggatgccacacccactcctacccctggatttttatgtaatgcaaagattattcagaaattactttggtcgaaaacaattgattttcaatttgttaaaattatgaattcagaaacctagttattttaagggccagtcttttaagtttagcttataagtgtagcctataaatctttctgatctatttacgattctaggacattttaacagtcactttcagggggcttttatttatttattttttttgcgatggagtctcgctctgtcgcgatctcggctcactgcaacctccgcctcctggttcaagcgattcttctgcctcagcctcctgagtagctgggattacaggcgcccgccaccatgctggctaatttgtatttttagtagaggcggggtttcttcatgttggtcaggctggtctcgaactcctgactcaagtgatctgcccgcctcggcctcccaaagtgctgggattacaggcgtgagcctgccgccccggccttagggggctttttgattaatgcttggtcccatttgcaaatttgatgaaacttctgaaatgtttcaattgaacttataaatcatattcaacttcagttaactattttaataattcttctggccgggcatggtgggtggctcacgcctgtaatcctagcactttgggaggccaaggcgggcagatcacgaggtcaagagattgagaccatcctggccaacatggtgaaaccctgtcgctactaaaaatacaaaaattagctgggtgtggtggtcacgcgcctgtaatcccagctacttgggaggctgaggcaggagaatcgcttgaacccgggaggcggaggttgcagtgagctgagattatgccactgcactccagcctggcgacacagcaagactccatctcaaaaaaataataataataataaataataataataattcttccatttttctgattaaaaaaaccctctaatacctaaatgactcttgtaaatctaataaatgaagctgaatattacacttttcttaaactttcctataccgttttatgttttgtttgtttatttttgtttattttgagacggtctgattctgtcactcaggctggagtacagtggcacagtctcagctcactgcaacctctacctcctaggctcaggtgatcttcccttttcagactcctgagtagctgggactacaggttcaagccaccacacccggctaatttttgtactttttgtggagacggggtttcaccacattgcccaggctcatctcgaactcctgagctcaagcaatcagcccgccttggcctcccaaagtgctgggattacaggcgtgatacattttagtttttacaatagctttattggagtattactgagatataataagttgcacatatttaaagtatacagtttagtaagttttaacatatgtgtacccttgtgaaaccatcactgcagtccagagagtgaacacattcatcacctttggaattcctccctctgcctcctcactcttcaggaaaccatggaactgctttctgttactataggttagtttccattttctggaatttcacataaattgactcatacagtatatattcttttttctctgccttcttttactcagcataattatrttgagatatgtccatgttgttgcttgtattgatagttcatttccttcttttttttttttttaagacagagtcttgctctgtcacccaagctggaatatagcggcgtgatcatagctcactgcagccttgatcttctgggctcaagtgatctcccatctcactgagtagctggaactacaggtgtgtgccactacgcctggcatatctatctatctatctatctatctatctatctatctatctatctatctatctttagtagagatgagatctcggtatgttgcttaggctttttttttttttttgagacggaatctcactctgtcgcccaggctggagtgcagtggcatgatctcggctcactgcaacctctgcctcccgggttcaagcgattcttctgccttagcctcccaagtagctgggactagaggcgcccaccaccacgcccagctaatttttgtatttttagtagagagggggtttcaccatgttggccaggctggtctcgactcctgacctcaaatgatccaccccacctcagcctcgaaaagtgttgggattacctgcgtgagctaccgcacctggcccttaggcttgtcttgaactcctgaactcaagcagtccttcccactttccaccttggcctcccaaagtgctggggttacaggcatgagccactgttcctggtcagttctttttttttttttgagactgagtcttgctctgtcgcacaggctggagtgcagtggcacgatctcggctcactgcaagctccgcctcaacctcccgagtagctgggactacaggcacccaccaccacacccagctaattttgtttttgtatttttagtagagacggggtttcactgtgttagccagaatggtcttgatctcctgaccttgtgatcctcccgcctcggcctcccaaagtgctggaattacaggcatgagccaccgcacccagctttttttttttgctgatttcattatatgggtattacagtttatccagtcacctttgttggtcatctcaggtgcttctactttttggcatctacaaataaagctactgtgaacatttgtgtataagtctttgtgtgaacatatatttccttttctcttgggtaaatgcctaggagtggagtggctggatcctgtggtagctgtatgtatgtttaacttgaactgccaaattttctgacgtggttgtagtattttacattcctaccagctgtgtatgagagttccagtttctcttcatcctccccaacactggctatggttagtcttttaaattttagccatttaaaaaggtatatggtggtatctcatggtttcaatttgaattttcctaatgataatgatgttgagcatcttgtcatgtgtttgtcatctgccagtactgattttaaacttagtaaaatttctatgtaaaatcacacgtctaaactaactactcagttacatgttttttgttttgagacagggtcttgctctgtgccccaggctggcttgcactgatgcgatcgtggctcactgcagcctcgacctcccatgctcaagcgatcctcccatctcagcctcttgagtagctgggaccatggcatgcacgtcatgcctggctgatttaaaaaaaattttttttttgagatggagtctcactctgttgcccaggctggaatgcggtttcatgatcttggcctacttgcaacctccgcctgctgggttcaagcaattcttctgcctcagcctcccgagtagctgggattacaggcgtggcccagctaatttttgtatttttagtagagacggggtttcaccatattggccaggctgatctcgaactcccgaccttgtgatctgcccgccttggtctcccaaagtgctgggattacaggcatgagccactgcacctggccttttaaaaaattttctttgtagaggtgggatttcactgtgttgccagggctggtctcaaactgctatcatgcgatccacctgcctcagcctcccaaaatcatgtggttacagatgtgagtcaccacgcctggcctcagttacatgttttaattggaatctcaagactgatttgttattctaaacagaccatattctcttagagtacataaagtaacagacaacacacagatttcttttttttttttttttttttttgagacggagtctcgctctgtcgcccaggccggactgcggactgcagtggcgcaatcttggctcactgcaagcttcgcttcccgggttcacgccattctcctgcctcagcctcccgagtagctgggactacaggcgcccgccaccgcgccctgctaattttttgtatttttagtagagacggggtttcaccttgttagccaggatggtctcgatctcctgacctcatgatccacccgcctcggcctcccaaagtgctgggattacaggcgtgagccaccgcgcccggccagatttcttaacacaaaaatataaatactatggtttttattttcctagccttgtctatatttaatctaatattttcctggaattagagaagcttacctaataaggaattaaatacatgattttaaagtatagtaaattatttttctaattaacttttggcctttctttctcaactggatgacattttctttataattaaagagacccctggcagggatgaaactggactttgaatctaactgctaagcagagcctgctccactgccaccattttgcctccaaatggggatggtctcacagcccatgtgcctcaaatagaagtatcacattactaatgtcttcctcttctcatctcatgtaactctgcagttccgacccgcccccccaaaccatttgaattcagttaatctatttaaggcttcctttttgttatgcagtatggccacaaaaataggtggaactaaatacaaaatagatacagtttagattctttagattctctgtatctcccaaggctttctctgaccaaggactagtaaaatcatgtctgacccaccagggctagaatttgagtcccagtcttctgagtccatgtctggcatttccttccatctcttaaaccttttcaaataaagagaaagagggtggtacttaagagttcttactttctgatcacgcctggttaccaataaattatagcatctggaaccagtgccacctttttcatgttcttcagttcacgcccctggaaatggtgagaattttggcctctccctaacctcccggtggagagctaccaatctttggagagcccattgccatcaaattcttgttagaaatctgcgtcttggatgataactagatgcagaattgcattcctgtcctggtcactgggtatggccccaggaagcttgtaggtggtgagtggacctggttgagaattattaatgcagtttgacctctccgttgatgtctgatgcacatgtggcccaatgtgagtaagagcagaggtttgtagagtgacaagaaaaggacatttgggggagaaattggcaggaggctgacttaggtttttgcgctgcaagagtttttcgtcccccattttaaaaaattgtggcaaaatacattgtcttcatccctttgggctgctataacaaaataaccttattctaggtaatttataaacaatagaaatttatttatttattatttttatttatttattttttgagacagtcttgctgtgtcacccaggatggatgcagtggtgcaatctcggctcactgcaacccctgcctcccaggttcaagcgattctcctgcctcagactcctgagtagctgggattataggtgtgtgccaccatgcccaactaatttttgtactcttagtagagatggggtttcaccatgttgggcaggctggtctcgaactcctgacctcaagtgatccgcctgccttggcctcccaaagtgctgggattacaggtgtgagccattgcggccggcctgaagttgttttttctgagacggagtcttgctctgtcacccaggctggagtgcagtggtgcaatctcggctcactgcaagcttctcctcctgagttcatgccattctcttgcctcagcctcccaagtagctgggactacaggcgcccaccatcacacccggctaattttttgtatttttattggagacggagtttcaccgtgttagccaggatggtctcgatctcctgaccttgtgttccgcccgcctcgggctcccaaagtgctgagattacaggcgtgagccactgtgcccggccttttgttcttttcttttttttttttttttgagacagtttcgctattatcactcaggctggagggcagtggctcactgcaacctctgtctcctgggttcaagagattctctgcctcagcctctctattagctgggaatacacgcgcctgccacgacgcccggctaatttttgcattttttagtagaaacggggtttcaccatgttgagaaatttctttttttttttttttttttttttttttyttgagccggagtcttgctctatagcccaggctggagagcagtggcgcgatctctgctcaccacaagctccgctgcttcccgggttcatgccattctcctgcctcagcctcccaagtagctgggggactacaggcgcctgccaccacgcccggcaaattttttttttttgcatttttagtagagacagggttccatcgtgttagccaggatggtctcaatctcctgacctcatgatcctcatgatccgggcctcggcctcccaaagtgttgggattacaggcgtgagccaccgcacccggccgagaagtttatttcttaacggttttggaagctgagaagtccaagatcaaggcagcagcagattcggtatctggtgagggcttgttcctcacaaatcatgctgtcttcaggctgcgtcctcacagggtggaagggacaaggcagctccttttgaccgtgaccccttttttttttttcctccgactcctgggctcaacatcttcccacctcagcctcctgactagctgggattataggcgccagccaccatggccagctcgacctcttttattaggatgctaatcctactcatagaacaggaccctcatgacaacctcctcaaggccccacctcttaatacgattgcattgggagttaggttgaacatgtgaattttgaggggatgtccatataacacatgtattatgtacacctgatattaaacttactttttttttttttgagatggagtttcgctctcgttgcccaggctggagtgtgatggcatgatcttggctcaccgcaacctccgcctcccgggttcaagcaattctcctgcctcagcctcccgagtagctgggactacagacgcccgccaccagacccagctaattttgtatttctttttagtagagacgggttttctccatgttggtcaggatgatctcaaactcccgacttcaggtgatccgcccgcctcggcctcccaaagtgctgggattacaggtgtgagccatcgcacccagccgaaactttcttaaccattttccagcgtacagttcagtggtattaagtatatttatattgagcaaccatcaccactatctgcagactttttttcatcttgtaaaactgaagctctgtaacccttaaatcctgactcctcattctccactcacccaagcccctggcacccaccattctactttctgtctctgaattggactgctctaggcacctcatataaatggaatcatacggtatttgtctttttgtgactggcatatttcacatagcataatgtcctcaaggttcatccatgttgtagcatgtgtcagaatttctttttttttttttttgagatggagtctcgctctgtcgcccaggctggagtgcagtggtgcgatctcggctcactgcaagctccacctcccgggttcacaccattctcctgcctcagcctcccgaggagctgggactacaggcgcctgccaccatgcccagctaattttttttgtatatttagtagagacggggtttcaccgtgttagccaggatggtctcgatctcctgacttcgtgatccgtccacctcggcctcccaaagtgctgggattacaggcatgagccaccgcgcccagcattttttttttttttgagatggagtttcactcttgttgcccaggctggagtgcaatggtgcgatctcggctcactacaacctctgcctcccgagttcaagcgactctcctgcctcagcctcccgagtagttgggattacaggcatgtgccaccacacccggctaattttatatttttattagagacggggtttccccatgttggtcaggctgatctcaaactcctgagttcaggtgatctgcccgcctcagcctcccaaagtgttgtgattacaggcgtgagccactgcgcctggccggaatttctttttaaggctgaatgatgggggccaggcatgatggctcacacctgtaatcccagcactttgggaggccgaggcaggcagatcacgaggtcaggagatcgataccatcctggctaacacggtgaaaccccgtctctactaaaaaatacaaaaaattagctgggcatggtggcgggcacctgtagtctcagctactcggaaggttgaggcagcagaatggtgtgaacccgggaggcggagcttgcagtgagccgagatggcgccactgcactccagcctgggcgacagagcaagactctgcctcaaaaaaaaagaaaaggctgaatgatattccgttgtatggattttacttatccattcatatatctgtggacacttggcttggttccatgtttgagctattatgaataatgcttccatgaatatgggtgtacaaatatctctttgagactttgctttcagttcttttggatatatacctgattgctgggtcaatggcaattctatttttaatttctcaagagcctgctatgctattttccacatcagctacagcattttacatttccattaacagtgcatgagggttccagtttttccacatcctcaccaacactttgttgttttgatagtagccatcccaatgggtatgaggtgatatctcattgtagtttggatttgcatttccttaatgattagtgatgttgagcaccttttttttttttttttttttttagatggagtcttgcttkctctgttgcccaggctggagtgcagtggcaccatgtcagctcactgcaacctctgcctcctgggttcaagctatcctcttgcctcagcctcccaagtagcttggattgtaaacatgcaccaccatgcctggctaatttttgtatttttagtagagacgtgtkrgccaggctggtctcgatctcctgacctcaagtgaccacctgcctcagcctcccaaagtactgggattacaggcgtgagccactgtgcctggccttgagcatcttgtgatgtgcttattggccatttgtatatcttctatcttctttggggaaatgtctgttcaagtcctttgcctttttaaatttttattatttatttatttatttattttgagacagggtcttgttctgttgcccaggctggagtacagtggcacagtcttggctcactgcagcctcgacctcctgggctgcagtgatcctcccacctcagcctcccttgtagctgtatttttttgtattttgtattttgtagctgtagtttttgtattttttgtggagacagcgtttcaccatgatgcccaggctggtcttgaactcctgagctcaagtgatctgcctgcttcagcctcccaaagtgctgggattacagacatgagccactgcacctggcaaactcccaaaattcaacacacacacacaaaaaaccacctgattcaaaatgggcagaggggccgggtgtggtcccaactaccagggagactgaagtgggaggatcacttgagcatgagaagtcgaggctgcagtgagtcgagattgtacgactgcattccagcctggacaacagagtgagaccctgtctcaaaaaaaaaaaaaaaaagttttgggaactttctatgtattctcgatattaatcccttatcagatacatgatttgtaaatattttcttccatactgtggattgcctttttaccccatgataatgtcttttgatgcacaaaatttttacattttcttgaagtccaacttgtctatctttgctttttgttgcctgtgcctgcctttggtgttgtatccaagaaatcattgttaaatctaatataaagcttttcccctatgttttttccaagagttttgtcattttaggtcttatgtttaggtcatggatatggtgtcaggtaagggtccaatttcattctttctcatgtgtctctgcaggagttgttttttttttgttttttcttgtttttggttttttttttttttttttttttgagacggagttttgctcttgttgcccaggctggagtgcaatggcacgatctcggcttgctgcaacctctgcctcccgggttcaagtgattctcctgcctcagccttccgagtagctgggattacaggcatgcgccaccacacctggctaattttgtatttttagtagagacggggtttctccgtattggtcaggctggtctcaaactcctgacctcaggtgatccacccgccttggcctcccaaagtattaggattacaggcgtgaaccactgtgtccagcctctgcaggagttttaagtacagtctgtcctcacctgtggctgtgttcccctttaaggtggtaaaggagcactgtgagatacagtatttcatagcacagttgtttcttgctatcccctggggactggttccaagacccccctatggatgccagaatcctccaagatgctcaagtgcttgatagaaaatggcatagtatttgcatataacctatgcatatcatcttgtgtactttaaatcatctctggataacttaaaatacccaatccaatgtaaatgccatgtaaatagttcttatactgtattgtttttatttgtattattttttattgttgtattgtcattttttattttgctttttcgaatatttttgatccccagttggttgaatgagtggatgtggaacccacagatacagagggctgaccatatagtaaacgaaggcagtgatgtcactgagtgacgactctgctctcaaagaggagggaaaatgtgcttcaccatagggccagtattaaatgactggggggtgcagagaagatgaaacctaaaatgtcaagtcatttaacacagcaattccagttctagaaatgtaacctgtggtatcatgggacaggcgtgcaaacatatgaggtgatagcagaaaatgggaaatcaccaaaacgtacatcagaaaatgattgctacatatgaagtctgttctgtgtcatatgatgtagcctttaaaaatagctcatgtatcctaatcaagctgtcactctaaatttattaccataggacgagagctatgatgcctttacacaaaaaatatatattataaaacagaatgtataatatctcattttttgttattttggaatgctataccaacaatttgttcaggttgctggagttacaaaattatgtgtttaaaaaattttctatatagtatttttttctttataggatgttttaattttaagttatcaatttaaaaaatctaattagagaagggtgcaattcataacactacttggggcttacggtcgagtactaggtacttaaatatcagagtttgactcttttacccctcttttccaaaaaattgttttgggggatgaaaacctctttctaaatgccatatgagatatagattgctggggagtggtggagtgaggacttcataaatgctgttcctccatttaaaggaatgagaaaactggcaaaaatgattaaaaccaactttttcagaactcgagaaattaaccaaaggcttgcaacaatctaagacacatttattcaggaaaaatcgcagaaaaaagttattcttgttttcaacaaaaagttatgaggcatgcaaagaaacaagaaagtatggttcatacacaggaaagacacagtcttttccagcctagatgttggacttcatagacaatgatgttaaatcaactattttaaatttgtctaaagaacttaaggaaaatgtgagaagagtgtctcaccaaatagagggaggccaaggcaggtggatcacgaggtcgrgagatcgagaccatcctggctaacacagtgaaaccccgtctctactaaaaatacaaaaaattagctgagtgtggtggcacgcacctgtagtcccagctactcaggaggctgaggcaggagaatcgcttgaacctgggaggtggagattgcagtgagctgagatggcatcactgtactccagcctaggcaacagagcaagactcagtctcaaaaaaaaaaaaaacaaaaaaamcccagaaattctggagttgaactgtgtagttactgacatgaaaaattcactagaggctgaacagcagatttgagcaggcagaaaaaaatcagcaagcttgaagatggtaccttgagatttttcaggctaatgaaaaaagaatgaaggaaaattaacagcctcagagacccatggtgcaccgtcacacaaatcaacatatgcatsatgagagtcccagaaggagaggagagaaagggtcagaaagaatggccacaagctgatgaaaaacagtaacctacccactcaggaagctcagtgaactccaatgaggatgaatatcagagatccacacctagatatttcataatcaaagtgtcaaatgacaaagaatcttgaaagcagcaagagatgagcaacttatcttgttcaaaggatctttgatcagattaacagctcatttctcctcagaaatcatgggagccaggagatagtgggatgaacactgttgaaggcaaaaccttcaactgtaattattggacttttgagtcttagatggtcctgacctctttgtcttcagggacagtttttcaatttaatccctaataacaattagtcaagcttccttgacctgtaggaaggcctgtctttaggccgggcacagtggcttacacctgtaatcccagcactttgggaggcccagacgggtggatcatttgaggtcagaagttcgagaccagcctgaccaacatggcgaaacccccatctctaccaaaaatacaaaaattagccaggcgtggtggtgcatacctgtagtcccagctacttagggggctgaggcacgagaatcgttgcttgaacttgggaggcggaggttgcagtgagccaagatcgcgccactgcattccagcctgggagcctgggtgacagagcaagactccatcttaaaaaaaaaagaagacctatcttttatagagttcccttccccaagtttttctacaaatacccagggatgcttatgtgttccaccaagtttggaacatagttagggagtgaaaaacataggttaaatgaatgtcatctgtctggcttggttatttccttggccagctgttctcttctgtatgttgcctagttctccctgcctcagggctgttgcttcacccttcataccatattgccttaaatacacaaacgacctgtcaggcatttcacaacattttactgaatgcttggagatagcagaatggaattacaatacagaaaaagatgttttgctcacaaaggggaatttaccctttacctcaagaaaaatagagcaattgccaataacaatattggtggcctctcccctgcccattaaccatcaagacgtcagcaaatactggggtctaatctcaactagtgttactccaggacaccatatggagctgactgctgatgttctgtycttgataatatcccttatgtgtgtgtagcactttatagtttttttatttcatttttttctttttttctctccccccccaccttttttttgtgtgtgtgtgtgacagggtcttgctctgtcacgaggctggagtacagtggcaccatccaagctcactgtagcctccacctcctgggctcaagcaatgctcccacctcagcctcccaagtagctgagactacaggcatgtgccaccacacccagctgattttttttttttttttttttgagacagggtctcactctgtcactcatgctggagtgcagtggtgcaatcacagctcactgcagcctcaacttccaaggctcaaatgatcctcccacctgagcctcctgagtagctgggactacaggcatgtgccaccatgcctggctagtttttgtattttttgtaaagactgtgttgcccaggctggtctcaaacttctgagctcaagcgatcctcctgcctcggcctcctgaagtgctgggattacaggcatgagctacagcacttggctagttttattttatcaaccagttttccctggaactggttatggttgtggttttgctgcttatggatgacagacccgaggttcagagaggttcagtgtctctctcagcttcactaggaagagttatagccaagctctgacagcagcaaaccagattctggcctgaggttctcagaatatgctgccgttccacaggatgttgcaatatggtgtggcagggtgttacagtgcacagggctgaaaagaccaacctgagaccctcccctttccttctgaagttatcacttcatggacgtttgcagcttttatcataagagccatttgttgtcgcatggcttgtggccaactgggagtctacctccatctaaggcagggctcttctccctgccatgttgcccaaggctgtttcagtaagactgtaaggttttcttcagccctcctggcttttgactgccccattccaactggttgcaaaatagctatttgtgtttttgctgacctgagccatctttctgtccatttatacttctgatattcttacgtggcaatcagtatctagcagaatgaatgccccattttctaatcctgcgttttctcagttgactgagtggcttaaggaggacaagttattactgggcagtactccaagaaatggttctttccttcagcatttactgtgcatctgtgctatgcacagctccttactggatgctgtgaggccacaggaggatctgacaaggtggccttgccctgagttgtttatccgtggttgggagagagggaatgcacgtgctggacaaaatacatgcttgcatagtgactggctagcgtggaagagtagtaatgacctcattgatcctgcttctgtgccaggtgagatgctaaatgcataaacatacacagggggctgggcgcggttgttcacacctgtaatcccagcactttgggaggccgaggcgggtggatcacctgaggtcaagagttcgagaccagcctgaccaacatggtgaaacctcatctctactaaaatacaaaaaattagctgggtgtggtgggaggctgaggtaggaaaatcacttgaacccaggaggtagaggttgcagtgagccaagatcgtgccattgcaccccagcctgggcaacagagtgagactgtatctcaaaaacaaaaacaaaacacacatagggaattaccggggagtggcatagcagagttgagagcatggaccctggagtcaggcggacaggatggagttcaggcttagccctgatcagcaagttccttagcttcttcaagccttggtttcctcatctataaaatgagggcagtaagaccttccttccttgtcttactacccccattttatagatgaggaaaccaaccagtgggggctgttgggtagagatcaaatgcaataacttttgtacaaatgaaataacacacgttcattctgtacaaatgaaataacacataaacaaatgaaatcacacagtcatgtgcctgacacttggacacaccgtaatggtggctctgttaatgggaccagtgatgaacagttagaagtgaaccccttgagggtagaatatgtgaatccgaggccctgcaagatgaggggactctctcaggtgggtggaggagctggtcctcgcatgtgtgatatttgagttcgtaggaggcgggtgcccccggacagtggcaatgggagtgaggccaggtgatgagacagagggtgatgccccagcctcgctggcgtggaggaaggcagtgggaagccggcaagggtggaggttgtgcctgcattgatcactgtggaatcctcagggcctagcacttgggaagcaatgttggagtgtgctggtggggcgtagtgagcattagggctggaagttcattctgtgaaccccagctgcgtgttgggatttgagacaataagaagcccctgagatgcttgagccaggactacccagaggtgaatgggatttttggaaaacctctgggcggagtgggtggctgcctgggaatggggagaggcagaggttgggtggggactagctcagcagggaatgtaactcagacattccggaatgatgcaagtggaggttagggaagtggttgcaatgggaaggaggtggcaaatataaagtgtcacagaagaaaagttgtcatggggccaagtggagggagggattggagagctctaaattgcagctcaatcttcatcttgaaatgcaggatggaaaaagccaccccatttatttagctaaagggagctgactccaagacctgaggtcggggaaaagtggagagacaaatagaaaagaaatagggaattgggacagggcaccatctttcgggatggtgggcttttaagcccaactcagcatttcctgagaaaattgagatagcttgagaccagagcaataagcgttgagacttacccggagaaaatgttacccagagaggagaaagggctggtagggcctgaagattcttgagctgattttccccagttcttgcctcttagtgcctcccatttctcctcatctgacggtttctgggtgagacagttgcatctcatctgtggtaggctgcctactgcttggtgagcctgggctgaagggctgaggcctctggaagagctgtcaggagagagacaccttcagggtacttggagctttcgccttgcttccagggcgggataggtggaagctgaaactgcctcctagcaaacagatttacactgatcaaaacaaagtatttgtaggtgttagakttaagaggttgaggttttccgttggattttttaggtgcatggtggaagaggtattttagacgaaggattctcctagcagacacaaaatatgaattaagaacacttgtttctgtttttctcccaactacttcttgatattcatagttcctggtgctgggactttggaatgggttttggtgtgcagaaaagacagggcatttgctgccaacaggggacataattgagactaaattcacaagataagggatggtatgatttaccttccaagaaaagatctgtgtctggtcctgtatctggcttctttctttattgcttttgcagttctgaatcagttttctttccccgatggctagcttctccagctggagagaacacacagtttaaagaggctttccccccagggccagattaaggatacttctgggctaaagggcaaatgcagccattcctagcagatttatggccccgaaaggacatttcggccactgcatctgcgagatttttgtcccacatcagctagcccagcagcgtaagcccaagggtttagtcattgacagagtccaaccaaggggtctctgtggaaccctgggcttgaatgggctggagttctaccctcccattgaaatcatttgagatggtagagtgccttccatgctgaaaacaggtctcatgtaacagttactgatggggccaaggaagcccaggtatgacctaggtaactcctcagagatgctactgttgaacctaatagtcttctagcaggttaccaagcggtaatccaaagagttagtgtttaacttaaaaaaaaaggtattcagtttagctatgtaatacttgcaccttgtacaaacattgaaatgtatgagtctcctttttcctctctccscagtaacccagtcccctcccaggaggccacttccggttaaattatcttgtctgtcctcttggaggtggtctgccctttgaaatagaaacatatttccttttttctttttctttttcttttttttttttttttgagacagagtctcgctctgtcgcccaggctggagtgcagtggcgtgatcttgtctcactgcaagctccgcctcccgggttcacgccattctcctgcctcagcctcctgagtagctgggactacaggcaactgccactatgcccggctaatgttttttgtatttttagtagagatggggtttcaccgtgttagccaggatggtctctatctcctgatcttgtgatccacctgccttggcctcccaaagtgctgggattacaggcgtgagccactgcgcccggctacagaaacatatatctattgtttgtttctcctgtgccctttctgctccatgcccttttcatttatcagtgtatcttggaaatcgtccgatgtcagcacaaataaaaagtctgcagtactctgtgtgccattgcatgtttttttttcttcattttgccatttgtttattgcaaaatcccacacttaacagaagacatgtttaaaacatatgagtatgttaaaacaaaatagtaaaatgaacatctatgttcccatccctaggttaaggttaggaccatataagccccctatgttccctccccggttgaagtcccttccctcagctattccttttttttttttttttttttttcttgagatggaatcttgccactctgctgtccagggtggagtgcagtggtgccatctcggcccactgcaacccctgcctcctgggttcaagtgattctcctgcctcagcctcctgagtagctgggactacaggtgtgtgccaccatgcccggctaatttttgtatttttagtagagacgaagtttcaccatgttggccaggctggtcttgaacccctgacctcaggtgatccgcccacctcagcctcccaaagtgctgggatgacagatgtaagccaccacacctggcaccccagctattctgaattttgtgatatttattctcttgttcttgttagttttcccaccgatagccaacctctgaataacttattgttgaattttgcctggttttgaacacctggacatggaatcctacagtagatttctgtgacttgctcagcattacatttgtgattcgtccatgtggatgcacatggctctgttcatgttcactgccgtagagctttccattgaatgaatatccacagtgtgttgatcctttctgttgccctgttgccaagaaggccttggtctgccttttgttttttttcctctctcaggaataaccctgctgggaacttttttttttttttttttttttttaagacagagtcttgctctgtcgcccaggctgaagtgcagtggtgtgatcttggctcactacaacctctgactcccgagttcaaatgattctcctgtctcaacctcccaagtagctgggattacaggggtgtgccaccatgcccaaccaatttttgtatctttaatagagacagggtttcgccatgttggccaggctggtcttgaactcctgaactcaggtgatccgcctgcctcaggctcccaaagtgctgggattacaggcatgagccaccacgtccagcaggaacattcttacatatggctcctggaacacatgagcaagaatttctgtggggtataaactaggagtggagttgctggcatgtctaactcttctaggttatccgaaaccaaagatttgaggttttgaaaactaatttgcccttctcctgccatcagtaggagcactgagtattttctgatcgcccaggtagtacaactttggactgcaagtctgtgtgagggctgttttgtgattgcagcttcttggggggagttttttgtttttctacctgcttttgtttttctacctgccaaggatttagacagttgatttttcttgcaggtagctcttggggacagggaagggtacatcaagtttcttggtggttcactgttacgttaagggagtatcctttggaagtcccaacttcactgggggtaagatctctttagatttcccaccgtggctgggctctgggccgtgcttctgtgaccttttgaggctttgaaaactgaagctcaggtttgcctagttctgcaaatgccatctagataaaagcttcagtgttaacttacctccctgtttctcctccttagggttttagcctgaatgttccttattttcttgccagcttgcctatgcttttaagacaaaatttaatctggccaggygtggtggctcatgcctgtattcctaacactttgggaggacaaggtggaaagatcacttgagcccaggagtttgaaaccagcctgggcaacatagtgagacctccatctctgtttcaaaaaaatatgtaaaaaataaaaagaaggccaggcaccgtggctcacacctgtaatcccagcactttgggaggccgaggtgggtgggtcacttgagttcaggagttcgagaccaccctggtcaacatggtgaaaccttgtctctactaaaaatacaaaaattagccgggcatggtggcatacacctgtggtcccagctacttgggaggctgaggcaagagaattgcttgaacctgggagagagaagttgcagtgagctgagattgggccactgcactccagcctgggggacagagcgagactctgtctcaaaaaaacaaaacaaaaataaagtagcactttcaagatgagcctttgcatccctagggttatggcttccattctcaggggttgctggatttcacatttgagaagtaaggctgccagcaccacagcgatgagacagaagtggtttcggccactcccccagaattttagtactatgcctgggcctggaaatctgactcatatttcaaactcacatgacactgatttgtcccagaaggctactttatggatttataatgggagatagaatctctggggtcagcctcttctggtttaaagatccttggttgacctgtcggtactaggtaagtcttagatggtggctaagtccattctagcattcaataaatagtacagatagggttgcttacagagcaggaatcatacacaggcccttttaaaaaatggtatgaccctattttagaccctgaccctccttgtccctggttgcagattcccactttcatgtagtgtttctttcccaaatattttgctattttagccttttgatttctgaaattgcccataataagtaatgctcatggccaggcacggtggctcatgcttgtaatcccagcactttgggagtcggaggtaggtggatcacttgaggttgggagttcaagaccagcctgaccaacatggagaaaccccgtctatactaaaaatacaaaattagccaggcaaggttacacatgcttgtaatcccagcaactcaggaggctgagaccagagaatcgcttgaacctgggaggcggaggttgcagtgagctgagatcgctccattgcactttagcctgggcaacaagagcgagactctgtctcaaaaataataataataataataattaatgctcacattatttttttttttgcactactaggtagactgaacaccccatggtcattctgctgctgccaagttcatcttggtaggtgctaatttcaggctggcctgattcttgtttttttttttttttttgagatggagtctcactctgtcgcccaggctggagtgcagtggcacaatctcagctcactgcgatcctgcctcctgggctcaagcaattcttctgcctcagcctcccaggtagctgggactacaggtgtccaccaccgcgcctggctaatttttttgtatttttaggagagatggggtttcaccgtgttagccaggatggtctcgatctcctgaccttgtgatccgcccgccttaggctcccaaagtgctggattacaggtgtgagacaccatacccggcctgccacaggtgggcttctgaaggtggtagaccctggagccaagcagtggcacaacataggcatctgaaatccacacgtccctttgtggcttcatgtctgtggccgaaaccaacaagcagatgtatagtgttatgtttgcttgtattgttcatcttagaacttagttccctctctgtctcttcatgtaaatttctcctttacattattttcttctttctcttagtcccaattcgacaaacctttcttgtttcccatgatctagtctccaggcttccttactaccctctccccttgagtaggcttgacaccatccagccctttctagtggggaaagcagaacccaaagttggcatcccagattctatcttttttttttttttttgagacggactttcgctcttgttgcccaggctggagtgccgtggcacgatctcagctcactgcaaccactgcctcccgggttcaagcgattctcctacctcagcctccctagtagctgagactacaggcacctgccaccaggcccagctaattttttgtatttttagtagagatggggtttcactgtgttggccaggctggtcttgaactcctgacctcaggcaatccacccacctcagcctcccaaagtgctgggattacaggcatgagccactgcgcccagcttgcctggctgatttttaacagtgacttttaaatttctactgccatccagcgcattcctgggctgctgtgtgtgtttcctatcagagaatgaaaaccagaggagtacgggagtacactggtgtggctgggagtcgagctctagagtcatactgctgagttcaagtccttgactaattaaagcatgactaggggaggccagcctggatagttaaaaattacatatttaaaatgtaatatatgtgtgagcgttcacagcagcgttattcaaatacaaaaaaaaattagctgggcatgatggtgcatgcctgtaatcccagctactcaggagactgagggtgggagaatcgcttgaacctgcgaggcagaggttgcagtgagccgagatcatgccattgcactccagcctgggcgacgagagcaaaactccgtctcaaaacacaaaaaaagagccaaaaggtggaaacaacccagatgttcatcaaccaatgaatggctaaacaaaatgtggcctacccatccagtggaatgttgttcagccataaaaaggagtgaagttctgacacatgctacgacatggatgaaccatgaaaacattgtgctaagcaaaagaagccagacacaaaaggtcacatactatatgacatttctaggaaatatccagaataggccatagagatggaaagcagattactggttgccaggggctgggggtgggtgggaatggggaatgacagctagtggtaccaggtttctttttggagtgatgaaaaggttctggaattggatagttggttaccaacattataaatatgctaaaaaccactgaactgtatagtactggtaaccagaatatgtgcatcattaggcctatatattaaacaattctagttggtcatgtccctagaccccggttgtgttgacttgccatgatttgtttaactgtttgcctactgttgaatacttggcttatttccaggattttgtgatcattgataatggtaagccttactttcaaagtctgataagctttttaaaaaattctgcttcctatgtgatgccaagcacttaagaagtactctataaatatttattgaattatctttgcttgctattcctgtttcattagtgtagataattactttctgttccagattatttcaaaagaaaatattccttaaactgttagcctttcagtaagagctgtacattttatatttgtaagtggtatatttcagatagaaatagtttgcttgccttttctgatcacaagggtaatatctgctaattataagagattcagataatggccttgcctggacagtggcctttatcacagtcctccaagcaattccacatctgcaaagaaacatgcttcttatctttttgccatatcatttcattatcttctctgcatcttgagtttgactcattttcttctaaaaaacttcttagataccttctgctagacagtagcctacgatgtatgatgccattgccttcttttttttttttttttaactcccctccctgttgcgggaagtcaggaaccctgaacggagggacccgctgaagccatggcagaagaacataaattgtgaagatttcatggacatttattagttccccaaattaatacttttatttcttatgtctatctttactgcaatctctgaacataaattgtgaagatttcagggacacttatcacttccccaatcaatacccttgtgatttcctatgcctgcctttaatctttcaatcttatcatctttgtaagctgaggaggatgtatgtcgcctcaggaccctgtgatgattgtgttaactgcacaaattgtttgtagagcatgtgtgtttgaacaatatgaaatctgggcaccttgaaaaaagaacaggataacagcgatgttcagggaacaagagagagaaccttaagctctgactgccggtgagctgggcggagcagagccatatttctcttctttcaaaagcaaatgggagaaatattgctgaattctttttctcagcaaggaacatccctgagaaagagatgcgtccctgagggtaggcctctgaaatggccgcttcgggggcagccgtcttttatggtctaagccgtagggatgaaataagccccagtctccygtagagctcccaggcttattaggacgaggaaattcccgcctaataaattttgatcagaccagttgtctgctctcaaaccatgtctcctgataagatgttatcaatgacaatgcgtgcccgaaacttcattagcaattttaatttcaccccggtcctgtggtcctgtgatctcgccctgcctccatttgccttgtgatattctattaccttgtgaagcacatgatctctgtgacccacaccctattagtacactccctccctttttgaaaatcactaataaaaacttgctggttttatggctggggggcatcacggaacctgccaacatgtgatgtctcccctggacacccagctttaaaatttctctcttttgtactctgtccctttatttctcagactggctgacacttagggaaaatagaaaagaacctacctgactatcaggggctgtttcccccratacctcccctccttcattgtccttttgtccaaagatcatgtctgtcttgtttgcaaataagaaggaataataggctaggctcagtggctcacaaggcctgtaatcctatcactttggaaggctaagatgggtggattgcttgagctgaggagttcaagaccagcctgggcaacatggtgaaaccctgacacatgctaattttttgtatctataagaaattagccaggcattgtggtgcgcacctgtagtctcagctactcaggaggctgaggtgggaagatcacttgaacctgggaagcagagattatagtgagctgagatggtgccaaaagaaggaagaatagtgtgccatttgttttgctaagtcagcatccttaatttctaacttttttcctttctttctttctttttttttaattgaggtgtgcactgtcatgcctagctaatttttttttttttttttttggtagagatggggtcttgctatgttacccaggctgatcttgatctcctggcctcaagcaatcctgctatcttagcctcacaaagcattgggattacaggtgtgagccaccatgcctggctcaacttttcctttcttttctttctttctttctttttttttttttttctgagatagagtcttgctctgtcgcccaggctagagtacagtggcgcaatctcagctcactgcagcctctgcctcctgggttcaagcgattcttgtgtctcagcctcccaagtagctgggattacaggtgtgtgccaccacacctggctaatttttgtattttagtagagacatggttttgccatgttggccaggcttgtcttgaactcttggcctcatgtgatccactggccctagcctcccaaagtgctggtattataggtgtgagccacttttcttggccactttttttctttttctctttttttttttttttttgccttgaggtcttgtgacattctgaagctatgtgcttttctgtgaccttttaaaccctttgtattggccgggcatggtggctcacatctgtaatcctagcactttgggaggccaaggtgggcagatcacttgaggccaggagtttgagaccagcctggccaatgtggtgaaaccccatctctactaaaaatacaaaaattagttgagtgtggtggtgcacctgcacatgtgtaatcccagctacttgggtgactgaagcgggagaatcacttgcatcctgggaggcggaggttgcagtgagccgagatcgcgccactactacgctccagcctgggcgacggagcaaaactctgtctcaaaaacaaaaacaacaaaaacaaacccaaatcctatgtattccatagctgtcttgtaaggaaggaatgaaccgatgggtctcttttctctttccctgtgtcatgtggtggagctgtgcctagcacgacttctttttttttttttttttgagacggagtctcgctctatctcccaggctagactctgtctcccaggctagagtgcagtggcgcaatcttggctcactgcaacctccgcctcccaggttcaagcgattctcctgcctcagcctccctagtagctgggactacagttgcatgccaccccgcccagctaattttttgtatttttagtagagacagggtttcatcgtgttaggatggtctcgatctcctgacctcgtgatccacccgcctcagcctcccaaagtgctgggattacaggcgtgagccaccgcgcccggtgcctagcccgacttcttgccccacattattgtgtgttcgcctttccctgctgcgccatcattgctcagcacgcctcaagatgggatgtggcagcaatggtggaccattctgtccttatgaagctagtgttattgactatgccttgctttttttcttcagagtcatttttctaggaacaaggacaatctcatacctttgcctccctgtctgagacccctgttttagctaacagcaagcttggacaagatggtttatcagagtcagggttaaagcctaagaagtgaagtgaaactaatgagccatctcagtgatgcagaagcctcatcttctccagctgtctgtggctctgggcttccttgtgttgctgtgttgctggcagccatgtggggatctgggccagagacagaaatgaaagagtggaggaagaccaggtacttatccctgatgcacctctggaagtgctggagttgtggatgcacctctggaagtgctagctaggctcattgctttttttttttttttttttttttttaagacaaagtcttgctctttcgatctcggctcactacaagcaacctccaccttctgggttcaagcgattctcctgcttcagccttccaagtagctgggattacaggcgctcaccaccacgcccagctaattttgtatttttagtagagatggggtttcaccatgttggccaagctggtcccgaactgctgacctcaagtgattcgcccgccccagcctcccaaagtgttgggattacaggtctcagccactgtgcccggtctaggctcattgctttttccagccaatgctgatgactgaaagactgttttaatcttagaatggtgcagttatttattgagtgaaagttcaactgtctgtagctgtctcctcatctttcttgtcgttattctgtttagatttccagccccacactctcctctctgacttaagactctctgaaacccctttacttcgtcagtaaatctattctgggattgtaggtgctggttgggctttatggggacaaagggacccctaccctcattcacaagcacaggggaattgtcatgaggaagatggggtgagggagagaactccttgcgagtgatgtcacagtgggcagctttctctttgtagatccttgacagtcagatctcagggacagttccaaagtgtggggaaaacgagattagaactcttgggtggttttggatctgctgtttggtttttcctcatctagaactaaatttatataaaagaatacaacagtagaataatcatggcaactaagtttgttctgctgtcctggggcctcttcatgtattatctctacttactgcaacagctctggaggtaaaaggcgttaccttgaagaaactgaggctccaaggggtgaactgcttgtccagggccatccagctcgggagtggcagagctcagatctaggctcctgtctcccaccccaccgcccatgcccctgccttcccctgcaccagaacaaagccaccacccccagagggccgtgtgtttgtgcttttatttccctgaatggctccaggtttttgctttgtcatttctgtgcttgtgtcctttgcagagtctttggcttccttttatttttcctaccccagtagcatctgacgcaatgcctggggtctgggaggaagcagggttctttgcttagacatcttggttttcatctgttttacaaaattatccttggcctctgttctctttttccttttatttcctccctgaaatactggttctttaaggctatcgggaaaagaaagataatcctacccaagagtttgaagaaatgtaaaggagaagtgtttttagcaagcagctgggtttttagcggggtcgtttccacgctccgtgttgccctagtgaaagtggtttgtcttcctcacgactccaagggaactggcacataaatggatgcagtcaggtggccgttgagccaagggccaagtaaggcatttcgtcctcagccacgttgcccttgcctcaygcctgtatttctgttctttttttttttttttgagacggagtctcgctccgccacccagcctggagatctcggctcactgcaacctctgcctcctgggtttaagcaattctcctgtctcagcctcctgagtggctgggactacaggcacctaccaccatgcctggctaatttttgtatttttaatagagacggggtttcaccttgttggtcagtctggtctcaaacctcaggtgatccacctgcctcggcctcccaaagtgttgggattacaggcgtgagccaccacgcccagcctcatgcctgtatttccatgtcctgaacatgttacatttgcatccaggcccagctctgttccctgaggaggttggagttctgataccccacagaaggaaggagtcaaggcggggaggctgcttggaggagggtgyggcgaagacaaagaaatggctctacgattcttgggattgctgggaagctgttgcttatagggttggctctctgtcctctctgatgctccaaacaggtccccaggggacaggccttcccggggctgccactttctccagtgttaggtccatatccattttcctgtccccctccgcttgtcccagctttatcatccgagatatggggcttctttccaaaggtgaatttaagtttcaggytttcctaacagtttcagctgttaggcaggggcttgtggcaggaaaaagaagacagaaatttctgttgcccataggagggtgacggggtgctgggtaaataccagttacagggaagttccctccaatgagtagcctggcacctttctgcagggtgtcttctgagccagctggattcatcgtgttggcctgtgaagtctgagaacaccatctctctcgtctttcccctcctcccctcctctgtgccacagcaagaggcgtggtatactctgggtcctccctcatcacttacacagccttctctctgtgtttgattaccagaatgagccagccttgttctgagtccgttcattcatttattcattcaacaaccgttttgtgctaggcaccatggtaacctacatttcaaggctgtaactgctattatcaagccatttgcagaagtttgggtcactgatgtgcctttgacctgatgcccattttctaaacccaggcattcctcttgagtgatacagcatctctgtacctcttctccaggacttatggcttaggtttttgtttttatttttaatggggctttctggcaaagacctgaaagcctgctagacaaattctaaaagtgctgtaacactaacgcctaggtttcagttctgacttcatgcaaagaggatgcctgaaccaagctcctcactaccaggcctcattcttttctcagtgacttagatccctctccccaaccttggtatctgtttgctgttcctagcacagatcctcagcactggtgtattcactgcctctggctggagcccatttgactgttgtcactacctcgtccccctgcccttcctcgccagccaatgacttctcatctcttcccagcttgtcaagctcctggagatctcagagtcacaggccccacccagggctctgcaaaaatattctttaagggtgtgggcgaagggataattgttttatttttgagacagagtctcactctgttgcccaggctggagtacggtggctcaatcttggctcatggcaacttctgcctcccaggttcaagtgattctcatgcctcagcctcccgagtagctgggattacaggcatgtgccaccacgcctggctaatttttgtatttttagtagagacagggtttcatcctgttggccaggctggtctggaactcctggcctcaagtgatgcacctcccttggcctcccgaagtgccgggattacaagcctgagccaccgcacctggcttgaagagagaatttgaaaatagaaagttttttccattcatttcaccttttgaggctaacctagacagcttgaggtaatccacctgggcccacagtcccaggattatgtgagtcttcagggactctccagaaaccctcttgttgatatgggtgctggaaacttgacggggcttggtttagttcctctctgagctgccctattagaggaacttctggatagatgaaatcttccagggagaagttctgaatgttctgaatgttgctgctccctcctcctgggccttcttcactgggctggggctctgctttgaggccagagtgggaagactgtttggaggtcacacgtgtttggcgtggcttagggggtgaggaagccttttatttattcttctgcctcttatctccctacttatctctatacccacacccctaaaaagagaatggcagaagtagattttgttgggctgggcatggtggctcacgtctgtaatcccagcactttgggaggctgaggtgggcggattacttgagctcaggagttcgagaccatcctggccaacatggtgaaaccccatctctacaaaaatacaaaaaattagctggacttggtggcgcgtgcatgtaatcccagctgctcaggatctcttgaacccaggaggcggaggctgcagtgagccaagattgcgccactgcactccagcctgggcaatagagcgagactctgttttaaaaaaaaaaaaaaaagtagattttgtatatgttttttgaaataaggtctcactctgttgcccaggctggtcttgaactcctgggctcaagcaatcctcctgcctcagcctcccaaagtgctggtattataggcatgagccaccacgccctrcctagaagtataatgttaattgcagagttggttctagtggactcaaaacattatagtttgtgtacctcccttctacaggacttgggaatggaaagaggaattttaattgccttgcatgtgaatttttctttaatgcaaaattctttaagaggaggaaaaaggattctatttgctgtttctatcaccacctagagggctcacaggctgctgtgggggaaaggacttgggcatttgactaaagattttgcaattgatggtgggtgctctatcaggtatgtgctaacttaggggaaagctaaccagcttccagtttgtccccttcctgcagcaggaggtcctcctggaccatcccaggctctaggctgcccayggaggtctttccctgcagctcaccccagggtatgagtgccgtaatcctagaaggctgaggctgggctcaggtgcctcttgccccaggtaacccaagttcaggccagataaatttctccgttattatacagaatgccaggagttttccagaccctttccccttatcagtaatttcatgtccaccagagcagtggacaggcatcatgtaggtgttagacattctgaagcttacgtctagctaaggcaacacacatacacaagacaagattgaggacagcgtccaaagcaacaaacgcagccttcagaatagcatcagtcctcccggcctggttctagttttccttggagcttagttctagaatttcagacttgacctcttagcttatcaattctctatgctcttgaactccatcctaggtaggaaaaagtgaagggtgatctctggaaacctacgccaatttgcatagacccttctgataagtagagtgctttaatatacatttctaagtggggaccaggtacagtggctcacagtttgggcccccagcactttgggaggccaaggcggggtggatcacttgaggccaggtgtttgagaccagtctcaccaacacgatgaaaccccgtctctactaaaaatacaaaaattagccgggtgtgatggcgcgcccctgtaatcccagctactcaggaagctgaggcaggagaatcccttgagcctgtgaggctgaggttgcagtgagctgagatggtgccactgcactccagcctgggcaacagagtaagactctgtctcaaaggaacaaaaacaaaaacattcctgcatggggtgagggctcttggtttgtagatgatttgctcagggtcatgacgaactagggctggaatctaggttttgtgctcccaaatattttattttattttatttttttgagacagagtctcactctgtcacccaggctggagtgcagtggcacggtctcggctcactacaaactctgcctcccgggttcacgccattctcctgccttagcctcctgagtagctgagactataggtgcctgccaccacgcccggataattttttgtatttttagtagagacggggtttcaccgtgttagccaggatggtctcaatctcctgacctcgtgatccgcacgcctcggcctcccgaagtgctgggattacaggcatgagccaccacmcccggcctttctgctcccaaatcttttgtactttctgtagtgtcatgcttttctcccttccacgtttattggttccctatctttacccagtgccttcttggatcactgctctgttagcctttggggagactaaggtgactaaactgtggtctcaggactggcagctcctaggaactcaggtcccccagaaattgaggtgagtaatttgctgcctataagccagatctgcttagacggtgaagtcctccttaaccctgttcagagcacagactgcacatacaaaactgcttggcaggtcggtcacagtggctcacgcctgtaatcccagcactgtgggaggccgaggtcggaggatcacctgcgcccaggaggtgaagaccagcctgggcaacacagtaagaactcatctctacaaaacaatagtaatagtaaaataaaactgcttggcaacgagcaggacaggcttgctgtctacagctgtgggcctggcctgacctacgctaagggaaagaccacaggggctgggccaagtgtgktgagtgagagctggggaacagacgtggcccctgcacagagcgcatttgttcctgctgatcccctccagcaataggggagttccagcagaagcagtggctgaaagaaacacagttggtgtgtttgttttggagggtaaggaggaggaaggaccaaagcagagggagtggaggctgtaaagagcgttgtaggaaagactgagactatgggaggggtagttagtactgagctcaaagtgccgaaagaggcagtggctattgcctgtaaaggacgaagaaagaagggagacagaaccaaatctggggcctcagaggattgggaccaggcttcccccaacaccatgtgcttgtcagcaccaggattttttgcctgactgccctctctgttacgttagcgtgagactttaggataaatcgaggaagtctcggaacctggcatgccacctctgaggcctgtggtccctcccctggtagctccccctgcgggcagggccctggtacacccctccatggatggagcagaatcacccctggagcccttgctccctgcaggatcacagggcacggagtggtccacagctggccctcagctccaggggctgccgtgtggcttagggagacttgcctttgctctacaactgtttaccgagcaggactgtgttctaggccgcatgcttcatgctggagacacagcagggagaaggcctcagccatctcctgtcatcaggggggactggcagaaggccattccctgttcaattatagctgtgatcattgctgcacaggcagcgggtaatgagagtgccctaaccctgctggcccatcaggggaagcctccctcccactgtggttatctgcctctcgcagcaggcagtgccttgctgtggagcttggcagaacatggggaaccttaggcaggtttcagagactccaccgtgctctctgtgaaatggagtggagggcgggaggagcttatggcagcagcaccctccctccctccctccctggctggagtctggttgctggagctgtctgtttgccttgtgagccctccccattggcgcaccctaggaccctgctgacactagtttttttgttgttgttgttttgtttttgagacagggtcttgctctgtcacccaggctggagtgcagtggcaccatcatagctcactgcagccttgaactcccccaggctcaagtgactttcccacctcagcctctggagtagctgggatcataggcacgtaccaccacacccagctaatttttttttctagacgtggagtcttgctatgttgcccaggctggtcttgaactcctggactcaagccatcctcccactttggcctcccagagtgctaggattacaggtatgagccaccacaacctgcctggcactactactaaacagtccctggtagtgtaattggaggcgacggcagaaatgcctcgaggggacaaggcctgtttggagttgaattaaatgcctccttgcctggcagtgaattatcagtttgtagattatctgtgtttgttctttacttaccttttttgagcatttactatgggccagactcagtccttccctcaaagggatcctggcaaagtctttctttctttcttttttttttttgagacagagtttcacccttgttgcccagactggagtgcagtggcgccatctcggctcactgcaaactctgcctcccaggttcaagcgatttcctgcctcagcctccctagtagctggcattacaggtgcctgccaccacgcccagctaatttttgtatttttagtagagacggggtttcaccatattggccaggctggtctcgaactcctgacctcaggtgatccgcccacctcggcctcccaaagtgctgggattacaggcgttagccaccgcacccagctgcaaagcctttcttttttcctggcttcttacctgttgaccttatggagagagaggggcaggaatacrttgtaaaaatcaaaacagaccaccctgttttatccagtagggagaaagagaaagacctgctgacttaccgaagtgtttggattgcccaggtagcttgataaccccagagaggaggaaacgagacgtacctgggctttgagttcctagatttcttttttgagggcaacattcttaatccttcaaacccatctttgtggctgtgtgtcctcagggtcagtagcagccttaggcctgggcacatgtggcccctgttcagactctacacctgaggggtaccttcctccaaattttccaggtcctcctccagtgcctggggctggctggggctcccagtaccattctggccacgggtgttgcaaacccaccctgggatcctttggggtactctccatccctctacgttgcacagggacaacagctgttctgtggagtcgtcctggggcccagttccgggagatggctgcagtatttctttctttctttctttttttttttttttgagacagagtttctctcttgttgcctaggctgaagtgcagtggcgtgaccttgactcactgcaacctccgcctcccaggttcaagagattctcctgcctcagcctcctgagtatctgggattacaggcacgcccggctaatttttgtatttttttagtagagatgttggtcaggctggtctcaaactcctgaccttgtgttccgcccacctcagcctcccaaagtgctgggattacaagcgtgagccactgcgcccagcctgcagtatttctttagtgggaatcatgtgagattgggctgccagaatggtgctgatgcactaattttgagtgactcaagtttttatatagacgagtccccataatgtatttgtctggggccccatgcatcctagatctgcccaggggccacccattgggccctctagctctgcttagcagctctgcgcctgaaccagaaaagagcataagggcctattgtgtgtccccagggcctgaatggtactttgttttctgcctttggcgccacaggccaagcggctttactactgctgctgccgttctaacagtctcgtctccaatgagaaattcrttcccacccgggtttcacgttgttttactgaatatcctgtgaggaatgggctttgagccagcttggggtctcgtgtgggttgctgggtgggggcttatcactgcggtaatgagagaaggagccttccctacccagtgacctcagctgtggcaggaggaagcccttcgttaacattgaactagggggctaaatggcaggaagggaatgtggtgggaattgttgggagacccctccccaccccagggtgaactgaggctgggggcagctgggcagaggcaggagctgatagtatttgccgtcctcttcccttgctgcttcttgccctccttccccaaccatccccattccctcttggcccactctagtggggaagcaggaaaaggatcctgtgaatcaaagctgcctattttgtgttgaggtcaaaggaatggaaagggtggagaggaaaccagcggagagcaggttgttagatttggaagtgcccacaggaagcggctgctcagctgaactccaccctttacggctgtcagtcacacagcgctgaggtcagccatcccacctactcagtgcaggaatcacgccgctcacctcgctgcctcttcttgtgtcccaaggtgaagaagcttgtttgttttattccaaaactggcattactttctcccaggccagcaaggagtgtcttcctagactggtggttctcaaactagggtccccaggcccttacacctcctcaagtctgttccaggggggtctgtgagtcaaaaggatttccataacaataccaagaggttctttgacttttccagtgtgttgacatttgcacccatggtgcaaaggcagtggtgggcaaaactgttgggacatctaggattgcgatggggattgtaggtcagtgtggcgagtattcccatcttagcaacaggaagtctctgacccatgaacatgtggtatctttcctttcctttagatttttaatttcttttgagggtcttttatagttttcagtgtataaggtttgcttttcttttcttttctttcttttttcttgtcttgctctgttgcccaggctggagtgcaatggcgcgattttggctcaccacaacctctgcctcctgggttcgagggattctcctgcctcagccttccgagtagctggaatttacaggcatgtgccaccacacccggctaatttttgtatttttagtagagatgggggtttcactatattggtcaggctggtctcgaactcctgaccttatgatctgcctgcctcggcctcccaaagtgctgggattacaggtgtgagccgccatgcccagcctaaggtttggatttcttttgctaaatttgttcctgagtttgtattcttttcaatgcttgtctttctattaatttaactttatattgtttaatctcttcctctttacgccttccttcttaactagactaaagacagggatgtgtcttatttattattacttttttaaagaggcaagctctggctgtgttgcccaggctgtagtgcagtggctatttacaagtgtgatcatagctcactgcagcctcgaactcctgcctcagtatccagagtagctgggactacaggcatctgccattgcacctgggttatggtgttttttttttttttttgtccaggctgctcctgtaaagaaggctggtaattattatccctggtctagtgggggaagaaactgaagcccaggatggcggggtgacttgcctcttggcacagcactggtaacagtagcagagatagggccatgactgtctgattcacatctcgcagctccttccagttgccatcctacaagggactgacattctgttcttagcctccctgagcttgtgtctaggtctctacctctcttgtattgaggccctagggcatgatggaagagagaaggactaaggctattattacaagggctgaccattggggtcatttttttggacatctctaccgtgctagactctcgtaggtatttcaaaaatacgttacctcattgggttctcatagcaactccacaagatggctcagatcattctgcattttatagatcaggaaactaaagttcagaaggttacgtaaattcccaagttgaagagcgacttaagtgttggagttgcaattaaacacagttcccagagctcaaactgcagtgctgggaggggacaacagtgggtttatgtgacttgtgtggaggaggaaggacactggggcattctgggacactgtgagactgtcagcactagcgttgggttgggtcaatccagagcctttgctctctggcctggagctggtatcacaaagtggttggtttgttgcatctttctaggggtcatggacagtagaggcctggaaaccttagcccctgtgacccctgccctgcagccttattctttgacaattaactctgggggtggatgctaatttgccacatgcagatcttgcttccaccggccgtatggtgagttcttaaagtgtggggccatcacgctctctctgcttccctgtagcacctagtatcttttgtgttacatagtggacagtcctcacaagctttccgaataaatgaaagaaactctacttgcttgtcttgctccatagaagtcatacgacatcaatgtatgtgtggctagatttggggtggcagaggagaatgggggaccaaggccattagaagggtccatccagctgccctgatggcacaaggagctttctgcaggatggaccatgagccaagacaaggacgagacagatgtaagcactacccagagctgagcacagagcgactcgttctccacctggaacctccagctggaagcctggttctgtttgtcacccaggactaacagtgttgttgagcatgtgagcgactcgttcgccagggcagcagcgcataaccttgctaccgtttaagccagacacttactccccccgcttgtgtttttctcagatgaagaaaacacctataaagtcgtcataattgttggtttcagggtattttacaattgcatggaaggttaattgttgaatttttcaacaccgggctttctgtgtaaattgaagacagcatggatcatgctgtgttgctctgccgcagtgagtggtcaggcccctgcgtccccttctgctcatacccggtgttccagccrtaccaaactgcatggtttgtgaccatacartggcccgtgtcctggccacaccactctcttcccttttcccttcccgccggtcctctgtcactcaccttgtctgtgagtctcaactcccatggtttcctgatacctgagtcccctcctcccatcactagttcagcactggcatttgcttcctttggctcccaccacacttggtttctcctctttgtttacgtgtctagtgccttccctgacgtgagctcctggagggcagggactgtgtcttcttgtccgctccggctccccagtgctgatggagactcaggcaggctgcgctggaccaaataggacacgtggtggtgatgacatttttggtccaatccagyagcagcctgtgaagtgctcattgcaggcagagctgagtaagctgtgaccccactctcaggcagcttctcttcgggggggagcggcagggacacctgttccgaagatcatgtcctgcatgatctctgtgtgctgaggaatgaagcatgagtggagatggctggggtccatgacgagtatgaccttgggcaagtcactgtgaatggcactcctgggtgaggcttaggctgagtgcaggctccatgcagatacttcctccagctcyggccccacaccagcagcacaccagccagaaggcaaatctcaaggcgagtacgggagttggtggcacctctctgcctccagctgtggaagaggcacccggtgcctgtctgggtgctaggataaggacaagaattgtcacaaccagcagctgtagcactggacacggggaacagggactttctgccatttcccactttggcattccagctgatcctctactctttattcccagatagggcccctggtttgagtctcattctgagctcaccttccgggtagcccccttccttcatgggctggaagggaagcagaaagctgcttattgtcatcttgggaaaagatagagaagaggcggaaacagaggtgccagtgctggtcaggatcctggacctgaaggaatgtgcaggatccctccaccctgacttttcagttaacgcgtgttctcggggacatcggggtgttcagacctctgcctggcttggatcagggcgcacttacgttcccgtagcaggctcagcctacccgctctcttcagatgccagcttctgtcacacagtgagcgcgccgaaccatgcaagacctccgaccaattagcctcgggttcgggaggccaagcaaaagatctaacagtgagctattgactgtgcctcctccaaggagctggtcagagctcagcctggtgttttgcttccttgcgatggtggggtggtacccagtaggtgggaactctgttctggcttcttactggggtgccctttaggataacactttgttaaatgaactgagctgggtggtttcatagtatgttcaagcatgtgaacatctgcttgctgataaatcgtactgggtcaccagctcacactaatcaccaggtaacatgtgccctggtgagggatccagtcttctggccctgtggggagacaggcccatgatgtcaccagttcccaggtggacaacccaaggcatagtgaggtctcggcaggaaggaggaagacattagactccttcttttttcttctccccattgaatcttctgctcctttccttaggccagatgccctgtctctctcctggctggctttcccagccctggccctggccctcccttctttgtgaaactcgaacaccactgccctttcatctttccaccagaacttgtgagcagtggcttttgaccgccgctcttccagctcacccctgacctagtgtttgtttttttatccttccctcagtctactcaaggcccacccctaagccagagattggctcccaagcagcctctctctcctgggagcggtaaaggaggggacagttctggaaagtcattgacaggggattaacctagaacatcaattataaacaggcagcaggcctcaggcccagacttgggtgttacaggaacagtgtggcctctctggaactctgcagaccaactgccgtggtaagagaaccgactttcagaggcctctaggcactttgtcctgggtaggggtgcccacacatcctggccattgttgctcttccctctggaacttggcagctttctagcagttagaagagcagagggtagaaggatgggaacagtccttagagaacaggaatctaggggagggttggactagatcatttctcaagagctgtggggactgttctggtcaggcatgggcaagctgaggggcaggaggtaggcaaaccctacttgacctgagaacagatttgttgttgttttgtttttgtttttgagtctcgctttgtcatccaggctggagtgcggtggtatgatctcggctcactgcaacccctgcctcccgggttcaagcgattcttctgcctcagcctcccgagtagctgggattacacgtgtgtgccaccacacccggctaattttgtatttttcgtagagacggggtttcaccatgctggccaggatggtcttgaactcctgacctcaggtgatctgcccgcctcggcctcccaaagtgctgggattacaggcgtgaaccactgttcctggccgagaacaggttttgcctgagaccttggacagaagaccttggccatggatccaagagctctgggccagaacacccttgcatgatggtgacagttgagggaaaggccacatggttccttgtgtaaatggcatggctgccagtggtcatggggaggccctgctcatagttcagcaccagccggcccttcgtgtgctgtgctccagctccccagccggctcagtccttcacaaaatgccctggagttacagaacagaaaggcccggctttcctttaggaatctgggaaataggagggctgaggtcatgctctgttcaacatgtgagacctcccagacagcagtgcaggaaaaacatgttactacccgtattttgggagaccagacctctggcgtttgagtaggactcactgctcagatctaaggggagagaacatctcccattttgaagaaaaccttttcctcagtttaggaggaggagaaactgatcaggttccaaatggcctcttgttctttaactgcaaacgggccaggctccctgccaggtcatgggataacaatccaaggagaggggagaaatgcagtgtgcatgtgtgtgtacatgggcatgctcgtagggggaaagactggggggatggaggtgacgtggacatctgtgtatgcttcagctctatttccctctgcttagtcccaaactgctcgggattagcaattgttaagaacatgcctttctccccaccccgggagttctaggccaggggtggagggattgagcaccgtggctttgttctstgtcaggtggtgcctttctctgtgacaccgagggagacctgccatcaggagggagtctgaggccaggagacagtacttaccgatcaggatggatctttggtcttgtttgtgtgcttggtttcctggctggaatgaaatgtcagtttcatgaggacagggacctgttctctcctgcacaactttctctctgatgaccgacagtgcctggcatgttgtaaaggctcgttcagaagtgactgaatgaatgaatgcatactttttaggcggggctgcatatcgttcccttaaacctcctgattcatcttccgttgcttccgtgtcagcttctcactgggtcattgtctgctttggtgctgcccttccccacaactttgagagttcatgttactgcaggctccccgcccgcccacctctgcctgaaacttctcttttgggctcctgtgctgtgacatactagcagtatttgtttgcccctcttaagaccatcccttcagtttcattcctgcctcagtttctcctcctcacatttctgctgttccacctctgctcctgtgctcttctcaggaaagcaggtgagtggtgatgccctgggctaagctcgccagggcctgggcagcccaggcacccgtggttcgggtggggagggagcatgctggtggccggagctgggcttgtgggcagcagccctccccaccttgctgaggccaagctctttctcatggctttggctgtcacttctatgctgatcacccccaaatcattgtgtctatatttctctattggtgcttctgaccttccaaaatctgatcccaccctggcagtcagaccttatttgatgtcaaggattattartttgtagcatgtattacatccctaatatggaccagttcacatgcattctcatatttcatcctcccaatgaacatacaaagtcaaataattattcttattttacagagtctcagacaacttagttcctctaggtaaccagattaattagcattagggggttgtgatcaggatttgaactggctccactggcccctgaccctgaacagagtcagcttggagtccgcccttggagacgaggacagccggtcctgtttctccctctcaccccagtgcactcacacagcaggcgttggcacccttgctaagggccaggccaagcgtctcctctgtgagccttcacttagctctcctaagctgctcggcctgcctcctctcccttttctctaacagcagtgcctttgcacacactatgtgtttgttatatgttggctgtgccagtcttgcctcgtcagcagatagtgattttcttaaaggcagaggccatgttttatatgatcctccatccctcaagtgtgtgttacaggcagtttgttgctcagtaaacacttgatacctctgatgaggtgaaatctaatcacagtcctttgcatatgtattgtggtttacagtttctgaaaccgaagagccaatttgaagtttcctgtaaaacagatcccttaattgtcagcgctctgtgctgagagggataaatctgttttgtagacggactaacaggtccagaggtagagtgaattccccaaggtcatatgatggatgatagcaaagccagaacttgaacccaaggtttaactcttaatgccgttcctcttaatgccgttcccttcccacagaatcacagcagcctgtggtccagacttggccaggtgacccctgccaggccttccatcccacttagtcatacagttccttatttgtatttgtcctttctctttcattagaactcgtgtctttttgtgtgtgtgtgttttttgagacagggtctcgctctgtcacccatgctggagtgtggtggcacaatcacagctcactgcagccttgacctcccaggctcaggtgattctcccacctcagcctcctgagtagctgggactacaggcgcatgccaccatgcaaggctaatttttgtatttttttagaggcagagtttcaccgtattgcccaggctggtgtcaaactcctgggctcaagtgatctgcttgctttggcctcccaaagtgctgagattacagacatgagccaccgcgcccagccttagaatgcttgtctcttgagggcagggaccctggctgcttttcccattatccttccaaagctccagctctggggccatgaaccagaaatcattccttcaaggatgttgacacagtgagtcacctgagaaggggcagggtgcaggaggggtggggcaggagatcaggaactggtgtgggacattaggggtgggagataggccagaaagccccatgctctgtgtaaaagcttctgtcaaatgaagatgtgcttgtcctacctaccaggcgaggttactcttagtagcaagtgagagtgtctgctaaagcgccttctaaactgcagagcactagcaatattgttgttaaatataattatagtctgtagctgggcatggtgctgggtgtctgtaatcccagctacccgggaggctgaggcaggagtattgcttgggcctaggaggcggaggttgcagtgagctgagatcgtgccgttgtactccagcctgggtgacgaagtgagactctgtctctaaataaaaaaaaaaaaaatgtatatatgtgtgtgggtgtgtgtgggtgtgtgtatatatatatatatatatatatattttttttttttttttcctgagatggagtctctcactctgttgcccaggctggnnnnnnnnnnnnnnnnnnnnnnnnnnnnnnnnnnnnnnnnnnnnnnnnnnnnnnnnnnnnnnnnnnnnnnnnnnnnnnnnnnnnnnnnnnnnnnnnnnnnnnnnnnnnnnnnnnnnnnnnnnnnnnnnnnnnnnnnnnnnnnnnnnnnnnnnnnnnnnnnnnnnnnnnnnnnnnnnnnnnnnnnnntgggattacaggtgcctgccaccacgcctggctaatttttttttttttgtatttttagtagagacagggtttcgccaagttggccaggctggttttgaactcctgacctcaggtgatccacctgcctcggcttcccaaagtgcaaggattacaggcgtgagccaccacgcccagccaaaaaatatattttttaaaataataataattatagtccgtagggatgagctcaacaacatggttggatagaatcatactggccttgtgagtattgaggagacaatcaggatggtgcctcacccaaggcctggcactccagctattatgaattattcttgttttcataattattataagacatgccctcttccttcagattggggaaaggagttggcagtgctgagaatgcatcgcttctggattgggactaagaagatgggaaaggcagtctggccctagggctttcgtagatccactcaccaccgcaggtccccgactctgaatacctccttcctcccagtgggggttttcagcaagctaatttctcacccctgaggaggaactgttatattcggatgaacacccccctgctaatgtggagcagaaaagtaaggcctggcgagtcagcagctgctcagcaggtggatgggctgcggtggtgtagcgggtaggcgcctgacagcccggcttgccgcagccgctgtgcttccctcccatccctggggtgtgcattttagggtaaaggcaaactggaagctcttgctatttgcagaactccaaaacaacaaaacaaaatgtccactcagctgggggttggctgggcagcaccactgtgattacacagttagcctgggggaagggctgtggtcagagtttgggggacacacaggtgtgactgtgatgtgatacagctggaggaggaagaggagggtgtgatcacaggcccgggagtggccagggcaagagtgatggtggaggagagtggctgaggttggcaggcagggaggagagattggtaactactaatcactagcatgatcagtcttgacaatctatctacaagggactcccaggtggcagggcaggacctgaggcacagctcggcatgacgggcagacaggggtctacgtggctttgagctctgagaccataggcaagctgttcatctgggtgtctttccatgcttacaataatattccccttacaagccctctgatgattgagatcatagaaatcactcagtgcagtggctggcactcagtagcagctcacacaaatgatcagcaattccgacacttgctatgtggccatcacagtaaaatcagcaatagtggatgcccagagctgcatctccgggaagcctctgagccagtcagtgtttgtgctcaaactccaaagcataggatgaaaggtcagatcatggggctatgaagatatgttctcctaggagtcacgaatagggagagaaaacagcagcaaacacagtcaaggccatgtcctgcctgggttgctgtttactttcctcttccaggaactgaagctgtttcccattggatttctttactatcgccttggctcatggactgggtactttggtaatcagttcgcccagagaaccaggctttcacattgacctaggttccacagtgacttcctccacgggatgtcggggtgtgtcatctagcagaatagcagtcaagactacccaggaatggttgagggttgcacactatttttaataaattgaattaaatagccaagaaaagtcagacacccaacaagggaagttgaggcaccaagcgacagtggaaagtcattactaccactaggcttgaaggggtcaggagaagaaatagcatttcctggctgggcgtggtggctcacgcctgtaatcctagcactttgggaggctgaggcgggcggatcacctgaagtcaagagttcaagaccagcctggccaacatggcaaaaccccatctctactaaaaatacaaaaaaattagccaggcatggtggcaggtgcctgtaatcccagctactccagaggctgaagcagaagaattggttaaacccagggaggtggaggttgcagtgagccaagatcgcgccattgtactgcagcctgggtgacagagcgggactctgtctccaaaaaaaaataaataaatagcctttcctgcaaacaccagtgagggctgaatagtggacactgggatgccagcaggaactgtcatagcgacaagacacagcctgggtcaggatggtggcatcaaagctggtagagagtgaggaaggcacaccccacgttctctctccaccgcctcctacctacccttgtctcccgcctgtgcctctgtctcatcggctggacctacaggaaaccagccaggargggagcccaggtgcctccacccagagggctcagccccgctgggtccagagaagggcatacagggaggccgccaaccaggtagcctttccccaaaaggcaaagctgtggaggaggcatccactcagcaggtgtggaaagcaggggggatgagagctctggcatcctagggtctgagcggctgctgctgctactttttgggaaggggctgccaaatcaaaactagttactagttcaaaatttgatcataaagggcaattaggaaagataaggaaataaagaacatccagattggaaaggaagaggtaaaagtatttttattttcagttgacatgatcttgtatagaaaaacctagggaactcattaaaaatctatttgaattaaatgagttcagcaaggttgcaggacataagatcagtatgccaaaatcaattgtatttcagtagcagtgggcaaattgaaaatgaagaaaacaattccatttaagatagcatcaaaataaaatatttgggaataaatttaataaaagtgcaagacttatactctgaaaactatgaaacattgttgaaaacaattaaagaagacccaaataaatggaaagataccccatgatcatggatcagagacttaatattgttaagatggcaatacttcctgaattgatctgcaatccctatcacaatccaagatgccttcattagcggaaattgacaagatgatcctaaaattcacagagaaatgtaagggaaccagaacaaccaaaagaatcttaagaaagaagaacaggctgggtgcagtggctcgcacctgtaatcccagcactttgggaggccaaggcgggcggatcatgaggtcaggagatcaagaccatcctggctaacatctctactaaaaatacaaaaaaattagtcgggcgtggtggtgggcgcctgtagtcccagctagttgggaggctggagaatgacgtgaacccgggagtcagagcttgcagtgagccgagatcgtgccactgcactccagcctgggcaacagagcaagactccgtctcaaaaaaaaaaaaaaaaaaaaacaacgttggaggactcacacttcctgatttcagaatttaactgcagtgtggtactggtgtaaggatagacatatagatatatagatcaatggaatagaactgagagcccagaataaaccctcacattaacagttaattgattttcagtaagagcgccaagacaatttaatgggggaaagaatagtcttttcaacaagtggcgctaaaacaactgtatatctgcatgcacaggaatgaactggaccccacctcataccatatacaaaaattaattcaaaatggaccaaagacctaaatgtaagaagagctataaggagaaaaataagtgtaattctttgtgaccttaggttaggcaatgattttttagatacgacgccaaagcacaagcaataaaagaaaatgaactgtacgtcatcagaatcaacttttgtacatcaaagaacactatcaagaaagggaaaagacaacccacaaagtgggagaacattttggaaatcatctatgtaacaaggaacttgtatctagactacctcaagaactcttggctgggtacggtggctcacatgggaggatggcttgaggttgggagttcaagaccagcctgggcaatgtcataagaccctgtctctgcaaaaagtaaaaaggaaaaaaaaactagctacttgggaggctgaagcaggaggatggcttcaggagcccaggagtttgaggctgcagtgaactatggtcgtgccactgccctccagcctgggcgacagagtgagactctgtcaagtaaaatcaataatattatgggaccaccatcgtatatgcatttcatcattgactgcaacatcgtgtggcacatacctgtagtcatatgatgggatattatttagccatacaaagaagtgaagtactggcacacaccacaacacggatgaaccttgagagcaatatgctaagtgaaagaagccagacccaaaacccacataatttatgattctgttgatatgaaatgtccagaattggctgggcacggtggctcacccctgtaatcccagcactttgggaggccaaggcaggtggatcacttgaggtcgggagttcaagaccagcctgaccaatatggagaaaccccgtctctactaaaaatacaaaattagccgggcatggtggcgcatgcctgtaatcccagctactcaggaggctgaggcaggagaatcgcttgaacccgggaggcagaggttgtggtgagccaagatcgttgccatagcactccagcccgggcaacaagagcgaaactccatcttaaaaaagaaaagaaaagaaatgtccagaataggcaaatccatagagactgagagtagatgagtggttgccaagggctgagggagctaagggggttggagcatgacagctaggggataggaaatgttctaaaagcggattatggyggtagatgcacatatctgtgaatatatttaaaaagccattgaattgcactttatttgtttcttgagacagagtcttgctctgtcgcccaggctggaatgcagtggcgcaatctcggcttactgcgacctccacctcctgggttcaagcgattctcctgtctcagcctcctaagtatctgggattacaggtgcctgccaccacgcccagcgaatttttgtatttttagtagagatggggttttgccatgttggccaggctggtcttaaactcctgacttcaagtgatctgcccacctcagccttccaaagtgctgggattataggtgtgagccactacacccggccattgaattgcactttatgtgtctcatctatatggtatgtgaattgtatctcagtaaagctgttaaaaaacaaaaccctggccctgaagggcagcgcagtcggctaaaagactgtgatttaatgaggaaactttcccaccgggctgtgaccgctggccctggctccctttggccgggtggaggtgctgtctgccactgagggccctcagctgctttttcaggatctcagaacatgggaggaccccagctccagaagaaaatcttaattccagtttaatcttaattccaatttaatttggttgagttaaacatttttggaactgtactgtgagctaggcaccaggctagctgctctcatgaaaaaacaggggccctggagctgggcagccttaattattcttgagtttgctacttcctgtgggtccttcccagcctcaattttcttttcagtaaaatgagggttgataataccccatgagattgtggtgacaattcagtgggctaaaaggaagatgcctggaatattgtaggcagaaaatgaaagtttctttccagtgctcctggagcaagttatctctaccaagtggacataacaaagatgagttagttatgtctgcccccgtagagctcaaggctggatacatgacctgtactcgctaaccagggcctggggagaagcaggccaggaggagggtccctgtcttactctggtcctgggttgggaaccggggaaggcttcctcagggagggggcaatgaagtgaggctttgaaggaggatagcttttcgcatgttgtattttattcgctttttgtttatttattttttgtaggcaggtctctctctgtcgcccaggctggagtgcagtggcataatctctgcttactgcaacctctgcctcccgggtttaagcaattctcctgcttcagcctcccgagtaactgggactacaggtgtgtgccaccacatccagataatttattatatttttagtagaaacggggttttgccatgttggccagactggtgacgaactcttggcctcaggtaatctgcctgcttcggcctcccaaagtgctgggattataggtgtgagccactgcaccccgacttagtcactttttgaatagataatcaagtacatggtgccaattcaaaagggtcaaggctgggcgcggtggctcatgcctgtaattccagcactttgggacgcctaggcaggtggatcacctgaggtcaggagctcgagaccagcctggccaacatggtgaaaccccatctctactaaaaatacaaaaaaatcagccaggcatggtggtgcgcgcctgtaatcccagctactctggaggctgaggcatgagaatctcttgaatcccgggggcagaggttgcagtgagccgagattgcaccactgcactccagcctgggcgacaagagtgagactccatctcaaaaaacaaacaaacaaacaaacaaaaaacaaaaggatcagcagtgaaagagaaacctttcccagaggcagccactgttaccagctcctgaagtgtcattctagaaatactctatgtttatgagtgtatgtgcgtatatataggcggacgcttctcatctaggcagattttcacagcatccacattgtggtccgtggggatcaggggcctcctgctaaggtgtgggttaggcttcaggtgttatgttcttgctgctttcgtgtcttgcggtcaggttcggcataggccctctcatcagtaagagtgaggcttcattttcctttagttccccttgaagggagccagcggcgctgtccatcctccttgcccctctgctcccttggcgtgccctctcccagggatttcctctgtctttctcctttgttccccgctcctctttctcgtttgcttgctcccttgtttgggtgcagcatattgacagcagcttcctaacaaagacctttgccttttcttgttattttactttcatacatggttgatagtttagctggatagagaatttcaggttggggccaggagccatggctcatgcctgtaatcccagcactttgggaggccgaggcaggtggatcacttgaggccaggagttcaagaccatcttggccaacatggtgaaaccccatccctactgaaaatacaaaaattagctaggcatggtggcacatgtctgtaatcccagctactcgagaggctgaggcagaggattgcttgaacccaagaggtggaggttgcagtgagctgagattgtgccactgcactccagactggatgacagagccagactgtctccggaaagaaaaaaaaaagagaatttcaggttggaaacaatttttccttgacaagtttgaaggattgctttgcacttttctaacttctgaaactgctaagaagtccaaaacctttctgatttctgatacttttgtcttttttttctttttaccctcctttgggaaagcttacaggatctgaaattggacacagtgccttggtgtaggcctgtgttcatctgtttcgtgaggctctcagcaagtccttccagtgtggaaactcatgtcctatcctgggagtttcttgaaacattccttttcttgccctctgttttttactgttctgtctttctgaaactcctattatttagtttttggatctcttggactgaccctctaatttttttccctttttcacctattttccatctctttgtctcttttcttcagtttctagaagatttccttttatctttcaacctttctattgctttgtcttattgtattttttaatttccaagagcttttttgctccccaaatggttctttaaaaatgtgtgtagcatcctatgttttcactgatgtaatcgtttcttatttctgtgagaatgtgaatgccatgtttgtctctaagttttcttctccctgcatagttggtttcctccaaattgctttctctgctctttcctttggtctccatcctctttgaatgaatctgcccagggacctttggttgcccactcataattattaggagggtctaaaatgctgcctgggagctggagcaggtgggggtccagttctgagtttaccagtacatgatctgggcaggctgtttgttggggaacctcagtgtcaacayctgggagctcagttggggaagggggtagcatgcaaagagtcacgtaacctgccacccccatttttggcaaggtccccaggccctcaactgtgcctcgaatttcccagtccagagaccccacacttttccctccccagaaagtaaacctctgttcttccagggctggagaggggaggtctctggcatgagatgggggaggtaggggtctaactgctatttttttttttttttttcctgagacggagttttaactcttgtcacccaggctggagtgcaatggcacaatctcggctcacttcagcttccgcctcctgggttcaagtgattctcctgcctcagcgtcctgagtagctgggactacaggtgcatgccaccacgcccaactgatttttgtatttttagtagatacggggtttcaccatgttggccaggctggtctcgaactcctgacctcaggtgatccacccgccttggcctcccaaagtgttggcattacaggtgcgagccactgtgcccagccctgattgctttttgaaagctttcagcctgccctctttatacacggcagcccgttcagcccattgtggaggtgggaggcctggagctgcagttccctggcctttggaggattcctggtggatggtgggaacccgggtgttctcagcctgctccagacccaggctgtgaggtcagctgacgcgagctgcgctccagcttctgcagtcatgttgctgttgtctcctctcctgttctgcccttgggggttcatagctttaaaaatatatatatatttgctgaagtcttagtgggatttcataagggagggagaaaaattagatgcatacctgagacaggagcaggacttgcatgggcaaaagctgggacgggaagggtgttctaatggtagagggagtgctctgagggagaggggcaggtgctaggatttctgagaacaaagaggaggcagctgggctgcagctggagaatccgggaggctggggcatggggggacaaggctggacaggcagggtgcactaattttgggggaggtccccaaggagacttgagtttcccacctacagacagtggggagtcagagaattaccccacttttcaggaagagtgccgtcatgcctgtatttggggatgctagctatccctagtacctaatgtggattggtagctagagctgtggtaatgagtaggaggtttttacgatagttaagtagtaagaagaggacatttcagggtcctcttcttagaaatgaaaagagggaaggatgtgagggattaaagaggtaaaactgcccagacttcttgaccagatggtaggtgagggaggggaagagctaaagaagaccctaagcttaacccttggtgaccagggagagggtggtgaggaaggaaggaggaggtgtctggttgggtttggtgtatgtgtgcagtttgggagggggagtgagggggtagggggcgggggctaagttctgctatagaataggcatttgccatgtccaccaaaaagcgtgattttacacccccacgcttcaacctccaagtgcctgtgttgatggagagagagaaagaaggtgttgagagcaggggtaaagaaatcagtcccttagaagacaaaagaataattttccagttgttaaatgagattctcaaaagaatttttatgttgatatcctcaaagattaattcatgttgcagaatgtcattggaactaccttaagacattgatagagtgcctgtctgctgtcttccttagctcatcctcaygttttgatcaaattaagtacttggacaccaggtctgtaaaaaagaaaagagccttctttatttgggttctgtaggcaaaagggagagtggagaagcgactctgtctacgctgctcccctcactcccsgtctctgggcccttctgggatttgcatgccacccactgctctgtcaggagtggctcttagggaagtgaggaaagggccttgattatagtgtttgccaatttctgtggcataaatatgcccactgtggcccgtgtcaggctaccaacgtgatgtcatagcacagagctggagtcaggcaagcccgtgggagtgagtcgtgccctggggtcacagtgggggtcctcactgacacggtgcagctggacagcagaatctcatctttcaggtcgtctgacttgttctaagggtctgtcagggttgaatcatgcttgccaagtagcatcttaaaagatatttccactgcagcagccccagcccttcaacctgggcttctgtggccttctaattcttccttctctgcctcccctccacccacccccacatcatcagcagcagatccaacatgaataccaaacactcacagttaatactaaaagccaacaatttttttttttttgagatggagtcttgctctgtcacccaggctagaatgcagtggcgccatcttggctcactgcaacctccacgtcctgggttcaagcgattctcctgcctcagcctcccgagtagctgggaagctgggattataggcgcccgccaccgtgcctggctaatttttttgtatttttagtagagacggggtttcaccatcttggccaggctggtcttgaactcctgacctcatgatccacccaccttggcctcccaaagtgctgggactacaggcgtgagccaccgcgcccggcgacatttttcttaaagttcaatctctcatctctgatgcagctcgcactcattattgccatccttggagcagctgtggcaaacgagtagcttggatgtcagtaggaagtcttgtctctacaggctgacctgcctggactgttgctttgcccttttggttgtgcgttctggaacgtgatgcctgtgcttgtcagccttgatgagtcacattgaaaaagctcttagtcatcccaggccctggctgagtcagtgtattgggtgacacctgtggccaagcactggctgttttacaactgagactgtcccagaactcttaggcactctggtctcaggggaagtgttcttcatctagttcaaggccagtctttcacccgagcctcgcagccttgttcccggactcgccccaccttttattctcatccttccttcttcaacttgtcattccctctcaactccttccccttcctcttcctataacttgctaaacatcctcccaagcgtctgccatgggtataacagagaatggattcatgcctagaatacataaagatttattacagctcagtaagaaaaagacaaccagcccagcagaaaagtgggcaaatgatgtgaacaggcagttcacaaaaggaaaaacctaaaaatatatccacaatcataagaaaatagccaacttcagtaataatcaggggactgaaaattaaaatgataccattttatactacaaggttgacagaaatcaaagtctaacaatataacagttggtaaagatgtggggagatagacattctgttgtatttctagtggctgtgtaaattattaggataactaccttgagacttatttggcaatattgatattaaaaacttgcctattggctgggtgcggtggctcacgcctgtaatcccagcactttgggaggctgaggtgggtggatcacctgaggtcaggagttcacgaccagcctgaccaacgtggtgaaacccgtctctactaaaaatacaaaattagtcgggcatggtggtgcattcctgtaatcccagctactcgggaggctgaggctggagaatcgctcgaacccgggaggcggaggttgtggtgagctgagatcgcgccattgtactccagcctgggcaacaagagcaaaactctgtctcaaaaaaacaaaacaaaacaaaacaaacaaaaaacaaaaaaacttgcctattaggtgggcacagtggctcatgcctgtaatcccagcactttgggaggccaaggtgggcagatcacctgaggtcaggaggtaaagaccagcctggccaacatggtgaaaccctgtctctactaaaaatacaaaaaaaattagttgggcatgttggcgcacatctgtaatcccagctactcaggaggctgagccaggagaatcacttgaacctgggaggcggaagttgcagtgagccgagatcgcgccactgcactcaagcttgggcgacagagcgagactctgaaaacaaaaacaaaaacaaaaaaaaaccccatgcctattgtctgacgcagcaattccaattctaggtatatgtcctagagaaatttttgcacattttctatatggggtcaaagttattcattttttaacacttttaatcgactacttttatatagacacaaaaatagagcaaatagtataatgaactctatgtacctgtcgcccagcttcaacaatgatcattttgtcagcctatacaacacagttcttaattgctaaaaattggaaacaaccgcggcgggggaggtggctcatgcctgtaatcccagcgctttgggaggctgaggtgggtggatcgcctgaggttgggagtggagttcgagatcagcctgaccaacatggagaaaacccatctctcctaaaaatacaaaattagccgggcatggtggcacatgcctgtagtcccagctactcgggaggctgaggcaggagaatcgcttgaacctgggaggcagaggttgcactgagccaagatcacgccattgcactccagcctgggtgatagagtgagactccatctcaaaaaaaaaaaaaaaaagatgaaactgccttatttatttatttattttttgagatggagtctcgctctgtcactccagcccaggcaacaagagtgaaactccatctcaaaaaaaaaaaaaaaaatgggaaacaatctatttgtcactgccttagtctgggctgctataacacaataccataggttcattaaacagcagaaatgcatttctcacagtcctaaagaccagaaagtgcaagatcaagtgtcagcagattcagcgtctggtgagggcccactgcccggttcatagatcactgtgttctcacggacaaaggggaaacagagttgtctgatctcttctgtgaggcttctaatcccattcaggaaggctctgctaccagccgctaatcttctccccgaggccccaccttctgacactgccacattggttagggtttcagcataggaatttggtgtggacacaaacattcaggcaatagcagtccctcattcggcatgtacagattgcgatatgtctaatagaacattgtgcagtcattcgtgaagtaggtctactgtattaacatggagagatttcaaatatatattgggtaaaacaagttaaaatgattatatcatttatgaaaaaaattagaacatatggttatgggcacacaaatatccaggtgaaatcaacaaaggggaagtagtaactctgcattgtgggccccctgggagaaaaggagaaaaggacccggaatggtattaggaagaatcacaaaggaactgcacctgtttgcagagtgtggttttttttcccttttggtaagtttaacttttattttatcaaaataatacatgtgagactgggcacattagctcatgcttgtaatcctagcactttgggaggccaaggcaggcggatcacttgaggtcaggagttggagaccagcctggccaacatagtgaaacccccatctctactaaaaatacaaaaatattagctgggcgtggtggcgggtgcctgtaatcccagctactcgggaggctgaggtgggagaattgcctgaacctgggaggcggagattgcagtgagccgagatcatgccactacactccagcctgggtgacagagtgagacgctctcaaataataataataatacatgtggacacttctgaaagtcagattgtaccctgaggctcatttgcccccgccacccctgtcccactgccctccccatgagtgcctcccagaggctgccctgcaactcctgttccccacggcattgctctgtttagtggtctcctttgatggaagattgagctcacttttactgccctccccatctcaaaccctgccccacacatgtacccactttccctcccttcaccctgcatggttatatagaaacacttttaagtacattttcagaatttacatttttgttttgttttgttttttgagatggagtctcactctgtcacccaggctggggtgcggtgtcgcgatctcggctcacagcaacctccgcctcctgggttcaagcgattctcctgcctcagcgtcctgagtagctgggattacaggcatgcaccaccacgcccggctaatttttgtatttttagtagagacggggtttcaccatgttggtcagggtggtctcgaactcctgaccttgtgatttgcccgcctgggcctcccagagtgctgggattacaggtgtgagccactgcacccagccaagattttacattgttaacattaagttaatattcacatctgaaaatacagagtgtctactatggtggcattaacttttcattttcctggagttgatgttcatccccagacaagttgtgcgttgccatctcctcttcattctttcggagacaccaggtaatctgcctttttgtttgtttatttaaggccacatccccaggagctgctgtccaggtgcctggcgggtctccaggcctgtggacagcgagcgacctgggcctccctccccatcgccgtgggagttccctttgcctcctctgtgctggctgcccaggtgcctggatcccttgtcttccttattcttggtttatttagtcctttgttttgttcgtgcccatccctgggcttcttgggcagacaggctcacaggtggcacacctcccaaggcctggcgtgtctcaaaagattggtattttacccccactggattagtagtctaactggatagaggactccagcttgggaagcgttttccctccaaaattggaggacattactccagaagcttctgactccatgtcactgctgaagacagttgtgtgtgacccttggtcttcagaagtgtggtaggctggagatggcctccaaaggtacccaggtcctaatcctagttgttaccttagaaggaagaagggctttttcagatgtgatgaaggattctgacctggaaaggtgatcccggatcatccaggtgggccccgaatgccatcacaagtgtccttagaggacagagacctatgctgaggagaaggcgatgtggagacagagccagaggtgggagtgatgtggccacgagcaaaggagcccggcagccatagaggctggaaaagactcgggagggattcgttgcaggccctcggaggggcgcagccctgccctcacttggtttcggcctgtgaaagtgatgttggatttttgacctcccaaactgaaagagagtgggaggtctcttttggcatcccaaactgatctttcttctgagtgggacttttggcatcactccaggcgctccaagacctttccacatggatacgcgtccttcagtcccgggagactttccagcaggattcccctgcccctggctctctcgtctccccttccgggagtcccaggcagctggatgctggacttgctggactgagtctcttattttcttatcttttctcctattttccatatgttagtctttctgggtaatgtcccaaactatcttctaattctctatttattatgtttaaaaattttgcaactctatttttaatttcctagagctctttcttgttgcctttttaaaatagctgccgcctcttacttaatggatgcaatagcttttcttgtttctctgaggagataaattatagtttttctgagtatctgttctctatattacttttctcctcaatgttcctgttttttaaaaatcccaatttgttttggtgaattttttggtcatttcctcaaatatctggtggtggttcgctgaccgttcacactgaaaaatgagacaccaacacccattggcaagtctgggttggggtggagcttggtggcccctggtcctctcgctgggagatgagactgggctccctggggagcccactgcataccagtagctgcaggactcctggttcctggaacggaagcttccagttcgctgcctggaaaagagcccagtaagcactctgtggagccgagaggaccttccacacattccccaacagccatgtgatgcctcacctcctgggccagccctgatggccggggctggagccttgtatcttgggaaagacgctgtggcacagtggtcaaaggcaggaccctaggttctgaagccaggggcgtgcaccgtggcactgacacatcctagcagcgtgccttcctgccttcgtctctggagcgggctgggatgactcccaggtctctgcagctcagaactctttacacaggagactcactgtctagctgtctgttctttccagccggatactcttcaggttcaaagctgagtcactgtttctacccacattggcttcgcgttctttaatttggtgttgccatcgttcaccttaaaacccagggccacccttccctgctgcctctctgcctcccatctaatgggtgctgttgatgccacctcctaagtatttcttggcacagtccctcttcattcctattcccaccaccgtggttcaggtcctcattgtctcttgcccacattagaacatcttcctagctgaccttctacttctcatctttccttctcaaatccagcttccccagagctgccacagtggtcctgagctctcagttgcaaatctgtctccctgctgcctggtatttccatagcatcccgacatagaggacactgcccaagctgctggtggggcccactagctctggactgagtctcaggctcagcccttaggctcctctccctgcctgcactccctgcctcagcgggccacgccaggctgtttgcttcctgccttatctgcctttgctccagccgccccagcacctggacctcctcccctcctctgcctgcccccctccctcccctcttctccctctggacgtcccttcctcctcccaccctggagtctttccttcaggccatcttgctaactctgccctgctctccacgcaggcgtggcccgcctcatcatccttcacttctcatctctgctgcctctcactcagcctgccccagccagctgatcacagtcccaaatagcgacatgctctgaaagccaccgctgtggcctgcatcaggatgtgcggatgagaggggggtatttttaccatcattgtgcttctccagcccctggtgttaggatctgtataggatctggttatttgtaggcaacctgggtgtattagattcctacagctgccatcacagggtgccaaaagctgggtgaaaacaacggtgacttcttgcctcacatctggaggccagaaaccccaattcaaggtgtgagcagggccgtgctctctcggatggctctgggagggtcctgcctggccactgccagcttctggtgtttgccagcagtccttggccttgcctgacttgtagctgcctcactccagtcatgtggccgtcatctcctgtgtcttcacatcttcattctgtgtgtgtctgtgtccagatttccccctttttataaggacactaagcatattggattagggccaccctaatgactttatttttacttgattaccctatttccaaataaggtcacttttttttttttttttttttagacagagtctcactgttgcccaggctggagtgcaatggcgccatctcggctcactgcaacctctgcctcccgggttcaagcaaattctcctgtctcagcttcccgagtagctgggattataggcagccaccaccacacctggctaattttttgtattttttggtagagatgggtttcgccttgttggccaggctagtcttgaactcctgacctcaggtgatcagcccacttcagcctccgaaagtgctgggattacaggcgtgagccatcgcgcctggcccaaataaggtcacattctgacctaggtgctaggggttaggacttcagtgtatcttttttggtgggggacacaattcaacctctaacaccgggtgacacccgcttgtcctgagcttgacaggtcccgaagtccccaaggcctctgggaggccctctctaatccagccagcattcatgtcctgtcatcttggaacgaggggaattgagtggggagcaggtcctgtgaagctctccagcaggggtggggtggcctgaagagggtcgggaaatgtcctgggccacctgcaagtgtctgctgggtcctggcatcttcctccctgcaaagattgtccagttctgtttagaattgagtctttggtgcccctagcctctgtcgcccctcgcagccctgaaactcagcttccctggttcccattgccaggctgcgtctgagtccttttgggctttagtgacaaaataccacaggctgggtggcttttaaacaacagacatttatttctcacagttatggaggctggaagtccaagatcaaggtttcaacatatgggtgtggggggcacaggcacgctctgcattagtctgggaggtgctttttgctgaccttgtccttcagaccctctctctgtcctgtcaacatcactttgggctctaatcaatatgtatgggacatttgtgtgtcccactagtgtgtgtgtgctgttcccaggaggggccaagccttactaatctttatctgaatgctccataatatttctaggtaaatctttttttttaactaattgattaattattttttgagacagagtcttgctctgttgcccaggctggagtgcactgggaccatcatggctcactgcagcttcaaccttctaggttcaagcaatccttctgcctcaggcttccaagcagctgagactatctatgggcaccaccatgcccagctaattttttttttttttttttgagatggagttttgctcttgttgcccaggctggagtgcaatagcacgatctcagcccaccgcaacctctgcctcccacgttcaagcgattttcctgcctcagcctcccaagtagctgggattacaggcgtgtgccaccatgcccggctaattttgtatttttagtagagatggggtttctgcatgttggtcaggctggtcttgaactcccaaccttaggtgatccacccgcttcagcctcccaaagtgctgggattacaagtgtgagccacgtgccaggccacacccagctaattttaaaaagttttttttttaattttttggcagagacaggatctcaatatgttgcccaagctgatctcaaactcctagactcaagtgatacccctgcctcggcctcttaaagtgctgagattayaagcatgagccaccacgcctcacggtgaatcttaacagcctcatgccactctgcaacctcattgtgacctgaagtatttcttcactgattcattccctcagacatttatttagttctggtcttacgcactgtacagagtgccagggagatgtggggacaaaagagaccagggatcctgtgcccagggccctaacagtgtctattaaaggagacaagacgggtcaacaaatctttataacattaaatgctctttgctgaggacacagacgccacggagacctcatggagagccccctgagcaggacgatgggtggggcacagacaaggacagagctgagggaggtggctgcccggggaatatagggaaggcattcctgagcctactcctataggatgtggaggaatggggacaagtgaccttcccatgtgagccctgcccacaccccrtgctgcagggtcrgcaggaagctggctcctcgtgcgccagggggcagtgttggccctgaaattctcactgctttccagtgaggctgggatggagcagccacctcactgcaggccctcgggacccctcactctgctttctctgagaccccctttgtcccccagtccacaagtcccgagaccatggcgccagtcgcctcggtgccaccctttccccctcggctgctcctttgaatagagggttgccagggcgatgaggagccctgctggcactgttcactgctgttcgtcgccgcagtgccacttggagcagccggcgctcctgggggcccagagcccggacagctgagcctcggcgagcacccgtgctgtgtctgtttccgtctttggtattgtctctctcctgtcttctgtgtctgtcacctgcattgtttccagcgtcctcccttctgccccccctgcccagaaatctcagcctcagtctgtcctctcttgggtgctttgatatcagccgtggcagccctgagagccaggtggagtcgttctttcatctgtccctcttggctgccagccctggggcccgtcggacatgtttagagcagagccgcctggggagagcggccccatccgtcagagctgccaccgccgcagccccgagtgctctgccaagagctctttctttctggttctgacctgctttcactggcagctgtggagcccagctggggctaggggcacagcctggtgcgggtgctggtgctgggggcagctgggcccataggaagtaggtgtgtggagctttgttggttcggaggttcctggggcctgtttctgaaccacacttctttcttctctgccctctgctgctctccagcacacctctgaggatttgctgagggacccaggtgctctgctgggctttcagaaccaacttgctggccacccgcccctgaagcagggcctggtctttcccttcctctgcggcctcttgcccactgctgccctctgaggctgcaggagacgctctgtgaggacaggaatatgtaggacgaagcgatgtggggcctcagctgcagcagctcttaggtggcgccctgccctggtccccagaaaggctgctgagcactggggccacgttgttgtctggaacaaaacttgggggatgatggcctgacagcaggattctgtgctccttctggttgcaagaggcatcctgggagatgtagttcaggtctgaagtagtgggatttcagggacattttgatgatttattagacaaattgaaactgccttggcttatctgggacatgtgactgctgacattgttsgtcagctctcgttgggaagctctgagtgccactggtggccctgctggaggccaggccagtgacagttttatcagaagtggggtttttggttttggtattttggtttccaagtgcctgtcacactgtgctcctgatgaaagccgtgacttactcctttagttgagtgaagagtccataggccaactctgatgggtccgagctcctgctctggagggggccatatgaagcgggctccaggccggctctgctggtggcctgggtgtgtcacttaatcccactgcacctggtcccttacctgtacagggaggtgatgaggggctgtgagggttactgagtgagtctgcgtgaagagccacagtggcccctgcctggcaaggagcaaggctctgctggggtcactgcccaccattgtgccctcctccactggcactggccgggcaccaggtggagctcagtgagtatgtgttgtgtgctatggaagcggcagctctgtcaggagcggggcaggtgacggccaggccctcgccctgcctcagcctgcaggtcgtcgtaggtgccttcctgactcccttctggaaggggaatgctgagttattgatctgaagctgaagctgggagggaaatggaagctgtggagtcacccgagaggcagcaggggaggaagcaggtgccccacacactactggcttcactgtggctcattcttgcttgcaaggagttatttacacgtcccaagtgacagtcaaagctgtcttatttcttggtctcttatgcacaacccgaggccaagaaaagggatctgtcagctggcatttgcagaaaatagcaagtgggtctctgggctgtcagctctctggagaggaaaacagggtgaaggatctttgggtgatggtggttgcttttctctcactcactcactactgtttccccatttctgaggtcagaaagggagagctttgcttgtgtgtatcaccaggagcaagcaagacagtggcatcccccgaggcgtgtaactgtaacctgagctggttgctggccctggcagcatcccagaatgcccttcacacctggggctctagcagcctcccttgaagagttgcggctcagctcgagggagcaggaaacggctctgtgggttctgttagtaaagccctctgcatttccagggaagcttctcagccaaacttgacaaccttgagaacttcttgattgccatccaccaaccaaatacccaaaagcagggtgcagcatgggactgcagcatgggactgcagcatgggaccgcagagggagcctggccccagccattgctgccccctgcttcctgtgcctggccatcgcctattctgtgccgtgctgtgaagatggcaggaagtgcctggaatggtgccagccagaagggctgcagactggtggcacttgctgggaatgtgccattgtgagttgaaaggctggcatactccagtgtctgggcttggtttcgtacagcctgaggaccgggagtgtcattaataccagaggcaaggcttctgggggtctcaggaaggccgtctcccaccctctgctgccacttccgagggtcaccataggtgcctccagctgcaggggttccttcttctataccccaagtgctgtgcagaggcccctgctcccttcggctttggggaatggtctagtattggggagcagggggagtctgcccacccagctcctccctttgaaccatcccagacccctcaagctcagcatacccagagtcggcttattccaccataaccttgaagaccctgcttcctggagagagggtggtgtgagggggccacgcccatcttacagtgcggtttctcccagccgatgttgattctggaaaggcctgggtttcagatctgggaaggcagtgccattcgataaggaaaaactgggttaaccaagttctaggaagggtgcaggcgccctgggaatgcagtggtgtttcagttcatctttatgtctgttgggccccatccgtgcctggcattgtgtgcgggtcagggagagacaggttggtggtgggggtcttgtgtgaccacagcggtgagcttagtttcagggccatrmctaggttctaaggagcagtgcagccctcaccctccgtcattcacagcagctcctgacagccttccccagccccacactgcctgctggccaacatttccgtgtcttccgcctcactcggcagcacatcccaaatccatcacagaaacctgccctcccgtctctgactgcctcctgtctcagaccacctccctcatcatcttgccaggtccctagggggccgagggagcaggctgtgggctgtrgatcagctactctctgcgtgacccaacctcccgcctccctgcagccagcggcccatgccagcttctaggcctcaggttcacagcctctaggctcactgctgccccttcccctgattgcagcccaggcctccagcagccttgtgttggggaactttgtattctgggccagtaacctcaggcagaagagcagctgtctgtggctcctcagacaccctcctctgtgcactgaaggccggtacagggtgagtgctctgggacaggtgcccccctctctgcaacacctgacactcccaactacttttgtttggggtgggtcttcctttgcagaggaatgttggggacaggtttctgcattggcaaaagcacgtggtgtcctcgggcctgtgtgtttgctccaagtgtatgtgggcatcacacctgctggctcccctatgcagtgaactctgctaagcattgggtgcatggtcagcctggcttggtgggtgggctgcctgtgctgccttcaccccaggacggcctggcctgtggggaggtcagcatggagctgcatcatggtgcgagtgggagggcgcaagtgtgtgggccttccagctgtgtggggccgggggcttcctccctggccctctgttcatctgggaggggagggagttgggaagatagtgacagcagctgatgtttgtcacccaggcatggcgctttagctgtactgtctcagtcgacccccaggatgacctgcttagggtgggctggtggaaccccgttttacagatgtgaaagctggggcctcagaggtgcccaaaccatggagctggggcagcccccggccagtggactgtgggcctgcgctgggctgtgccccagaggaggctactctctgttccacttttccctgctctgacttcagccgaagagccctgatcttttcccttccataaacatctgcctggcatgctgccacccaaagagctcccgtgccccggggacagtcctcttggcctcaagtctaggcctgctttcgcttccctctgagggacacaaggactcacggaggcattcctgtgccccccgctgcccacagcctccggctcttggtggagtgggactgctaaggaatcctttacccaccaagaaaaaatgaggatccaatgcaagaatgtatgtgagaggggccgccgagggggcggcaacatgtcagcactccatcattttcctgcctgagctaagcagacacttggtggccacgctgtggggcagggtgcagccttccagaggctctggaggtgaccggcctttggcatatcttctgaggaaatctctttctttgcatggaaaaggcagtggggagtgagtgtggtgtggacaggggaggagagcaacaaaaatgacctgtttacccacaaaccacgggtaagtgcccctgtggtcgcagggtaaacccacccaggtgggaggaaaggactggggctccctggaaaaagcttgaaactgccctggaggtttgagaatctcggtgccagtgggctgctgccagctgtgaggctgctcacctataggcaggccagcaggtgaggagggggagggtgctaggctcctgggagacacatagccaagtcctcccacccaaggagtcggtgtagcaggagctcccttcgccttttcctgcggagctcttcctgtcccttctgtatatttcttcttttttttctaattataaataacgcatccccaatggagaaaatatggaaattttccatatggaaatatagaaaagcataaagaaggaggaaaacacaactctacagcaattccatagcacgtgggagtgaggagggtggcatgcaagcagtcctacagttgttgccattcctttaaaaaaacttcatgagatcatgttgtttaccattaaattttcttggcttcacattacatcacargcatttcccatgtcatcaaaacctgtgcaaacacattattgttaatggttacataatgtctgtgggagccagggtgtggaatctttaaattgcttctcatgattttctgttgtaaataatgctgctttgaacatctttctgcgtacatcttggttcccattttggaatatttcctggggttggatttctggaatagtaatgactgggctcaggggcataacccgccaccatgcctagctaatttttttgtattttttagtagagatggggtttcaccgtgttagccaggatggtctccatctcctgacctcgtgatgcacccgccctggcctcccaaagtgttgggattacaggcgtcagccactgtgcccggctttttttgttttgttttgtttttgagatggagtctcgctctatcacccaggctggaatgcaatggcgcgatctcggctcactgcaacttccgcctcacaggctcaagcaactctcctgcctcagcctcccgagtagctgggactataggcgcccactatcatgctgggctaatttttgtacttttagtagagacggggattcaccatgttggccagggtggttttgaattcgtgacctcaaatgatccgcctgtctcagcgtcccaaagtgctgggattacaggcgtgagccaccgcgcctggccgggcataaataccttaaaggctcttgataagttttgcaaacagcttcccggagaagctgccgtgatgctcagcagtgcctgcgggccgcctcctgaaggccttcctggcgctcagcactgcatttacaaagctcccaggcaggagtggcacctcatggttgtattttgaatctcttgctttctcgtgggttcaagagccacttgtgtttgctgtcttgttgctgtgcttgtcccgaaggctcccctcgcctcttcctgactttgccctatgtggtaacttgagctcttttgacatggcctttcccagcgctcagcagagtagacatttggtgcccaggaggagggtgagatttacaccccacacctgctctctgatgccagtgccgcctgctcccagctgggaaagacctgtcctcctagtgggcagcatccgataactcgcctggagcagggcttagaggattgtagatctgcatgtgggagatagcagggtgataacgtctgacgttcatcctgctctgagcagggtgtctccacacctgagctcctcgctggtgctcccggcacctcttgagcagcaggtgctggggcatgcactccctaaggttatctcctccagcggcattagcggtgggtatggttcttttcacttgtcaatttgaaatgatttcagactttcagtaaagttgcaagagtaagacaaagaattctcgtacccctgaccccagttcccccaatactagcatttgcttcattgttcccgtttttccctgaaccatgtgagtgggtgtaaattgcagatgtggtgctcgtggacccttgagttcctcagtgtttttccctaagaatgaggctgttctctaacataaccacagtccactgatcaagatcaggaaattgatatcaacgcaatcctctttcaaacctgcagaccttatttaaattgtatcgttgtcccctgatgtcctcttagcaatagaaacccggatccaatccaggatcgtgtgtggctctcaccattgttgctttggtctcctttcatctgaaaccgttcttgcgtctttgtctctcacgacctttgacatgtttgaagagtccaagccagttattctgtggaatttccctgaatttgagtttgccccttgctttctcctgattaaattcaggccgtgcacggcagcgggaaccccatcaggaggtgtgtggtatcccttcggtgctagtgatattaaccttcatctctcggtcagcgtggtgtccgccaggtttctccactgtgcaatgaataaggacaaggtatattttagaaagaggaggagcccagagtccagcaaggttactctacccacgttcaccatagccgggtgtgacctgggtgcctcctggtcaccgcagtggccccttcccagcccccatcttaccctgcctctgggagtcatgctctgcccaactcgcgccccatcctcctgagagccgctcgcttctgcccagcgacccgtgcgtccctccctcctccaggcatcccccctgggctccttcttggctcttcctcctcggccagactcaactccagtgggcctgaagacgcaggcctgacccacttctcccaggctgttctctccctggcttcagacaccaccgcccctgtgatgctgcccaggttcttgtccctgctcttccccctctgtgagcttgcctcactcccagccctgccttttctgtcttgcccttcttatagcaggaaaagtcatctccacccacccatacaggatttcttcctctaccttgctttctatggggggtctctcgacgaatcttgtctgtcatagcccagatgtttcctaagccccaccccgacccccatagcttccccctgtcagaggctccgcgtctctcagctcagcctctgaattgccccagacatgcgtcgtctgtcagcccctgctgctcgccagtccagagagatcctttccactgtgcatcgatcatgtccctcctgtcctgtccatggctgaagggaggcctcaaccactgggccctgtctgtggctgcagccccacctcaggccgtgggctcacacttccctctctcaggacagcaccaagcctgttcttcctgagaacttcacaattgctatcccttcttcctggagctttctctgcggatctgtgcgtggccracttctccccatccaggtcccagcttctgtgtcccctcctcagagaggccttttctaatatccagcccccaaacccctgcacccgccccagatcattcgcaaaatgtcacctgtttcttatcttccaggcacttgtgatctgaaatgttctgatttgtgtcttgtttttcttttctttgctcctttcactgccattcatcttccatgagcagaacccttcactgttgtgttctcgactcctaaggcttagaactgtgcctggcataaggtctgcccctagtggggttttctgtttttctcccctggctgtgggtctttcctcctcctcctcttctctttcttctacttatttccttgtttcttctcttttctttttcttctgtctttatttccccttttctaggttgttggctgtaatatggcactaaggtttttgcaatatttgtttcatttcttgagtatgtttttatgttccttacttaaaacaaaatggctgagtcaagtgttttaaacgttttctaagaaatgaatcagatcggccgggtgtggtggctcacacctgtaatgctagcactttgtgaggccgaggcgggtagaccacttgaggtcaggagttcaagaccagcctggccaacatggtgaaaccccatctttatttaaaatacagccaggcgtggtggttcacacctgtaatcccagcactttgggaggccaaggcaggtggatcgcctgaggtcaggaggtcgaggccagcctggccaagatggtgaaacccygtctctactaaaaatacaaaaattagctgggcgtggtggcgggtgcctgtaattccagctactcgggaggctgaggcaggagaatcactcgaacccaggaggcggaggttgcagtgagccgagatcgcaccattgcgctccagcctgggtgacagagcaagactctgtctcaaaaaaaaaaagaaaaaagaaaagaaacaaaacaaaaacaaaattagccaggcatggtggtgcatgcctataatcccagctacttgggaggctgaggcaggagaattgcctgaacctgggaggcagaggttacagtgagcagagatcatgccattgcactccagcctgggcaacaagagcgagactccgtctcaaaagaaagaaatgaatcagatggttagatgaggcccagatgcaggggtgaaaagagtgtgtctggtttggcttgggctctgtgctgggcagctgtctttttagtctccactgtaccttggtttccttcattttacaaatgaagggctggccaacctctgaagcctctttgcattcagggatataagttgtcgtcagttgatttaaatatatatataatattatataatattataatattatatataatatatattataatattatataatataatatataatattatatataatatatattataatattatataatataatatataatattatataatatatataatattatatattatattatatataatatatattttatatataatataatatataatatatataatatattatatatatttatattatattatatataatattttatattttatatataatatattatatataatatatatatattttttaaagatggagtcttgctgtgtcacccagactggtacagtggtgccatctcagctcactgcaacctccacctcccaggctcaagtgattctcatgcctcaccctcccaagtagctgggattacaggcatgtgccaccatgcctggctaagttttrtattttctgtagagacagggtttcaccatgttgcccaggtgggtttcaaactcttgagctcacacaaatgtgccttggcctcccaaagtgctgggtttacaggtgtgagccaccgtgcccaacctgaagtattatactttttttttttcctgggacagagtcttgatgtcacccaggctgagggcagtggcgcaatctcagctcactgcaacctctgtcttctaggttcaagcgattctcgtgyctcagcctcctgagtagctagaattacaggcgtgtgccaccatgcccggctaatttttatatttttagtaagaggcggggtttcaccatgttggccaggctggtctcgaactcctgatgtaaggtgctcctcccacttcagcctcccaaagtgctgggattacaggcatgagccaccgcgcccaacctgatacttttattttttttgagacggagtcttgccctgtcgcccaggctggagtacagtggcacgatctcggctcgctgcaagctctgcctcctgggttcatgccattctcctgcctcagcctcccaagtagctgggactacagatgcccgccaccacgcccggctaatttttttttttttgtatttttagtagagayggrgtttcaccgtgttagccagggtgggccaacctgatacttttaaaagttatagtgcatattatgctgggtacggcagctcacacctgtagtcttaactactcaggaggctgaggtgggaggatcatttgcgaccagcctaggcaacatagggagaccctgtctctacaacaataaagtcacagttaggatatcaggctgagctgggggttccatttggggttggatttgctcccttctctagagccaggaaatgttgggcttggccaggcatcaggaggtagatggtgctagcctttctgtggggccactgtggggttgggaagggccctcactcattctgaggagcctcagtgctgaggctgcgctaacctgggctctaacttccctccctagatgctgaagttccgaacagtccatgggggcctgaggctcctgggaatccgccgaacctccaccgcccccgctgcctccccaaatgtccggcgcctggagtataagcccatcaagaaagtcatggtggccaacagaggtgagcaccagtggggccggtgagaggagcctcatggccgccccagccttggcattcttctcccactcactgccccaggccctggcttcccactcccctttctgcttctcctaggacctaggaatctaacttcttgtttctttgccctctaggtgagattgccatccgtgtgttccgggcctgcacggagctgggcatccgcaccrtagccatctactctgagcaggacacgggccagatgcaccggcagaaagcagatgaagcctatctcatcggccgcggcctggcccccgtgcaggcctacctgcacatcccagacatcatcaaggtggccaaggtgagcccagtggcctggctgggcctggacagcagggaccagggagtcttagttgccgcgggggtctcttgaggctggcgtgctcagcgcctctgtgcgtgggtgggtaaacggatgcagctcagcaggttaggcaggggaagaggctggccgaggccttggaagggactgcaaggtaccgtcctctccctgacccccacctgcaggagaacaacgtagatgcagtgcaccctggctacgggttcctctctgagcgagcggacttcgcccaggcctgccaggatgcaggggtccggtttattgggccaagcccagaagtggtccgcaagatgggagacaaggtggaggcccgggccatcgccattgctgcgggtgaatataacgggcaagcaaggggtggccccgcagctcctggagagggtccagcagggaggggtggcagggattcccgcctgttacagagactcccccacacctttctcccaacaggtgttcccgttgtccctggcacagatgcccccatcacgtccctgcatgaggcccacgagttctccaacacctacggcttccccatcatcttcaaggcggcctatgggggtggagggcgtggcatgagggtggtgcacagctacgaggtgagtgaagatgcccagggctgggagcagggcagggcagcctgccgtgggggcaggggcggaccactcaagggatctggaaagtgggtggggttcatggcaggggagaggtagcgctgtggggtctgaggtctggctggcccctgcccgccctcgcaggagctggaggagaattacacccgggcctactcagaggctctggccgcctttgggaatggggcgctgtttgtggagaagttcatcgagaagccacggcacatcgaggtgcagatcttgggtgagtggtcctgacgccccgcctggggcagctggaggcgggagctgagaggcccagtcctggtgccgtcacagtggctggccttggggacagccctggggcctgtcgggcgcttttccagaggactctggaaagtgggctctaggggccgagctggcagttggtcctcacagccttggtgatgctggtgtctctcctggcagcctctgtaccgctggcagccggcactgactggcgacagtggttatgtgggggtgatggggcatttaggaggcgtgtagattccagtaaaagctaagcccagtttacctccctccccaggggaccagtatgggaacatcctgcacctgtacgagcgagactgctccatccagcggcggcaccagaaggtggtcgagattgcccccgccgcccacctggacccgcagcttcggactcggctcaccagcgactctgtgaaactcgctaaacaggtgaagggtgggcttcccgtgttgggacaggagcctgtgctcacaggccggcaggcctcacagtggggcgctggttggggaaggggaccctgagtccccttctggggactggggatggggagaagagggtgaaggactctcctgggggccagaagtgggtttgtggcatccttcccatgtgcagttgaggcacctggcccagaggccaagcttagagtccaggatggctgagaagagggagggaaggagccccagccgcctcctcagccctgctgctacacagacctggcttctctgtggcatcagctcatccctgtcatcaggagaatgagattccgtggattctgtcaagattgaggaccattatgaaggcagtcctccctcatgtgcttctgtctcctacatcatgtttattatgatctgtttccttgctctgcaccctctgcccatctctgcttttctgggacctctggtcggggggtcctgggctgtggaggaggctgaggtggcaagctatctccccacagtgacctgccccaggactggcctggagagcacctgctgtggccaggtgtgcagcggggtcctgccccctcttcttccctggcctataggcagcagaggatgcgtcacctccccatgccgaaggccggggtgtgcactctgcagcaaggcctcagccacagctaatgcgaggcatcgaccagggtcgcgtttaagtcaggtcttatttactggcttatactatttcacattccagaacaggtttaagggaggtgattcagtctggtttatcgttttggtgagaccaaaagtgaaactggaattagggctgaaatttgagttagagtcattatctgttggtacctctcaaatgaatttctttgggtggtggtggccagaggtgactgcgcagtagactagaaggggactttctgaaaacacctccaagcagaagcagcggctgggagaggcctgggtctccgtgtctgggtggatgacacagccttggcgggcaagcccaggaggcagcagggcaaggtgccgagcctgggatgggtgggggcttctgcccatgtctcgtcccagataagctgggtgcagccatctgtggctccgggaaccctggagcctagtggactacttgggggacgtgtccaggcaggagcatgacctgggccctggggtctgtctgccatctgtgggggcagggtttgccacaggccattcttttacggaaccaacccaatgggtgggacggaatccctgtcctgagtccagtgagtttgcccaggccctgcctgtgccctcccctgctcacgtggccgcccccacaggtgggctacgagaacgcaggcaccgtggagttcctggtggacaggcacggcaagcactacttcatcgaggtcaactcccgcctgcaggtggagcacacggtcacagaggagatcaccgagtgagtgtgggcgggcaggcggggcgggaggcgcggcttctaggatttgcataaagtacaggcgaagtggctcctggggccagccagggggcttgctcactccccacattggtggagagcaatggggatccaggtacttagtgttttaaaagtmattattctaaaagcattacgtggttattataaaaatcagcacaaaggagcaaataaaaatgactgacagccctcctctctgtcaggacgctgccgattgctcaggcccaggtgctcccatctgtcagaggagtaaagcaaggctcagagacatttggagagttgctcggggtcacacagctggcgctggaacccaggcatctccggctgtctttggtttgctcctttcccggtttacctgttttactagagacatagtttgatgcaatagagatgttttatatagaatttttattctacttttcaaattatttaatatttgttgaaggcatttccccaggccataattctgtctgaatacttttagtggctgcgtactattccgtcttgtgtgtatttcttaacttacatagtcctcgattgttaggcaattagtttgtgtgtctggctttggtggttattaagcgtgtcacttatcatctgtgtgcctgaatgtttggcttcagctctgaagagttctgagggtaaacccttcaacaggattatctgattgaaggataagtagcatccctcggaacagccctctagagaggtggcactagcgtgctccctgcaggcactgaggatgacattttcaaaatccgcctggtttctaaatgacagtcatgatggccctcacccttcaaggtctctactatgagccatgtaatttcttgacgctgctttgggccagcccatctcactgtggagcatccctgaccccagttctgcccccagccccaaccccacctgagactgaggatgctgtcggggtggctgctgtggctcgccgggggcatggaggcccctccctccccttaggagaagcttagagacaaggccaacactttggccgagtgagactcttcccctcaagctgctgtgaactcctcggtcttgggtctgcttagagcgtcctgttagggatgggagtctgtctgctgtggagcacgggttttgtgtcagacagattggggctcaggtgctctcaggtcccaagccacgtggagcctgggtgagctccaacctctctgaccctcgagctcctcctctggtgggaatgacagggctctcagcacaccgtcgtggagatgaagcatgggaggagtgcagcctggcctgtggcactgagtggaagctgtcatctctgctgcgaagtgggccagcaggcagcaagaacacggggaaatcctgccagtgtaggttccaggctgccttcaccacaagcctcagtggcaatacatgtaaaaccttgagtggttttttttaagacatagtcttgctctgtcacccaggctggagtgcagtggtgcaatctttgctcactgcaacttctgcctcccgggttcaagtgattctcctgcctcagcctcctgagtagctgggattacaggcacacactaccaggcctggctaatttttgtatttttagtagagacagggtttcaccatgttggccaggctagtctcgaactcctggcctcgtgggattcacccactttggcctcccaaagtgctgggattacaggcatgacctgctgtgcccagcctggtttttttgtttgtttgttttgttttttaaacagctgttccacttggacttgtgactgcccttaggagcagtaaggctgagcttggaaaaccctgcagaggtggggaagcttgcactctccaagcatctctagggggttttgggcacaagtccagcaggaaaacaggcctcagaaggacaggtcctgacccagcacccactgtgcaaccctctcacagctgtggttaccatttcgaggagcccagccttcacagcacctgttcccttgcacactgcccccctcacaaccacccacacagcatagcacatatggccccaagaatgtgctatcctggccctctgacctagagatctgctgaggcttcaaatctaggctttaccaagggggagtttaggggagtggggaaaacagacctcaaggaaggaggaggcagagtacagggaggagcagcttagggctgtgtggacggcaccgtgagtcaggaatgcaggagcaggtggtcctggtatttcagcgggccatctccagctgccaggcactgtgtagtttagtcggctcccggcgggagcagggcaggggctggtggagccactggttgggaggaaccggctgttcaggctggcccagagcctatgggcaggagtcgcactgtgtgtggacgccccactggctgcggtgcccctcgtctatcccccgcctcatgtttccccctttctcccgtcctttcccccctccccccaatgccctacagcgtagacctggtccatgctcagatccacgtggctgagggcaggagcctacccgacctgggcctgcggcaggagaacatccgcatcaacgggtgtgccatccagtgccgggtcaccaccgaggaccccgcgcgcagcttccagccggacaccggccgcattgaggtgggcggagctcgagcagagggagatgccagctcacctgtgcacaggttctgcctggtgcctggggctgcagtgccaagttgccacagcccggcagttagggaggacccgcatgtgggctctgaagtggacatagagtacacggaggcaggcagtgcccagaggaggggcggcgcctcccaggggaagagactgctgggcgcccaggtcaggaggaagccgtgagggtgggagcggggagcaggctggcttggtggagcaaaacgcagggacccagacacaaagccagcccctgaccctccagctcccacaggagccccacgcctggctgccgacggagcccaagcaccacctcccatctgagggatgggctgacatggcaggacctgggggtgggggtggcaaaggactgggcccagaggtcccaatggagtctgagccaagctcaggggcccatcaaggatgggggagggagtcggagatggcggcacaggagggagaccgagaggtagattcggggccgcgagatggcagccttggtgggggagagagtggtgtagggggcgctgaggcggtccacggcaggctcctcagcacagcaagactcgcgccttctccaggagggctccctgtacctttcttcctctcagcaccgggacccagtcattggcctccgaaacccatctcccccgcctctggtcccagctgtgggcaggagccctgcggcctgctcggtgcctgttcccagccctgcacgtgctgccagcaccgtgccagctgtgctagggacttgctccctatccaggggcctgagccccaaaggaggcaagacattgatggagctccagctttgctccagagtccaaggcagaggcccccgggcttgtgtggggcggtgaggggagcaaacatgagtttgggccaggctctgggcttctgagacaagggaggctggggaggctgggggtagggaccagagctctctggattctggaagcagcagagcctgtggcttcagcagggagctggccacctgccttctgtttctggaagagtctgtaggtggcggcagccccaggctgagtgctgcccggcggcccctgacttctctgcctccctccatccccacttccaagccctggctcttcagagcctgcctcatcacagagtatttttagccgacagtttctgctctcagctgagtgttcacccttaaatattttatgaagttcctttttattgaacacaggcctctgcccccgagaagcggaaatgggcagtgggtgtcccgagcccctctgggcggtccccccactccccttcttycttacctgggcctgacgggtcccccacctccggggagcccttctctgcggggctcactcgggcggcacsaacaggtgcaggcggcacgagccacctgtgtgtgtgagtgtcggcgcctctgtctcctcctctccgctgcccctcccattgccgtctggccctggccctgtcccgctgccccgctgccctctcctcgcccttggtttgcttccctgatgggtgtggaccctgcctctggcactttcccttcatttcctctcccacttcctcctcgttgcctcctctccctcccatcctcccttctggaaggaaaggaaaggaaaggaagggagcatgggtggatgttgaggccttccccaccaccctgttaaaaacaaaaacaaacccccggtcagccttgcctcttgcctcgcacatggtcctttggaggccctgtcgcyggcctgccgtcccctcgctgtctgggagcccacggcgaggccctttagcggccgggtcagcagacctcaatccgtgctgtggaacgaacgtggatgagtctgaaaggctagagggttgctcaggcaggtgcagcaggtccgtgggaatagaggcagggctggcccctgcctgcccgggcccctctcccgctctgcggcaggcattcccttcctcctctgccccctcccagctcctcacagggagccagtagcagtgactgcgtggcacgtagagaagggacgcactcctgggtttggtggcagaaacagcaaaacctgaccagccagagctgggattcacctgcagacaccccacgctctgctctcagcagctgctgggtgcacacctggccagcctcggggtgggtggggcacttttgaccgcagtttctggcgcaggtcctcacgcctcacccttcccacaggtgttccggagcggagagggcatgggcatccgcctggataatgcttccgccttccaaggagccgtcatctcgccccactacgactccctgctggtcaaagtcattgcccacggcaaagaccaccccacggccgccaccaagatgagcagggcccttgcggagttccgcgtccgaggtgtgaaggtgagaggctgcagcccccgcctgcctttgctcccggcccttggagggccccctgacygttcacttccccaccaagggccttgcacatggcttcacctcagccttgcccctgactgatgggtcgaggtcagtggctctcctyggctgcagctgcacgccagactccagctgttttcagagtctgcaggcgcctgggcaacccgctgccagagtccctggcagtggcctggccggagctcgtcctcacatgcctcctgtctagtcttgttccggggagacccacgctgtgtcccgcccctctggggtgagaatcacctggaatgtgtgttaaatatcatcaggcttcccttctggaaatcctgatcccacaggtttgggtagaggcgccagaacctgtgttttgaacaagttctccagataattcttttttatttttgaagtggaatcttgctgtcgcccaggctggagtgcagtggcgcgatctcggctcactgcaagctctgcctcctgggttcaagcgattctcctgcctcagcctcccgagtagctgggactacaggtgccccccaccacgcccggctaatttttgtatttttagtagacggggttttatcacattggccaggctggtctcaaactcctgacctcaggtgttccacccgccttgacctcccaaaatgctgagattacaggtgtgagccaccgtgcctggcctcccagataattcttaatttctggaaaatgtggatccccccccaccaggcaagagcccaagtcatgtagatgcggtcactttgcacagtgtcaggcccccgccagccccctgctctcctcacctggcctggtgcacacagtgtcaggtgcttcaggagcagccgagggtgggggcgcagcagagacatgagcaggaggcttgggaggcaacctgcccttggtgggctggcagctcggcttgtctttgggtggccttggtgggtgccctgcctggcatgaggactctaaatgggtatttaggatctaaagagccctttgctgggctctgttactggcgtctgtagctagagaggaatccacagccaggaaatgccgcctcggcctttgaagccagcacgtgtcccgtgggagccaccctcagaatggcaagaagagccggaggacaggggctttggccctcagcccctgtgggagttaccaccccatcttcttcttgggggtccccacagggcgggctgtgctgggcactggcaccggcccctctgccttggcctcgtgtcctccttgcagcttcttccagccctgcctgtcatcgaggcgcagttgcttgggggatgggggggcatgtgggccgtgctgtcccctcagggtcctgcaatcacttctcacatgtccacatggctgcttggtcgcaagagcccctggaggcttctgggcctatgcctgtgtgtgtggccagcctgtctcccaccttaagagggaacagcgcacttcctagaggccagggggtgttactcttccgtggggagcctctcagcctccctgttgggggtccctgtcgtgcacataggcagaggtgtgtcgcgacatcagctgtcgacatcacgcgctccccctgcaccttgctgcggctcctggtgtcctggcggggatgtcctgcggctgcttcggtgttgaggggatgcgtggccatgcacaggggtgacccaggccatccccctcgcctgcccctgcccgttgctctgtggtcctggctggctcctggggtkgtgcccggttcctctgctccctcctcaccctcagcagctccccacgtgccaagctggtccctgggccctagaaccttgcgcctgctaggggtgcagctagaggtgggcttctgcaccctggagggcccggaaagatcttcctctttagaccgtcccccgccccccaggtggagaaaggggcactagagaccgtgaccacggggccagcagcaggataagtgtctctggtgtctgggggtgccaagtcctccccaaatgtgcaccaagaccaggccgctggctctagccgcctcctgagcctcatgctagcgcccagcgtggcagccctggccctcctgtccctttgccgtctgtgcccacccaccctgtcccgcgcccccgcccactcctccatggcgttcgctccccacacccttctctgtcgaggaccttgctcccattcatctaaaccasgctctcgaagcccacctctagctgcatgttctggggctgggagggcaggcacacgcgtgtgagccaggtccatgcacacgtgaacacacgtatgccttagagcacctgcctcacctcggctgcccggtggcagcgccttggccctcacacagaaaacaccagggagtctgtgcagcgtgtttgccgtggcctggggtgccagggccgccttctgagttttcatacagcacctgggggagcttgaccctctgcagggctgagggccacgtctgcccatgccccccagccagtgcctagaagcagatagttcaggaggctgcaggggctgggccaggtcggaggctgcccgggcctggccaggggtcctagcagagaaagcagggctcgtgcccatccggctgcctccctgcagcgagggagggcgaaggccgccttcccaggaaggcccagagcacatctgagctggcagctgcggtcctgctcggacccacagttctgacaggaaccttccagaggatcacgggctgatggcagagcagtggggttccctgcccttccagtccctttgggatggcgttttaccagtccacaagatgccctgggaggtggcagacacagctgtcagcacctggagccatgaggacttttcactgtacgctcagcccaggtccgttctcccagagggctgtaccgtcccccacctcctcctgttgcttagtccagtcctgtgtccgccccgcagaccctgaagtgccatggggaaggcgctcacacgtgctycccaggctttacactggatacggcgtcctgtcgccacctggcaggaaggggcgttctttgcacttacaggcgagggtaggccgcctgcccaagcccatgctcttgcaggtcagaagacaccaggcacagcccttggccgcagccctgggccgcccctgtggacaggaagccaggaggccccaggctgctgtgactgcccccaccggccctggtagccccacccttgtccgtgtgccaccagcggcccgtgtcctgtcctcccgtctcgggggacctagccagacaacaccagagactagcactgaggtgtccccaacaattttattataaataaaaacaagactcccagtgggtggctgcagcccctgcctcggtggctgtgagcacctgttggaggggcctgcccttaccctggtctggaggccagaaccgaggaaagggctccctgcccctccaagtacacaggggagcctgaggtactgagaataaaaaccagggagggactcccaggccaggcggcggccccgggccctctgccccacgaggctcatcccttggagcacacaggaagctgcccgtccatcacaccacactctcttccagccgctcggcgctgcctcctaccccccggcaccctgccccgagcagccccccatgcacagagtggctccgtcgggcccaagctcctcccaggcgcctggcataaccgtagcacccggcatctcccaggtccagagagcagctgcgctgcggccggggcgggggrctccgcggcgggtgggccttgggtgtggggctggggcctccattggtctgggactggacgtggctgagcttgagggggaggcggccatttccggccccccggccccgaaccagcaaggccacagtgaagaccagtaaggcagccaccagcacaccccccacggccacggtcagggtcccgcccagcacgtgggcctgcagggcgtggcacaggggcgaggccggcagcgtggagaaatgggcacagcccagcagcctggtggccgtgaggtcagagggcccagcggccggtgacaaggccagcaggcagaggtcatagtcagcgccggggacgaggtgcttcagcaggaagtggtggctggaggctgggacaatcctgcaggcaagggcaggtggtcagagcccggggctggggtctagccccatcctcacctccccactcccgtgctcccagctccaaacacccctccccctggggccactcgggctcttgggttcactcaggaaggtgaacaggctggagagtgtggccaggagatgggtgtgtgcactggcacaggacgcaggcaagcgaggggaatggggtggggggatggcaccagcagaggcagaaataacacgcgggcgcgggccatgtgcttcagacagacccaaccgccacctgctgccggggaggcctgcacagctcagtgacacctgggacatctcggggtggggtccttctgccgccccttgagctccagccccctcaggcagccaggccaggccaggccactgctcctccaagagtccagcagccatggtcggggagggggtgtcagccccagagagaggaggggtggaagcaaagccttgtggggagcagagggcggaggaagggcgccgggagtgcagccgggtgtggggcacgcatcctcaccggtagatgagggtctcatcttcgctgctgttgtactggatttggaacatccacactgggtcggctggccgcccgggaccccagctcaccagccctgaggtggcggtcacctccgtcacctgcacggctggctcagactccagcgtcccctcaccctcggcagcagtgcgagcggaggcggcgatgtccgagggcccggggcggcccccctcggsactgctgttcccaccatggggcaaggscagcacccgcagttctactcgggctgtggcctcaccarcagggttggtggcgatgcaggtgtagcccccagcgtccccagcgccggtcnccccaatctctaaggtcccgttggggaaagcccgggctcgggaggagttgccaaccaaccggtcgtcaggaccgacccagtgcatggtaggcgcggggtcacccagggcccggcaccgcagcgtggcccgctggccttccagcacccagaggcgctgcgtgtggcgggcaatgaggggcggctcacaggagaactcgccctcgggcactgcccagaagtagcggccggccaggccgggcggggaggcgcacgtttccaggtcgtccggccgcgccagccgccgcagccacagcagctcacagttgcagtgcagggggttcccgctaaagctcagcaccaggggggcgggagaggcctctgcatcacgcccacgagagaaaagcgggtccggagccagcgtggccaggcggttggaggtgaggtccaggcgggagagctgaccgagctgggcgaaggcgcctgggggcagtgcgtcaataaggttatggtccaggttgagggtgtgcagggcaggcatggcgccgatgccggcccagggcacctgccggaggttgttgtaggacaggtccaggtcctccaggctctctaggaagtcgtcgaaggctcccggcgcgatgcggcccagctggttgccgctgaggatgaggtgctgcagattgacggggccccggaggctcccggtgcccagctccaccagcctgttgccgtcaaggtggagggaacgcaggctctcgaggtccccaaaggcgcgggccccaatgcgggtgatggcattgcgagacagtgtcaggtccaccagtcccgtcatgttgcggaagtcagggggccccagggcctggatgaagttgtcagccagccgcagctccactgtgcgccggtccacgttgggcggcacaaacagcaggcctcggtgggcacagagggtgctgagcgactcggacaggttctggcagacgcagggcagcgggcaggcggccgctccactggccagcagcagcagcaggagcggcggggccatggtgagcgccctgtaggaaggggccacagcccaggcacaggtggggctggcgcaggtgcccacttgggcccaggacagtcccagaagccagcttctgtgagcctggcccggggaggggctgggtcagaggcccaagagggccgccagagatgagggaaggttggggcctgcagggccaggccccccagagcaaaggtcacatttcccaagcagttaagggggagtccaggcgctggggacaaggtgaggcatgaggcaggaagcggaggaggaccgagagcagggagggtcccggaacttcctttcccaggcgtccccaggaatcgccagccgcctccccactccccgccataccctcccccgccagagaaggcgccccccgaacctcccgtggagtccgtggcccctccctggccggcccccgcgctgcgcccggcggccccctcacctggtgtccgtcgctcagggggcgcggaccggcctccctgcgagcccggccggccccgccgactcctggccgctgctcccgcggggacgaggcccggggatgaccggccgcccgccgcccaccctcggcccatggcgcgcgcccgcggccccggctcgctcggttcccggcaccttttcccggcgcggttagcggtggcggcggcgacaggcgagcnnnnnnnnnnnnnnnnnnnnnnnnnnnnnnnnnnnnnnnnnnnnnnnnnnnnnnnnnnnnnnnnnnnnnnnnnnnnnnnnnnnnnnnnnnnnnnnnnnnnnnnnnnnnnnnnnnnnnnnnnnnnnnnnnnnnnnnnnnnnnnnnnnnnnnnnnnnnnnnnnnnnnnnnnnnnnnnnnnnnnnnnnnnnnnnnnnnnnnnnnnnnnnnnnnnnnnnnnnnnnnnnnnnnnnnnnnnnnnnnnnnnnnnnnnnnnnnnnnnnnnnnnnnnnnnnnnnnnnnnnnnnnnnnnnnnnnnnnnnnnnnnnnnnnnnnnnnnnnnnnnnnnnnnnnnnnnnnnnnnnnnnnnnnnnnnnnnnnnnnnnnnnnnnnnnnnnnnnnnnnnnnnnnnnnnnnnnnnnnnnnnnnnnnnnnncctccctccccagctgccccgcccgccccgcgggccaggcgttccggagccaaccggcctccgcctcgggccggattggtctgcgcggcgcggcttcccaaccgccgggggcacgcattgggaagctgtgcgtcctcgcagcgcctgcggcccctccctcccgctctgtcgccgccgggccatttccctggaagagcggctcggaaccagctcctctcagagaaagggctcccggcgtgaggtgggggaggttctttgcttcctggttgagaaagctggggcttcggtggctcggcgagcctggtttccttccagctgtgcccgccaccaccagtggtctgcccagttgggaaacaggaagtcaccacctccccgtgtctcctggtccttaagccacctaaacctcagccatcctcgttctccctccagccctgatccccatgggccaggtggcaggaaactcggggaaacccaagattggaattctgatcctgtcagcacagcagtgtagtcctgggcacgttacctgaccactgaaaacaagttcctcctgtaggccaggagagttggatggtacatacataagcatttcctaggggcgagaggggaggacagctgcagcttgtgaggggcttacaggcagccagaagccattctgtcaccactcactgggcctcagctgtggcgtttgtaaaatgagggggattcagtcctggtgcaggtcaactctgatgtgcagtggcaccagctatgtctttgttcctcttctccccatcaaaaatgttttccaccgggtgcagtggttcatgcctgtaatcccagcagtttgggaggccgaggcgggtggatcacttgaggccaggagttccagaccagcctggcaaacatggcgaaaccccatctctattaaaaatacaaaaattagccgggcgtggtaccgcatgtctgttgggatgaggcacgagaatcgcattaaccagggagccacaggttgcagtgagctgagattgtgccactgaattccagcctgggcgacacactttgtctcaaaaaaaaagttttcattcactctaaatatagatgtttaccagcatccaccatggccacccagtgctgggagccgggttcatcaggaaccagatgggcctggttcctgcccccatagagcttacagtatggaggagaggatgggcaacccgacagtcacaaaggggagactcagtggggaccctccacatgactcggtgatgcagaacggttatgaccttcagcgtgtgtctgtgaacacaagggtcccagcaacagtgtgggtctgcgctcagccctgcccgtgcaggttcctcagcggcctgctggaaaggtgagcatcagctctgccgagggtgtgaggacagggcgaaggcctccaagggtccttctcactctgcgcgctcggggctctttggatggtttcattagctgcctcccttctccagtgccatgccttggcccagctgaaatgtcagcatctcttcaggagaggcaggggcgaggctcaggggcagacaggcacagcactgctggcggggtcccactctgtggtgagcacctgacaggctggtgggggaggcacccttcctgtccaggcctccaggtaataggagcctaagagacggagagctcagaggagtctgggtggccttgagtccctgttgaaggtgccgacagggatcatgaataagtgacgcgtggaggtgttttcttcgcggtggaagccagggctgtcgctacacagccacaggccatgctttcacaggtcttggagcacctgtcacagtgctggctcgcatgtccccgtttaagtcatactcaccctggcccagcctcatgttgtcacccaggcatttaatgagtggaaccgagggcccctgtgcacaaagtgcactgacacatgcctcaggcagcaccctgcccccaagggttcccaggcagacaagcagaggatgaagccgatgggtgtgcttgcccacagcgggttcctcaggggactgctggaaaggtgagtgtcagctctgccgagggtgtgaggacagggcgaaggcccttgagaagttcagggagagcttcccaggcaggtgcaaaggtgtggagcgcaaggcaagtttgatgtggctggaggtggccacaatgaggaaggcggtggagggtgtggcctggagatggagaagaggtcacaaggtcccaaaatggccgtggtcgaatcctctggcttgaccagtggcatgggaggagtgggtgatkagggtgatgggatgcaggttttggtaactggggggacagtggggcacccactgggcacaggaggactgggtgcataggcaggaagctggccgtggacttgctgaacttatgcgaggggtgaacaaggaaaggcccgggaggcagttgcacctctgggtcttgccctggaggcagagcctgtcactggcgccacarccccgggacggggcctcctggggagcatgtggtgtgtgaggagctggggaggaagaggacaggagagcaagatggcttggaagcccagggaacgagcagcaaggcgggagcatgcccgctggactcagctgggaggagtgacttagagtgccagagtgtggtctgttgcggtcaaggccctctttcgagaagcgtggacgaggggcaagggtgactgctgtgggccacgctgctggagaaaaaggctgagccctgttctaggctgcggggaggcaggaagggtggccttcagcacatgctttggtgtaaacaagtatggagggagcaggcccagcccgtgacagcttagggggctctgctggagtgaggagagggctgagggacggggaagtgcccctctgcagggaggcccagaagctgtgctggcccagggcagcatcttcagccttttctctttcagccttttctcctctgccttccctgtctgtgctgcatggtgaccccctcccacccgcctctgtcctgcagaccaacatcgccttcctgcagaatgtgctcaacaaccagcagttcctggcaggcactgtggacacccagttcatcgacgagaacccagagctgttccagctgcggcctgcacagaaccgggcccaaaagctgttgcactacctcggtctggcccgagactgccctgccctgccctcccctcccctccgctctccaatctcttgctcctacctccttgccactccccatgaccaaagaactccttagtgccccctgcccctcacccctgccctcattctggccctgcgtcctcttgtcctgcaccctgccattcactgctctccttgcttctgatctgagagaccccacctttccatccacgtggtcctcaagacgtccccactgcctgtacccaggaggccctggctttggagaggacaggggccagctggaagcccggggatcctggagggatgtgtccctgtccctgagcccagccactctcactgctgccctcgactcagcctctgcccagcccaccctgacccactgcccgctttctccccaggccatgtcatggtaaacggtccaaccaccccgattcccgtcaaggccagccccagccccacggaccccgttgtccctgcagtgcccataggtaggtgagatccattctgtcaactcatgggggagacaggaggttgccacctgcaggatgggcaccaatgcccctgtctaccctaggcccgcccccggctggtttcagagacatcctgctgcgagaggggcctgagggctttgctcgagctgtgcggaaccacccggggctgctgctgatggacacgaccttcagggacgcccaccagtcactgctggccactcgtgtgcgcacccacgatctcaaaaagatcgccccctatgttgcccacaacttcagcaagctcttcagcatggagaactggggaggtaggctggcatgctgygcagygcctggtaggaatgggcgcccgctctgtggccagtcccacaggcttaggccactggggacaagctagagacgctgacacgaagaacaccaaagaggaaggaccgaagaaggcacagcgccctctccggccaggcctggtgccggcacgaggttgcagagctgagaccaggtgcatcctgggaggtccagggtcaggaggagacacctgcctgttaattatagcacagagaggtagaggagaagatgggattataaagggggcatagaagggacacaaatgagcctggtctcccccttagagatcagacaagggaaaaatctgtgggggttggagcagggaacacaggtatggcgaagatgagcaggacctggtattggggccagaggcttgtgctgcagagctagctccaaggcctggtggagttccccaggcatgcagagctgatctgggcctctcggttcctgtgcaggarccacgtttgacgtcgccatgcgcttcctgtatgagtgcccctggcggcggctgcaggagctccgggagctcatccccaacatccctttccagatgctgctgcggggggccaatgctgtgggctacaccaactacccagacaacgtggtcttcaagtgagcctggggtggggtgggcagacgctacctggtgtggcccagagggtaccgagccatgtcgtgatggcctctgttctccacggtcagcctgacaccaagtctctctgtggccacacgcagcaggggctgctgtttggaaatatcgagaagtgtaaaattggagttgcagaaccagacaggcttctaaatcactccctcactcctggggcagtggaaggtctgagacttgcctgggtcactcggtgcagggctgggattggaacccaggcctcaagactccttgctcagtaccctcttccacagcctgccactggcctagctgatcctccagggcctggtccacacttgtgtggccaccccccgcctgtggatgccacaccccctgccaggcgagaccctcagatctcattccccaggggccatagagtgggtcaggaaggagccagggaagactgttcagagggaggtggggtggggctcagccctgggctctctcacccttgcaggttctgtgaagtggccaaagagaatggcatggatgtcttccgtgtgtttgactccctcaactacttgcccaacatgctgctgggcatggaggcggcaggaagtgccggaggcgtggtggaggctgccatctcatacacgggcgacgtggccgaccccagccgcaccaagtactcactgcagtactacatgggcttggccgaagagctggtgcgagctggcacccacatcctgtgcatcaaggtgcctgggccacttgtccgtccctccctctctgccccggccatgtccccgccacccacaggcacacatcctgccctctctaccatctctctctctctctctcccamktcccccaggacatkgccgggctgctgaagcccacggcctgcaccatgctggtcagctccctccgggaccgsttccccgacctcccactscacatccacacccacgacacgtcaggggcaggcgtggcagccatgctggcctgtgcccaggctggagctgatgtggtggatgtggcagctgattccatgtctgggatgacttcacagcccagcatgggggccctggtggcctgtaccagagggactcccctggacacaggtaggaagaacagcagcccgtggccacacccctctcaaagccgcagccaccaccagtcccagtagtgttggacctgcctaggatccagatgccctgctctggccttgccgccttctgtcacctgagtcagacatgggacctgagctagccctgggtcctggaagagtcacacatttctaaggcctcctctgactctggcctccctgcagaggtgcccatggagcgcgtgtttgactacagtgagtactgggagggggctcggggactgtacgcggccttcgactgcacggccaccatgaagtctggcaactcggaygtgtatgaaaatgagatcccagggggccagtacaccaayctgcacttccaggcccacagcatggggcttggctccaagttcaaggaggtcaagaaggcctatgtggaggccaaccagatgctgggcgatctcatcaaggtgagcccggcccggtgctccttacctgacccagccctgcatgcacctgccactggcctccttgaggtgcctggcaccctaacctccagggccttctcctcaggtgacgccctcctccaagatcgtgggggacctggcccagtttatggtgcagaatggattgagccgggcagaggccgaagctcaggcggaagagctgtcctttccccgctccgtggtggagttcctgcagggctacatcggtgtcccccatggggggttccccgaaccctttcgctctaaggtagggaaggcccagcatggtgtgagggtgggggctggatgcaggacttgggactgatcctctgctttgctccccaggtactgaaggacctgccaagggtggaggggcggcctggagcctccctccctcccctggatctgcaggcactggagaaggagctggtagaccggcatggggaggaggtgacgccggaagatgtgctctcagcagctatgtaccccgatgtgtttgcccacttcaaggacttcactgccacctttggccccctggatagcctgaatactcgcctcttcctgcagggacccaagatcgcagaggagtttgaggtcagtggctctggcgcttctccacactccaccctggccccctgccccagagctctggagtttagcttggctgtcacccagcctcgcaagctttgggagcagaaaggacccttgagaccgggagctaggcctttaggaacgaggagccaaggcccagtgtggggacttcctatggccagggccgggggactgctctcccaccttggcgtccagctctgagtctgcacaccctccctgcaggtggagctggagcggggcaaracgctgcacatcaaagccctggccgkgagcgacctgaaccgggccggccagaggcaggtcttctttgagctcaatgggcagctgcggtccatcttggtcaaggacacccaggccatgaaggtattgtctcccccagggccagccaggcggtggggcttggctgggcccaggatgtcatgtcccctctgccctgtgtcttcaggagatgcacttccaccccaaggccctaaaggacgtgaagggccagatcggggcgcccatgcctgggaaggtgatagacatcaaagtggtggcaggggccaaggtggccaagggccagcccctgtgtgtgctcagtgccatgaagatggagactgtggtgacctcacccatggagggtactgtccgcaaggttcatgtgaccaaggacatgacactggaaggtgacgacctcatcctggagatcgagtgatcttgccccagaccggcagcctggccatccccaagccttcaacagaagctgtgctgccacggcaggcccaggccagccagtgcccgaggccaggaaggccgggccgtggaggtcctgtccacagctggacaggagagacaccgcctgcggtggttcattcctttcagccatcgtcctttcctccggcggacagctgcttacatgttcatctcttgccaaataagggtcccctcctcactggagactacaagtggtgggtcaggtggtcctaggacccaggggaggtttaggggtcctatctcctgggggaaggggagatctaagatgtcccaggtcctgggaagtttactcaataaagctggctttcccctgccctccatgctggatcctgtgcagcccccagcctgcaccactcagcagtggggggctgcctttcaagctccccatgggtgggcaggtcagttgtgtcgttctcctcagagggtagtgagaatgaccatcgtggccctgttttaagtcactattgggtgcctactgtgtatactccccaaacaggactagtagtactgaacttgcttgaggggtggggcctgttctaagtatttaacacctattaacacagggaattaaccttcatcctcttatggacacagaaatcaagtcacaggaagattaaataatttgtccaggacttcacaagtagtaagagagagagatgaaacccaggccgttggcagactcgcctcccaaccccgctgctttattttctaaaacccaaggccagcgtcccacctcagttagcaggtaaatgcaagcaggtaccaccttgtgggcagtgggtaagaccctcgggaatggtgatccgggagtcttgtgtgtgctctggatgtgagaatgttggtgggaggtgagggggagcaccgggtccagggtctcaggttctaaccctgccactccccatgaccacccctccagactcctgctcagttccctttcctgcagtggggacagtaaccctgcctgcaccactgccctcctgcccacctgcccacaggtagggagaggatggtgaagggagcaggaggctgggcagttcctgagatggaggggtgggtgtggggaggccgatgcaggaaatcagcctctggatgggaagcacccagcaggcctctgcccagtgctcccagagccagtccaacctctgggatgggcaactcacagtgggcttgagcctcttcctttctggaccgccatgtcctagatgtaccccaggaggcagatgactgcgatgctgccccttccatccgggtggatgtcgttgtcatggccagcctgcaggcatcgtgggggagtgaccgcacatcctttttccctcagtggccagcctcagagaagggaccttgggacaacctccttgattggggaatgggacctaaagggctttcttccctcccccgccccccctgccccccaccccggagatggagtctcgctctgtcacccaggctggagtacagtagtgtgattttggctcactggaatctgtgcctcccaggttcaagtgattgtcctgccttagcctcctgccaccacgcccccgcctatgcccggctaattttttgtatttttagtagagacgggtttcaccatgttggtcaggctggtctcggactcctgacctcaagtaatccagggctaatactctttcaggaatctaattttaaaagagcacaggcagggaaacgagagcccttccaaaaatgatggagagcaggcagaacacttgcaggtgccgagaaggaccctggagtcactgtgttgcttggcaaagtccctgctgccctcagggctgcagcctgtgttctgggttcctctggggcagaggtcagaggtggagagaaccagaaaagcctctacttatggtgactcagggacctatttcctcttgtgaaaaacaagactggcagactgtggaggtcctggcagaggcttcaggccagtcatcttcccctcagaggagatacgtcggaggctccatcgctgaggtcagggccagggccatggttcccactccctgacccgtcagccaaggcacaggccccaggatgagctgggctcacacctggtacctgcagtctcagagccaaccacactaggactttggggcatggttcaggaaggaggaagccacaggctcccagcaaccagagctcccagcccatcctgtactccagggaactacccgcctggatgcaccgcccagatgtcagtgttcaaggtagctgggacaggtggtgggcacactcccaagagctgcctagagtcttcacacaagatcccaaatagaccgattcccaaaggcccaaggccatgttacccaagttaaatctctttaatatcccaatacaaagtactgatgcaaaaagacaatgagaaaacccaggaagttggggggtggggggtggggagaggttttataaataaaaaaccccgagcagcttttcagaggcagaggagctaagagaagcagcagtccaaagtgaggaagggagtgtgtggctcctgggacctgccccttgtcccctcactcacagctgctcgtaaacacccctttcaaaaggggctgcaccctttggatatctgcttctttctcttggtccctgggacgcaactagctctggcttcaatcccctacaaaaattcctgagatctcggggaccccagccagcccttcccctgcagtaccccttggtggggagggctggggagccggtgagagttcatagcgtatccaggagcataggtcaggagcacaggggagcctctgagtcccctgcccgctccaaaagcacacaaaggggaaggctgccgtagagcttggggtccgtgaggggctggagcagaagcaggaagagtcccacacccagggcatagcctgccagcaggggccgcctctgtgggtgctccaaggccgcgcaaacagctgggaaacccatgtaattgcagaaggaatggcagagaaccggcccaatcaggtgtcctggggaaaagagacagcagctcagggagcagccctaccacctcctctggcccttccagggctagtgaccctcatcccctgaaacaggagatcaagatcccactaccccagccatccacccacacaccacggcctctgctcctttccacctctcagacctcaccaggctgagggctctggctcagcctgtctcaaggactggagtagaagaacttttgttcctagaacaaacagtattcccattctcccacccgctcctgtgggcccccagggacccatgagggactgaggaccaacctgtgcggatgaagaggaaagcagtgtaggcaccraagacagctgtgtaggagaactggaacgctggagacggggaggccacgagtgaccacacctgcacgcccttcctgcccccacactacatacccatcagccaaagaccgaccatcccctccccccggggcagtagctgcctgccccaccacctacagctgtcctgcaccccaacttcccacggtcagtggcctctccaatactgtggccctcagttcccaattccttctccagagtggccattagcgacatcatcatacaccctaacccaggccagctagccaggactcaccagcagacaagaagatgttccccacgctgctctggcggaaacgcagctgctcaataatatggtgaaaatgggctgggaaaaaggtgacaatcacatcacagtcattcctcccagcctcccttctaggactgcccctcacctcaagcccccttctgagctctcatgctgaaaacacaccaggactaatctggccagactcaccaactccaaaaaagagcgggcaggtgaacacagcagggcccagrcccatgcacggtgctaacatgggcagcatacaggcccggaacaccagctcctctgtcagcggggcgatcacttggttccgcagccaacgcatgtctgtgaggcagcgggcccaggagcggggggctgcagagggaattcaggacaagctgtgagtgacgggctgtcagacagtgagaccccagaggctccaagggctcctctcccacaactttaccctggccaaactcaggttaggcatcaatactgctgaggacgggggtgtggacccaacataaacccaatgtcttgagatgacctgaatggaaggcattagctgaggcaagggcatcctggaagtaaactctggagacaccaaaatttaagcaagactagctctggttggggaagcaggggacagtgctctctgatccacaccaaatactgctgggggttcccagggaactccttggacgttggcaatcaacccttagaggccacctagctctatgtttccattttactgatgagaaaacacacccagagagatgacatttcacgtgtccagatcacaccctgagcccgctgactccctgccccaatgtcctggactgcctgtgcctacttttcccttcagcctttaagactcacccaggacaaccttcagcccatctgccaggtcacaagggcaatccatagagagctgcatcagtgggcccaggaaaagaatctgagggcaagaaaacactttcaccataacccaccgcttttgcccagacctttgcccatgctccctgagactccaagcttgaaatcctctccagccacgatttccagaccatgcataccggaggaccctggggccatctcaaaagtcctgtctcccatcaaccaaaaaccaaaaacaagagtccacggcactgcccatcaggctrataacaaagaccagaagaaaaaatacagcaggagcactcaccatggtcagcaacaggggcagcagcgccgctgggaaaatgccctccagcctgaagcccatcagggtgagcagggatgtgcctggctgagccacaggaaagggggcatcagttttgcttcctcccctaaagacccctgagctctcaccgccgttgccctttgccccgcctccttcgcacctggatgcctgtgagttccctccagagcagcacgcacaggggtgagagactggacaccaccaggacgctggtgaagcgtcgcttgatgaccgcgggatggtccctacggaggggacagtaagttcagggggcccgcggctgcccatgagcacggasccgcccccggctcgcccaagctccgcccgcagggcgcggattccggtcgcgcgcagcccccgcacctgggcagttcgctcttccagacgtagaggctgccnnnnnnnnnnnnnnnnnnnnnnnnnnnnnnnnnnnnnnnnnnnnnnnnnnnnnnnnnnnnnnnnnnnnnnnnnnnnnnnnnnnnnnnnnnnnnnnnnnnnnnnnnnnnnnnnnnnnnnnnnnnnnnnnnnnnnnnnnnnnnnnnnnnnnnnnnnnnnnnnnnnnnnnnnnnnnnnnnnnnnnnnnnnnnnnnnnnnnnnnnnnnnnnnnnnnnnnnnnnnnnnnnnnnnnnnnnnnnnnnnnnnnnnnnnnnnnnnnnnnnnnnnnnnnnnnnnnnnnnnnnnnnnnnnnnnnnnnnnnnnnnnnnnnnnnnnnnnnnnnnnnnnnnnnnnnnnnnnnnnnnnnnnnnnnnnnnnnnnnnnnnnnnnnnnnnnnnnnnnnnnnnnnnnnnnnnnnnnnnnnnnnnnnnnnnnnnnnnnnnnnnnnnnnnnnnnnnnnnnnnnnnnnnnnnnnnnnnnnnnnnnnnnnnnnnnnnnnnnnnntgggcgcttgcggaaggggacccggctcagggcccagggctgggactcagccactctgacaggttggagacctcctgcagccacaggacgtcctgcgggaacaagggggcccggggtgaggacctctcagcagcggcccgtggcctgcacctcctgctgagcccttccctgcgcggccctcgcccagttacctccaggcggcttccgaggctcgccctgcccggcgccagggccctgccgtgagcctcgcggtgctcccttcctctargagtgagrggggccgcggtggcttccgggcggcgcggggcggcctctgacgggctcggggccctggcagagcgcagagctcgcatctcctctatgcgggggctgcccctcttgagcctcttgttttctgcttgcccgctggtatctaggagaaaaacaagcctcttcatcttactttcatggccctgtgctaggagcacccttggccaaggggaagcctgggagaacgggcgccgaggggctcttcccaccgcatccctgtcagcaggtcccatccacaccaaaaccctgcagctgtgggcgcttctggagcagcccgaggctgcagagacgtttcagggtctccctattctctcacccaggcgggagattgtcccgagccctcacttgggggactcaggccgctcagtaactttctgtatagattcttcctggagtctgcactgacaagctcccctccctgccagcctctgtcccccctcacctttctggcctcagttctgtctccctttgttgctcacgttgcattgagcagtgcccataggcagctttcctactcttaactgattcatttgtcaaattaaagcgagtttagatggatagattcttccccagcaggtcttg

SEQ ID NO: 94595 - DNA, 44698 bp, Homo sapiens
agtgcagcatgaaggccctggcagctggtgggcaggtgagcacaggaggaccctccaaccttaaatgttgctgactaatccctacaggctcctgctctatcccaaaagcacccacgcattatcagaggtggaggtggagtcagacagcttcatgaatgctgtgctctggctacgcacacacttgggcagctgaagccctgccattctgcatgagctgatcagcctgtgccacacttcgctcttgaggagctcaacggtctggcagggcagcaggaggctttctgggctctggactccacggatgcgtgggcagaggaatgtgggctatgtagtcataataaattaggacacagagcctggttcctgctggtactttgtaccaaaccatccccaaccccacctcccactctggggtgcagagaccctaggttctgggtgtggcagccacaagggcttcatctgcctccagtgtgagaagggagggaacagtgagaggcttagcctctgcctgtcctggcaaccaggactctgtaccagcctagcttccctgctgcagccccttccattagcaactactctgtaccacccttcccaagagtatgtctggaggactagtgtgaggccctgtctttccacggcacccatgggcaaaagtagtcccagggacattgccttggttggggaagcccctaggctggacagatcacctagcccagggtgtgctgggctcaagccacccgagccctagcaaggagtcactgacacatttcctggaagcaaaggctaagaagcatctgtacaggcataaagaggaaacatggctttatgtctgacaagaagttttgtcctccccaaggcatatggcatcaaggctgggcctaacccagtctcatgaccttgtgaatccagtccacaaacacagagacacgcgtgaagacagctggccagcgggaccttgcgcatactcggttggggattataattccttccaggacccagcagttgtgggtaaagcaggcaagtgggcccccgtagtcaccctggcaggtaggagaactgatgagggccccgggccacagcaatgactagcctgcttcatgataaaatagttcatttctagccccccatacccttccagggctggcccagggccctgccaccaacctcacaggcccccacaggggccaacagtccctcagtgcacatctcactctcccgcacacgtcctcggtgcttgatgttacactcctggttggagatgacattcagcaaggccacatttaggactgtgtcattacccgtacctgcagtgaggggaatggggagagggagagggtcctgcaggaagatccagggctgggcctcctggccaccagcagtcctgtgcactgtgctcttacctttggtctcaccccagcctgcaatctcacacttggtccctggaggcaccacataccattcagggggcaggcagatcagggccacacgctggttcagggtcacagatctttagcaagaatgggggcactcagggtctgaggccacaaggcccagccccacctcacaccctcccaggttgtccacatacctctccagcttgagcaggacaagctgggagcctgagggcccacacaccatcttggctactgggacccgctgtaggcttggctctccatgctgtgggttctggaacagggtgcccaaccatacctcatagcccgtgagaggcatatggctgggagagaagctctgctaggtcatttgtgactctcagtccattgccccaaggctcacttgttagcttgcctggggaagggggaaggtgggatgagactgggtccccaaacacaagggaggctcaccaggaggagaagcactgccgggcagtcagtatccactgctccttcactagagaccccccgcagaaatgctggccctgcctagaggagtggggaattaggacaggtaacagactcctgggacagatgctagacctgccatcttctggctaggacctctgggggcagggatagattcccagcccccagtgggataaccacagaggacacaacctcagctcctctctgtgggagacaggcagttgtgcctcaccgattccgcaagctgactgtccagggtgagttgcccggatggcccccaaccacgcgcagcttggaacgccgctgatccagccgatccaccctcttgccacacttctcaaactgcacctggtctgtaggatggggtgggctggatgaaacccagactgtgtggatgtcgtgggctaaagggcctgacccataactggcccaactcctaacctggggggtccaggattgatggcggctggtcatcagctgaaagacaaagttcactggggttaagggagccagcctttgggtgggggctgaggcagggtcatgggggaagcgtcactagtgctcaccgcagcgtcgcagggcacagtagtcgaatggggtccttgggtccatcgtgtagcaccagggcccatggctatccccatctgggttccggcagaagttctcctccagttgtgcatgcggttcggaggtaaacgtgaacctaggcggaagcgggagcaaaatcgtggcagggtagtctcaaccatttccaggctctggtcccagacaccaaagcatgccgccccagggttagggccctggcggggccgggagcaccagggactcactgcggcttgtgcggcgtctcagcggaccagcgctggcactggacacccttgcgggtcttgctgaccgtgccgcggtactgctcccctgcgccgtggtagcagtctgtggcgggtgcgggcagccatcaggccgagacctcgccccggccctccggttccaggcttccagcccggctctgtagcccccaagcttgggcctcaccctggggccgcacgtcgtctgtacaacgccggatctggtagcaaaaggccgcgcgcatgccgggccgcagtgtgaagcaccagggcgcctctgagccgtcggggttccggcagaagttctcccgaaggtctctaagcaggcgctccactcagccctagcccgccagcctccagccttgagcccgtgactaccttcctcccgtctcacccgcagcagcacgtcccaacgcccgccccccccccccacctcacttgcacgcgtatttttctggcgtaaatcggtgctgatgcgggatttgcgcgtcccaacgctggcaaggtacgcccgcagtggtggtattggctgtgccccggtagccctcacccttcccgcggaagcagctgacagttgtggcctcttggcggggctgtgcctcggacccttagatggaccgagataggtcgggccccgagcgagagctgagatccctctggggctgggaccaaacccgcctttcccaggtgtacggtactccacggggtatgctctcaggtcacgcccagcccctcttacctccccggccaagccacgcccctccccaaggttcccaggtaccctcccaggcctggtccccgccgcctaccgcagcgggggaggtcacagaactctcgctcgatctgcggatccgtagtgtagcaccatggccgctcggagccgtcaggattccggcaatagttgtcgtccagaccttggtcgaggaacctgggggcggtaatggggcgtgaacaagaccctgggactctggcttatctggccccgcccaattgccctacacggagccctgcccctggagtcctggaccttccctagcccggcccccaggacgccgataccgcctacgcgtacttgcccggctcgaaggggtgctggtgcgggtgctgaagatcccagcgctggcactcgcgccctgactccgtgcggtctaccgcgccgcggtattcctcgccattgcaccagacacacgcggctggagacaaagagccagtgggttcgtggatggacgtgggcttgtccctccactctcccagcttgacccggcgccgcttaccctcccggcaggatttgatgccgcagctctggaagcgcacagcagggtctgttgtgtagcaccaaggacctccggggtcgccatcagggttacggcagaagttctcttccaggccattccggagagtgggcgtgtacctgagggcccagagcatcactatagtgtgtgctgggggaaggccccaggccgggacggagggaaggtgtttgtctcacttgtgatcattcgggaacttgtggctccaagcctggcagggcaggccacccacggtcgtggccatggtgccccggtacccaaccccattgttcatgatgcaggtccgtacgtagtctgggagcaagagacagaagatcaacttgggctgaggtcccctgtctcccaccctgcccctctccacccccacttgcctttcttctggaagaggtcacagcgcccagaacgccgcagcctcgtgtggggcgagtgttgagtccatggcagcagttggcaaccatggctgctcacgttgtagtggaaggccctggagagaagaaggcacagggtaacgccacagcccaggcttccctgcccccagtcttatctaggcccagtggccactcaccggcagtccattaagggcccacagcgaccagcacactcttcagcatctgccacatcctcctgccaaggcccgggcaccaccgcatgtagcaggtgctgtagctctgtgccccggagcacttggaagtcattcaatggcgagcgctgccctgcagagtaggcatgagtgggtgcaggtcaggtgggcatacatgtcagtaatgtgtattggcatgtccacactttgttcattcaggggatcaaagctacaagcttctgggatggaccctgtatgcactttcaagggccagtctagccccctgcacagatacttgtgaaaaaaatttcccctgggaagcaggcccagacttggtagttatcaccggtgcctctgtttagtggcccaggcaccgggctcagatctaacacatacgctctgtgagagcagtgggtgatgaagcttgccccacctcatctctcaaatgagaatgctaaggctcagagccatcacattacccagccaggggccctggctaggcattcagactccaaatctgggctctcacctgcacaaaggcatatgctaggttagaggggtagatcaggctcaggaggggtcactgcctgctgtgtgcgtgcatctgtgtggtcctgacactgcttcagtgctagagcagacgtgctaatagaggcctaagtgggcaatgtctatgtgttcctagggcttcccagctgtgctcaagagggcaaggtcactgccccatgcccactgagcctctggctccccgacttttttctcatcctagaataggagaatggggccaaccccctcctgaaggcagatggggatcagggttgggggcacttaccagggacccctaagcattgagtcagaagcagcaggagtgggagccaccccatccttctggctggaggctgcactgtgacccaccacagccccatccgggaagttgtgaaacctgtccctacgggattgggtggctctggctccacacgtcagctcagggcctgctggaccctgacctgagacctggtgacaggagccatgaggggccaggcctcaggtcccataggtcagttgcaagggcctagtacagcttagtggacaggtgttaggaaggtttggtggggacacttgaggtgccctggggttggggtgaaacccctctgcagcctagtcagcccaagggcattgtgaaagtgagagctgccagaggtctgggctccagcccctgggtgacattaaacttttctgaatttcggtttttccctgtaaattggggaaaattacttgccccagcttcaacactgcctcccctccacccttttgctgctgccttatcaggccccagctgtaggcaggtcagcccacacccggcggcagagcccagagaggctcgctcatctcagccgccagaagtgtcatcccagggaaggtgagcgargctgtccactaggactaaataggggtggaggtaacaggtagcagggactctggcaggaacsgcctttcagacgttttmaggaccgtctgagcggggcctctaagtatgggtaggagacaggcggcctagggattccggttagcaygtcgcgttctgccgcagcagggctgggagcatccccrgrgcaggcggaggtcggaggtggtgaggcctttcggcgaagctgaggcctggaacaaccyggtgggaagccayggagggggtcccctmgcggaggctgggcgcgggccrgtgcgcgtgcgcggctggaggctcagcgcgcaagcgtgcgcgtgatttggccctgaacggacrccgtagccragaggttgggcggatgttgtgarccgggtcgckgcggccgaggctcsgggtgagtgasgggcggcagggctctgagcctggcgggttccggctattcccttcgcggtccgggctagtccastgcgagggcacctgcagcgcagggatctgrgtgcgaaactccgagcggaagctggtctggcaggtcctgtggagcttggggccaggcgggggcgacttgggggagccatgcgccgccctcgccgtccttgggctcccagacggagtaggttcagttctgagtccggataccccggcggggttggacgggatagccgtgacagggagtccccgggcggggacaaggtccgcctctcacctgggtcctcagcaactgactcccggagcccactccgggtgtctggaaggtctgctcatcaaatgaatgactgagtttaatcagatcttcaactactstggtagtgaaggggcaccgatcatggacgcccaccgagggcccgaggtcgggaaaatcaccttcccgaggagcaggcgtggtgcagacccacaagggtttgtggcgggagtagagggtctgtttggggtgagataagagactgaactgcagagtagggagtgctggctaaggcagtgctgcagagcgaaactctagacctgcgctgtctaatagaactttatatgatggtgggaacgttctacctttgtgctgtccaacagagtaaccattagccacatgtggtcattgaactcttgaaatgtggctaaggcaactgagaaatcgaattgttaatttttaaaactttaaatttaagtaacctcatgtggatgacggctgctgtgttggacagcacssctacacatcagtgaggccagcaccagggactcagtgcaggttctggagcagctgcagcagcaacatgatgtgagggatagatgcactaggaggaccaatggagtttgccatgagggctgggcaagggtggtgcttggatgaggtgggaggccacatgtgtgagtgggaatggtgaaactatcaggaccatggataaaagaagggaggaacccagggctgaggaaagaggctccagccttgtggggagtaagtgggacttatggctagagatgaccagaccagtggtggtctgcacttgggggaatgtgtaggattgtcgcttctggttgtgagctggactcagtatggcttacaactgagatggatacaggggctctgcccctaggacacctcactttggacattttggtctgatttccacagagctgagacattttgttatggttcggcaaaaatatatctagtacctgctctctgcccagccmtgtgctgggcacagggacactggagaacaagaagtggtccctgttacatgggcctagaccctggctaccctccctgtgtaggaagctgggagcccctgcattcccctgccctatgtgttagtgtgcatgcccctggcctcacctgctcccaagccttcctgccatggcaggactgaggtcaggtgtgggggcccctggctggccctgagtagacaggctctgtgtctggctcagcccccaggaccactggctgcccatgagagatgaaggatggcatccaagggggccggcatgtctttctcccgcaagagctataggctgacctcagatgctgagaaatccagggtcacaggtaagagctggcagggaaggaaggaggctcctcttgttgggaggagaaggaagggacaaaggcctcaggccttgctgcacctgtggctggcctaggaccagaagtctctggggccagcaggggccaggagctgcactgatcatgtggcccttttctcccttctgacttgtggctcaggcattgtgcaggagaagctgctgaatgactacctgaaccgcatcttttcctcttctgaacatgcaccccsagcagccaccagcaggtatggctgggtgggtggcccctcctcactctgctgggccagaccagaataaggaggctgcagttgtagggaaagggagcctgggctctggacagataggcttaggctctgttctcactgtgctcctggctgcgagatctctggccagagagtctgccttccgtackctgcttcttcctgtctccaggcagtgctagttccttctgagagtcagggagcagaggtcagggagcgggtgcacattcatgcccagctagcacctggcacctactccayacccagcatctgcccctgcatgtacctgccctcaccttggccccagcctggccccttgtagcttctgactgaccttgtaaagaacaaactcctccagggccttttctttacaagtttaatacttttaagtgtagtcagtataaaagttacaagtacattttagcagaaacttagagggccaggcacagtggttcacacctgtaatcscagcactttgggaggccaaggtgggtagattgcttgagtccaggagttcaagaccagcctgagcaacatggcaagaccccatctctacaataaaatacagaaattacctgggcatggtggtgtgcacctgtagtcccagctgttagggaggctgatgtgggaggatcacttgagcctaggaggttgaggctgcagtgagttggcctctgcatgccactgcactgtagcctgggtgacagagcaagaccctgtctctaaaaaaagaaggaaaagcacctgctatcttgttattttaacatgactattcaaatgtgattcttttctgtttctttctttgtgttacatttttaatttttaatttttgtgggtatgtagtaggtatatatatttatagggtacatgagatactttgatacaggcatgcaatgcgtaataatcacatcatggtaaatggggtatccatcccctcaagcatttatcttttgtcttataaacaatctagttatactcttttagttatttttaaatgtacaattattatttactatagtcactctgttctgctaccagataggtctcattaattcaatttttttgtacgcattagccatccccatctccccacaagccctrtactacccttccaagcctctggtaaccatccagtactttgcctctatgagttcaattgttttaatttttagctgtcacaaataagtgataacatgcaatgtttgtctttttctgcctggcttatttcatttaacataatgacctccagttccatccatgttgttgcatattacaggatctcattcttttttatggccgaatagtactccgttgtgtatatgtaccatgttttctttatttattcatctgttgatggacacttagattgcttccaaatcttggctattgtgaacagtgctgcaacaaacatgggaatgcagatatctctttgatatactgatttcccttctttcaggtatatacccagcagtggggttgctggatcatatggtagctcaatttttagtttagtttttttttttttgaaaaatttttttttttgagacggagtcttgctctgttgcccaggctggagtgcaggggcacaatctcagctcactgcaagctccgcctcccaggttcatgccattcttctgcctcagcctcccaagtagctgggactgcagrtgcccgccaccatgcccagctaattttttgcatttttagtagagacggggtttcaccgtgttagccaggatggtcttgatctcctgagctcgtgatccgcccacctcggcctcccaaagtgctgggattacaggcgtgagccagtgtgcctggccttttttttttttttttttttttttttgagatggagttttgctcttgttgcccagcctggagtgcagtggcatgatcttggctcactgcaacctctgcctcccaagttctagtaattctcctgcctcagcctcccgagtagctgggattacaggcacaaaccaccacacccagttaattttggtatttttagtagagatggggtttcgccatgttggccaggctggtctcgaactcctagcctcaggtgatcctcccacctcgacgtcccaaagtgctgagattacaggcatgagccaccgcacctgaccaatttttagttttttgaggaacctccaaactgttctcgatagtgattgcactattataatttacattcccactaacagcatacaggggttccacaacctcgccagcatttgttattgcctgtcttttggataaaagccattttagctggtgtgagatgatatctcgtagttttgatttgcatttctctgatgaccagtgacgttgaatgcctttccatatgcctgtttaccattcgtatgtcttcttttgagaaatgtctgttcgtatcttttgcccatcttttgatggaattattagtttttttcctatagagttgtttgcgttctttgtatattctggttattaatcccttgtcagatgggtagtttacaaatattttctcccatttgtgggctgtctcttcactttgttgatcgtttactttgctatgcagaagctttttaacttcatgtctgtttatcttataatgtatgtagttcagattatgctgtatagaaaactttaaaaaaatttatcaccttcagttcttttcttaaaacgtttttattgagctatgattaatatacaataaactacacatacttaaagtgtacaatttgataagtgttaacatatatataaaacccgtgaaaccatcactaccatcaaggtaatggacatgtccctcacttccaaaagtctatagaagtttgcatcctatttttatcatcaaatgttatcccgtgagtatttttccccattatcaatttatcttactgagcatctttaggkccagggggtctgctgtggcccataccagtgccctagtttggaaggacttttgcttttgtaaacaatgctgtgaggatgcccagggctggagtcgtgtggctagagtgtttgaactgcagtcacttttaagactgttgccagattacttcttcaaaggatcaagtaggttctccstccctgcagtgaggcacggttgtccctgtctctcaccccctcatcagccttagctgttctgtcttttacgacttctgccctttaggcaggtccaaaaggcagcaacgttacctgttctatttaagcaactgtggtggtcagaaagtgcctgcttgcagagagttcctgcccacccccaccccatactcagtcctggcctgttctcagagccatctgatccctacctcatgtgataccagagatggtcctactgctgctgctgctgctgtggccgccaggagagacagcaggtggtagggctgtcagtcagtggttgtgggsattcagggccctgaactgggacctaggagatccaaaaaggtcagggaagttgctggtcttggccaaatgggcagtgctgtaggcactcagtggtggctgtctcaggccgactgcccacagatatgtgcagtctgctctcaggatcaggcacacgacttttggggtcaggtacaagagtagctrctccaagtgtgggcttgttaagaactgttttcttttgagacagggtctcgctatgtcacagtcatagctcactgcaacctcaaagtcccaggctcaaggaatcctcccacctcagcctcccacatagctgggaccacaagcacatgccacagcacccagctaattttttttttttaagagacagggtcttactgtgtcacccaggctggtctcaaacccctgggctcaagtgattctcccacctcagcctcccaaagtgctgagactacaggtgtgagccaccatgcttggcctgtaactgcttttgaggaaggctcctttatccttgggcccactggggtattcagagatggggttggctttagccttctatgctactagctgagcaccccgactgcatagccaccacctggccttggcctgggacagagcagcagtggggaggggcctttgtgcatctctgctcctacagctcagggctgggagtggcttacactggggaatatgtgatccctgagcctgggtagtggctactttgtcagggtgcttrrccaacctttgtccccttccagagctttctgtctgtgtggatgagtggggtaagaactggcattaaaggtggaagagcaggtggtggcaccctgtgggcagccaggtgtgtaatgggcctctgttctgcctgagtcctgctggttaccaccacctcactccctgctattcttagcagctgagctcaggacagcactgactggcattagacagtacccttttccctctaggcctgtgtgttgagaggatgagggggccacccagacagatttttccmaactcctttggctcgggtaggtgggtcatgtgctccgctgaccatttatggactggcgggtacaggacagagccatccagcagctcagagggctgagcctttcatacttccagaacatgkcccattcaacacagactcccctggctgggtggtggcgagactggaatctgccccaaaggaaccacaggcctaggggcaagggttggactaggtggccttggtactgaccactttgggaaccagcatttctcccagccttcttcttccagacatcatcagcacagccacctttgagagcggacaggttatgtgstatgcagacagcacttgttattccctgggctcttcacagcatctctaacataagtcactattctgtttttacagatgaaggaattaagacttagagagggctactttttttttttttttttgagacagagtcttgctctgtcacccagactagagtgcagtggyrcgatcatggctcactgcaacctccgcctcccaggttcaagcaattctcctgcctccgcctcccaagtagctggtattacaggcacatgccaccgcgcccagcatttttagtagagtcgcaatttcaccatgttggccaggctggtcttgaactactgacctcgtgatctgcccgcctcagcctcccaaagtgctggkattacaggcatgagccaccgcacctggccacatactttttttttttttttttttgagacagagtcttactcttgttgcccgggctgaagtacaatgacacgatcttggcttactacaacctctgccccaccaaggttcaagctattctcctgcctctgtctcccgagtagctgggattatacgcatgcrccaccacactcagctaatttttgtatttttagtagggatggggtttcaccatgtggccaggctggtctcgaactcctgacctcaggtgatctgcccgcctcggcctcccaaagtgctgggattacaggcatgggccaccacacccggcctggactggttatacttttgagtttagtggagaattcggccttctgacctcctgcatgccagagtctaggactaggcacagccctttttctggagtctaggcagcccccctgtgagctcaggggaaaggatgggatttagtgtcatctggctgatttcaaggacttgtggacccctggcagcctctcactctccccaggaaacccctgaacttccagaacctgccagaacatttggaccagttgctacaggtggacaatgaggaggaggaaagccagggtatgtggccacctctggagtggggttgggaggtgcagagctgggacgtagcgggcctggagacgtctggtgagctcaggacaccctatgcatcctgtcaaatgctccaccctgcctgaccccacctctcctcttttcaggacaggttgaagggcggcttggcccatccactgtggtcctggaccacacaggcggctttgaggggcttctcctggtggatgatgacctgctgggggtgagtgagggtgaggtgtggagacccaggtccagccccttctgacatagccccaggctcctcctgatgtggccctagtctctctactcatctgatggggctgcagccaaaacttgtcctgacgtggccccagaccattgtgttctcagtcctcaaactctcccactaaagccctgaaacagtcttgatgtggactcagcccccagcccttcccagcacagccctgagtccctctctcatcctgccttggcccaggatccttcctgatacaagcctacccgctcccaccgtcctcaggcacagtgcagtgttggccgccacaggcaaataccaccagggctggctcagttggggatggggtctttttcccttggggagatgctctgtgtgcctgggagctagcccaccacccctcttcttcacccaggtgattggacacagcaactttggcaccatccgctctaccacatgcgtgtacaaaggtgagaccttaccctgctgtggcctaggtagtgaggagaaagtttaagggcccaggcatgaggcaagaggcagtctttgtccacctcgtggccctaactcagctctttccagggaaatggctctacgaggtcctcatctcctcccaggggctcatgcagatcggctggtgcaccatcagctgccgcttcaaccaggaggtacacgttggggaggggacccctccctgggcccagggagagcttctcctgccacaggcctcatcaggtctccagatcccctcagaactgcctaggaccctaactaacctggactgccctctggagaagaaacgtgtcccacccaatcccaggcaccccagctcagagaatacctsttactctttccctcagatcatctgttcccttctgtagagccatatgcatccaaggctggtgattggtgggctctggcccagaccctgcctgcctcaccagggacctcataggcatttcctccctaggagggggttggagatacacacaactcctatgcctatgatggcaaccgcgtgcgcaagtggaatgtgaccacaacgaattatggcaaggtgagagccaagcccctgtgggtcatccgccccatgactgttactacagcttatttggagccactgggcagccataagggactacagggcaccagggaagggtcagggacccaggtcctttgtccttgtggctagtctcccttgggtggttctggaaacgcagctggggttcagagtcagcaggctgctgggcttctgtgcatctggtgaggmctcctctcatggcaggcgtgggcagcgggggacatcgtgagctgcctgattgacctggatgatggcactctgtccttctgcctgtgagtttcctatytctatgcacaggcctggcccctggggcctccccagactgcccccagtttcctgggccctgtaaggggccagactgagtttgatagcctgagggtgggcagccacatgcttagcactggctcacagacccacccttctccccaggaacggtgtatcactgggcactgcctttgagaacctgtccaggggcctgggtatggcctacttcccagccatcagcctctctttcaaggagtccgtggccttcaactttggcagccgtcctctgcgatatcattttgtgaagatggctgtggrctgctcagaagctcttggggaggctgggatgaggggctccctaccccaggggtgccatgggctggtggcaggccctggctgctgcagagttagtggggggccatgtagagtgtcgaagaaaactttcctcgcagcagcctggttggttgggtgcccttgtctccactgaacagatgaggaatgtgaagcatcctccctagggagaataagtgggcaagttgtgatgcaaaccagccctgccctagagcccaggccccggggtggggggtgggcagtggagagggagtaggcatgtctgagccacagataaggcgttgctggcttaactctggcacctacccagtggcaggctaccggcccctgcaggacccaccgagtgctgacctggtgcgggcacagaggttgctgggctgcttccgggcagtgctgagtgtggagctggaccctgtggtgagctggggtctgggccaggcggggtggggggcttccacagcctcctgcccctcacacttctccctcctccccctccacacaggaggggcggctgttggacaaggagagctccaagtggcggttgcggggccagcccaccgtcctcctcacactggcccacatcttccatcactttgcaccgcttctggtgagcggcattggraggggcatgggaggggaggagacaggccatgctagacacgcccgtggtagatgtgccctcactgagggctgcagtgctgaggtcccacagcatcacctggcgggggccccatgtgaccagggccctcagacctcagtcagtcccctagggaaacagggacattgccaaccaagggcatcaggggatgtcctggaaagaagactgaaggataataacatcccaggccaaggaaactgcgtgtgccaagccttagaggagccgtggggcaatggccttcttgtccctcagtcagaccccggaaggggtcatctatgtttggtgttgctcgagtggctcaaggctctgtgcctgaggcttgtgccttggccatgtgccagggcaggggtgccttgaccagagtggaaggccaccacctcaccagtgcctggccttggtgcagygcaaggtgtatctggtggaggctgtgctcatgagcttcttgctgggcatcgtggagaagggcacacccacacaggcacagtccgtggtgcaccaggtcctggacctcttgtggctcttcatggaggtgaggctcctgacctcaggcctcaggcctggctgtcagtcttcactggggtcgggaagatayggggagaatcttggaaaaggccccagtcatggctgccttggcatctcttcccccaggactacgaggtacaagattgcctcaagcagttgatgatgtctctgcttcrgctgtaccgattctcacccattgtcccagacctgggcctacaggtgggagcccctacccctgccctgagccccctgggactcgcctgtccactctgaacgccccctctccacagatccattacctgcggctcactatcgccatcctgaggcatgagaagtcccgcaagtttctgcttagcaatgtcctgtatcctttccttgctgcctggcaggccagacatggggtgccctctggactcagcagaggccaggaaggggagtgtcatcaggccaggggtcccctgggagcatcaggaggaccagagctgcccaacgtggcattttctctacagagcaaggacgagagagcaaaggactgagcctggccagccagcctagccagggggttctgaatgactgcagactcgggctacgcagaggtgtgggaggggccacagggcctgccctcttcggccacagcccagcacttttgttcatgttccacagtggggattcctgcaagatctttaaggaggcagctcttcctgcttcccagaattgttgggaactgcatgagtgagtgagagcatagctttgagcccctggctgggaagcctcagcttgtagccgttttcttggtctggggtcttccagcctccaggaggcagacacaaagctgggagacacagaggtcagagttggggcctgagaaaaggccaccagtccctctctccagcttgtcccacagtcatctgttcctgtgacaagcccttatcgtgcacctgctgggtactggagctggtgggcttaaccaccacagctttttgtcagggagcatgccctgggggtcagacacatagcagcaacatgcccctgtggtggtgggagagctgtggtaggcacatccagggatgggctcctggggaaggactcttgagggtgtgcagagtgccctttggcaagcagagccctgccttgacacccgccagcttcgacgtgctccgctccgtygtcttcttttacatcaagagccccctgcgtgtggaggaggccggcctgcaggagctcattcccaccacctggtggccccactgctccagtagggaggtgagtgcaccccaagtgggatgggcagaggtcatggcaaggccyctggcctgggcatctggccactgggcatctagcatgaggccttttcactggccctggtccctgaagccctggagatggagtgtgggtgttctgagtgaaggaggcctggctaggtcccaggtgaccctgctgtattccacctgctacccctgcctagggcaaagagagcacggagatgaaggaggagaccgcagaggagcggctgcggcggcgagcctacgaacggggctgtcagcggctcaggaagcgcatcgaaggtcagcccgccttgggcacggggtagggtgggaggtgtgtgtgtgcacatgagggtgcttggaggtgcccatgtctaggtgggacttggggaaccctggtggtggagccctggcccaaacctgccccccatctcctggagcctgagggccatgttcctcacctsacctccagtggtggaagaactacaggtccagatcctgaagctgctgctggacaataaagatgacaatggggtgagtgactcccaggagccctgggtggggccctgtggggagggatgctgcactgggccttaagacccagagggtgggaactgggtttggttcccatggcaggggctgggggaaggtgcagcactgagccagcccagtctgggcctgcattctcagctcagcacmgcctcacttttccctctctcaaagggtgaagcttctaggtatatcttcctgaccaagtttcgcaagtttctgcaggagaacgccagtggccggggggtaggtgtcctccaggccagcccactgtggatccccggctgcactacacatgccatgccctcagcacctggcacttctcggactgcctcatccctgcctagccccaagcttttctctgctgcttttccctccctgcttaaccctcgaccctcaggcagggccttggatgaggaatgggcaaggcactggactggcaccaatgcatgtttcatgcctggtgtccacagaacatgcccatgctctgcccccctgagtacatggtctgyttcttacaccggctgatctctgccctgcgctactattgggatgaatacaaggcttccaatcctcatgcttccttcagtgagggtgagtggcaccggggtcccaggtcagtgaggctggacagagccaggcgtagggcagcccctaatgttagtgcagagtgctgagctgaggctgtgggctgtggggagttgtccccggcatcctgcctggttgagtcctacccagccacaggcggcttctccactggggcagcaggagccctgcaccgcaggcctgccgatcctgtgtttgctctgattgtcccacgggctcctaccattgtgggctcttttcttccgtccttgcccccccatttctctgtgcgtcctttatagggctgccttgggtgggtgctggggggccctgtgtttgagtccccaagggtcagtgggagccttacctgccctggattgggggatatcccacaggactggggctgggcctctctgcttctcctgagtgaacggctgccatgagtacccccatcaccccaagttatgcagctgctggctctgacctgaaatggcaggggtggagaagaggtaggggaggtctgtttcttggtccaggagacagtttctctgtctgcctggatgggtgagtggccaaagccagaattcccaggctgtgctaggccagattggaggggagggctgtggggagggtcttcctactgggccgtgaccactggcctagcctcctcaattcctcgcagaggcctacatcccgccccaggtcttctataatggcraggtggactactttgacctgcagcgcctggggggcctcctctcgcacctgcggaagaccctcaaaggtgtgtacaggcctgtgggccgggagcagttctggggccaggtgggggactgtccctgagcctgctctgctgtggatgctgagccatcctatggccaccagagggtgcccaagtctttccacccactcaggcagggagacactgatctgcctgccctacatctgggcagcttctctttcccgccagcacccacgccataggggtcgggcgtgcctggcaggggaccagggatcttggtgaggtgtggatggggcgtgcaggtgctgccggagctgccttcagggatgagcacaagctgccccggtgcagggctgagggcacagcgagagcaaggccctgagccgggcacaagggtgggtctgtgctgtcagaacctctctctggctgccgcagtgtatacgccggagtgcaggggctgagagacagggagcccaggtgtccccacacaggagataagggcctgcccaggtaggtaggggagggcacaggtggaggagaggagtcaggatgaccccaggcttcctgccagaggttgtgtggatggggtgccatcagggagaggggctgcaggaggtggtggagatgagaaattctgtttggacacagcgcgtttagcggggagcaaggcctgggcggggggcagcgaaggcggggtcagttgtcagcacggtggtggggatgagcctgggatgaggcttggctcccactgggagtgcccagaatgaagcagccctggcatctccttttgtttatggagtagtcagagagtgggggaggccctggagagcaggaagtcctgggaaacaaagccagggaccagcaggaagggcatgatgggcttacatctatgtagaataaagaaagtcaatttgaaaataaatgaaaaagaagggtgtgatggggaaggcctcctgttactgagtggcagctagacggggcccttgagatgcagagtgaaggctgggtggaggaggcggaggggcgaggggcagatacggtgctaaaccgggctctgcaaggcctcctgcccagtgtgctgggctctctcaccgtcctgggcacttccactgtggccccttgcgccaccactggcctgagaaccctcctgctcttcctcccagatgaccttgcttccaaagccaacaytgtgatcgacccactggagctccagtcaaccgccatggatgacctagatgaggatgaggagccagccccagctatggcccaggtgccgcagtgggggcaggcggtgggatttgtgttgggcttatcctgtatcttatgggcaggggtctcatccagggccacttcccgctccatgcaggcaaagggtttctcactgggctggtgccttgctgtgggtggaggcatggaccctccctcacaattctgcagccccgtgggccaagggaaccctgagccagccctggtcctggccgcctttcttcactgcagcgccccatgcaggccctggctgttggggggccactgcccctgccccggcccggctggctcagttctccaactttgggccgagccaaccgcttcctcagcacagcggctgtgagcctcatgaccccacggcggcctctgagcacctcggagaaagtgaaggtccgcacrctgagcgtggagcagaggacccgtgaggacagtaggtgcttggtggggtcaggcaggtccccgaaggacccttccacagtgtmcagtccccgatccgggcaaagccaaaatacaccccatgccctcccagccctgtggcctggcagcatcccaggagtgcaggaagcacactccgagggcaggagatcaatgccgcagaaataggtcctggcaccgcaggccttgccctgcactccacccctacccccatgcccccatgggctccccgcgggtccctccttgggcacaggaatgggagagatgatttcctctcctgctgtgaggcaggctcaggagagccgggatggccctacccttgacccttccctccccaactccccagttgaaggcagccactggaatgagggcttgctgctggggcggccccccgaggagcctgagcagcccctcaccgagaactcgctgctggaagtcctggatggggcggtcatgatgtacaacctcagcgtacaccagcagctgggcaaggtcgtgcactcttggaccccgcattgggtggcgggtgttgtgcgtgtttggttgtgtgtgtattcctgtgtgcacatgggcccgcagggctgcctgttcaagaccgtgcatgggagcacatgcctcagcgaggctggtttctgctcctgctgcctcagtctgacctgctgactgttgtgggaatgggaccgccctgggcctaaggttgggaccttggcagggctggggtccagactgggtctgaagaagcctggatgaagtgcccaaggggcactctggacatgtggtcccatgctgtgtagatggtgggtgtctccgatgatgtcaatgaatacgctatggctctgagggacacagaggacaagctccgccggtgccccaagagggtaaggcccacatagtcttggtgaggggcagcttgcttactcgtacaggtaaccacagatgaagtctggttctgggggctgccctggcagttctcatccccactctagccctggccatagcacgccagtgagagtggggctggcagcaaggcctggcacccatcaccagtgtggcctgtgcctaggtgccccccaccccctgggcccaataagtgctgaagcacacccactctcctcatcaattattcattgaccctgagtgcttcctcggccacttgcagagtcagcaggaagcagggcctggctccactgcaccctccggagccctctgctgtagctgccctagcccaggaaggtggggcccagtgtgtccaggctgagcttccctgacagcccccacccaccccgacctgtcagcagatccctgggtctggcagctgggggagcagcggttctggcatcaggtccctgggtgctctggccagcggctcacagacccccagctgggcctcacttccatgtcatgaggggaccaccatggccttgttctgaggctggctcagggtcaccagagggtcagtggcagaagaaggttttgaaaaatggagcccaatcccttgcctgctccaggcactagagggcccttcctaggctgcctgcaggatcagggtggacctgggtatggggccatgtcttgattgtcctcctttccccttgggtggcagaggaaggacatccttgcagagttgaccaagagccagaaggttttctcagaaaagctggaccacctgagccgccgtcttgcctgggtccatgccactgtctactcccaggtgtgctggtattgcagctgccccttcccgacctcactgtctggccacgggtctagcaagrttgtgccagggcccttgatgcccccaccctctcaggcctctggcacacacatgtcccttcccacacttcagactccatcaccccatgccatgtcccctgtacccctcatgctctgtggactgaggaagcgcagtttctggacctccagttcgcctcatagacctgtccttcgaggaacaaactctgtctgtctgcctcccctgctcccaccccctcccagtttcttggcccccgtccttctctcccagtgcatcaggggctctgcagtctttcccggaggcacactccaccatctgtgcctgcctctgtctgactcattaccacccgaggccactggcttgttccccactcactcattcacttgctcattcattcaataacatgcactcaaaacctggtgtgtgccaggtgctgtcctggaactagggacacacacacattaataagtcagaaagatgagcctctgccttctgaaggcactcagcctggtcagatacrtggatggacagacagatggatggggcactcctgctgtgactgaagtttcacccccaggcctcagactctctggacttgtttcctctccctgcccctcttggcatctcttccctaaccagtgagtgccctgagggtctcttcaggtgcccaggtcagggtatctgctgtcttcttgggcatacccctgcatgactgggtgatcgaggcctttggtatccccatttctatcatctctgcttgctgtttcttctcatggctcttttgcaaaacccaaaccacctccacctttttcccattcgtgactctcctgctaccctggatgaccgtgcttactgccccatgacaggaacttcctctcccttctgccctgagatttcctgcctgcccacctccctcagaagtttggctgccctctcccacactgtcttctcaagacccttgccctctcatctctctgcctttttttagttatgctaaaatatgtgtgacataaaatgtaccatcctagctgtgttttttttgttttgttttgttttgtgttttttttgagacagagtctcactctgttgcccaggctggagtgcaatggcatgatcttggctcactgcaacctctgtctcccgggttcaagcagttctcctggattatagatgtgctaccgcgcccagctactttttgtattttttggtagagacagggtttcactttgttggcgtggctggtctcaaactcctggcctcatgtgatcctgccacctcggcctcccaaagtgctggggttacaggcrtgcgccactgtgcccggtcacccatcatagccatttttaagtgttaagtctattcacattgtcgtgcagccaatctccacactcatttcatcttgcaaaactgatactccgtgcctgttgaacaaaacctcctgtcctcccttcyccagcttccctgacagctcccacccatccccacctgtcagcagatccctgggtctggcagctgggggagcagtggttctggcatcaggtccctgagtgctctggccagcggctcacagacccccagctgggccttacttccatgtcatgaggggaccaccatggccctgttctgaggctagctcaggttgcccctggcaaccaccatcctactttctgtctctgaatttgactatactaagcacctcatctaggaagaatcatacactatttgttcttttgtgtatggctttagcataatgtcctcaaggttcattcgtgttatagcatgtgtcagaatttcttcattttccaggctgaataatattctgttgtacggacaccacatttcatatatccagtcctttgctgatggacactcgggttgcttctactttgggctactgtgaataatgctgtaatgaacatgggtttgcaaagatctctttgagaccctaatttcaattcttttggttatatacccagaagtggaattactgtatcatatggtaattctgttttttattttatttttaattttaattttttattttttttgagatggagtctcactctgtcacccaggctggagtgcaatggtgcgatctcggctcacatcctgggttcaagtgttctcctgcctcagcctcccgagtagctgggactacaggtgcgcaccaccatgctcggctaatttttgtgattttttttttctttttttgaggtggagttttgctcttcttgcccaggctggagtgcaatggcgcgatctcggctcacggcagcctctgcctcccaggttcaagcaattctcctgcctcagcctcctgagtagctgggattacaggcatgtgccaccacgcccagctaattttgtatttttttttttttgagacagagtctcactctttcacccaggccggagtgcaatggcgctatctcagctcactgcaagctcygcctcccgggttcacaccattctcctgcctcagcctcccgagtagctgggactacaggcgcctgccaccacgcccggctaattttttgtatttttagtagagacagggtttcaccgtgttagccaggatggtctcgatctcctgacctcgtgatccacccgcctcggcctcccaaagtgctgggattacaggcgtgagccaccgcgcctggcctaattttgtatttttttttagtagagatggggtttcttcatattgatcaggctggtcttgaactcccgacctcaggtgattcgcccgcctcggcctcccaaagtgctggggttacaggcgtgagccatcgcgccctgcaatttttgtattttttgtacagatggggtttcaccgtgttggtcaggctggtcttgaactgctgacctcaggtgatccgcctgcctcggcttcccaaagtgctgggattgcaggcatgagccaccgcgcccggccaattctgttgtttaattttttggaaactaccatatcatttctacagtggctgtgcctgttacattctcaccagtagtgcatgagggttccaatttctccatacatatccttaccgacacttcttattttctgccctttttttttcttggtagacgcagggtctcactatgttgcccagttgtcaaactcctgggttcaaggaatcctcctgcctcggcctcccaaagtgcggggattataggcatgagccaccayacccggcaatttctacttttttaatagtaaatcctaatgggtaggatatggtaccttattgtggttctgcattttgctaatgattagtgacattatgacaaatagtacctttacaagcacttattggccatttgcatatcttttgtttgttggtttgtttgttttgttttgagagggagtctcgctctgtggcacaggctggagtgcagtggcaagattttggctcactgcaacctctgcctcccaggttcaagcgattcttccacctcggcctcctgagtagctgggactataggcatacgccaccacgcccggctaatttttgtatttttagtagagatggggtttcaccttgttggtcaggctggtctcaaactcctgaccttaggtgatccgcctgcctcggcctcccaaagtgctgggattacaggcttcagcaaccgcgcctggccatatcctataattttgctgaatttatttattaatcctagttggggttttgtgtgtgtgtgtgtatctttaggattttctacttataaaatcatgtctgtgaacagagataattttactttatcctttccagtgtggtttcctttctttttcatgcttagttgctctggctgggatttccaggactgtgctgagcagaagtagagaaagtggcacacttgtcttgttcttggtctgagggagggagggattatagtctgttaccactgagtgtgatgttagatggaggcttttcatatatggtctttattatgttgaactgccttcattctctgcatcttcagcactaactcacctgtgtctttctaatcccattattaatggagagattcactcctgtaaaccagcactttgggaggctgaagcgggaggatcacttgaagccaagagttcatgaccagcctgggcaacccatctctacaaaaaaaacaaaatttaattagcggggcatggtgacacatacctgtagtcccagctactctgaggtcaggagttcaagaccagcctggccaacatggcgaaaccccatctctcctaaaaatacaaaaattagcagggcgtggtatcacatacctgtaggaggatcacatgagcccaggagttccaggttacagtgagctgtgattgtgccactgcattccagccttgacgctatatgtgcccaaaagttatgctctctccttctttctctgtcttagctgctacatcttccccttcatctccctccagcacaggctcttccccatctctgaaatagtctcaycagggtctctgtctgcccccatctcaatccggccggcacatttccatctcctttgcattgataccttagctctgatggggccattgccagcccctcaccagacacagtcttcgctggccttctgtagcagcaggatcatcgctgcctaggtttgcgcctaggccctcccctaacctcttgcttacatcttctcctcagttccttgggctttagggcacatcagagagctggtgtgaagcccaggtgctgtgaccgcactccaagacacacgggtgctgtgggtctgggctggggcctgaggcctcattcttgcctgggctcctttgtgagaccctgacatagactttgtggaaaccacattgtggggagcagggccctcagcaggttttgtctgtttcctgtgacctctgttccaccagtcacactgccccctgctttcccaccaccttctcctttgcactccagatcaaatttctgcctgtctgcttaccatcgccagctctcttgggcccttcacacaccttgtactccacttttccacacagacttccagtcacagcaccctcttgcctaaaacttgcttacaggctgaggcaggcagatcacctgaggtcaggagttcaagaccagcctggccaacatggcgaaaccccatctctactaaaaatacaaaaattagccgagcgcggtatcacatacctgtagtcccagctactcgggaggctgaggcaagacaatcccttgaacttgggaggcggaggtttccagtgagccaagagggcgtcactgcactccagcctgggtgactccatctcaaaaaaaaaaaaaacttgcttacaaatatgctgaccagagttctggcctgggtcacagtaatgcgccctccaggctgagtgcgtccctcttgcctgctgaggacttgattgccctgcttgagctactgctcatgcttcctgaaatccaggtctcagttgtgctgtcgtaggcctggggaggcctttcctgatccccaggccaggacatgcccccaagaccccactggtgcgcaacccagcagcaccccgtgtgcctcctgcaggagaagatgctggacatctactggctgctgcgcgtctgcctgcggaccattgagcacggtgatcrcacagggtctctctttgccttcatgcccgagttctacctgagcgtggccatcaacagctacagtgctctcaagaattactttggtcccgtgcacagcatggaggagctcccaggtgatggaaccattcaggctgaggcagaagcagaaaaggggtctctagtgtgagccctaggagccctggtctgagacctctgtggcccagcaacacacwtctgtggggggcggggaggggaggagcttcctctgtggttcaccctgcagcaaacaaacgtctgcaccctgccctgggacctgcagccacagagccaacagctccctagcaaaggaaaacagacaagatggaacacggtgggtgtagacctcttggctttcacttccttcctagtgctatgagcaactgccatggtccaggagccagctggccttgcaccttgactccctggcactggtcacaaagcgtagcagttggtcaggggcagaatggtttgtcttggtaaatcacagcagggggtggaccctgctagggtccacatccgaacctgggcctctcagcctgctgattccaggctgggcgtggcagtgtatgtctggatcaggcagtgagctgtcaggcccctagcctgccccctgcccagccacaggcctcagtgcaggctttgtcttcaaagacagagctgtgagtgcccaaggagctttgactgctcatcaggtgtgtgtgctgagatgggtttgagcccaggtcagggctcctgccagggcctgtcatcccttcacagtgagcctgtgccttagcccttgcacagccaccaatgaatgctttgcccgatgtccccagatgccaccctgggtccaggctggccttgggagccagctctagagcctgctacccaagtccacccaccctgctgacatgcctgcctctggagcccccactcccagccgacacgtctcacttcccacccttgcaggctatgaagagaccctgacccgcctggctgccattctcgccaaacactttgccgacgcacgcattgtgggcactggtgaggggcccctacagagggtacagggggagggggatgggatggcacctctggtcggctttcttctatgaaaaatgtggccaggtgggcatgaagtatgggtccagggctcatgccaagcccctgctgaggcacggtgtgtccccgcagacatccgagactcactgatgcaggccctggccagctacgtgtgctacccacactccctgcgggctgtggagcgaatccccgaggagcagtgagtggggcctggggggcacacaccctggccacaagcaccatgcccagcctcaccccgtctctcccctccttgccctcacaggcgtatcgccatggtgaggaacctcctggcgccctatgagcagcggccctgggcccagaccaactggatcctggtgcggctctggagggtaagcctgactcgaggggaagtggctgaggctggctggagggagagggtgcgctgtcccattgacctgrgcactgacccccacctccacagggctgtggcttcgggtaccgctatacacggctgccacatctgctgaaaaccaaacttgaggaygccaatttgcccagcctccagagtgagtatctgggttgggcgagtcctgggcaaggcaggcgggggcgcttacctcctacccatgggttctttcagactctccacttcttccagcccctctctggttcccccattgggtcccagactccctacgtgtcccctggggtttccactttccctgcttccttccagcccaaggatactcgggatgggactccccctccccagccttgcccacagtcttacctacatgtgccctttgggcctggatgctctatgtgggtcatggtgagaggcggcaccatgttcctggcmtgctacagctcatgcagactgaatactctgtcccttgccctttaagctagctccctgacctccagccttgtcccagcaccatgtccttctgcttcttttttgctatctgctggtggcagaccctggccttggcttaggccttggacacctgagtccactgggagcacagattggaggttggccaggtccccagagggtattcacgagagttcctggaggaagggacatttagttgggagcagaggctgtgccctctctccagggtccagcaaggactttcccctaggcctggcccttgcagagtgccaggtgtgccacacactgtcctcacccttcatggtggctcttcttggctcatgtagtctgtttctgcccttgtgggcagtgttttggtccaaagggtgtccccagagaggctgagtgtcttctgctaagtcacacagcaagtccttgccaattgccgtggtcctgcgtccagggcggaactgagctgcaagtggagagcggcagtggggccaggcctgtcytgctgctgcgggaactattgatttgtatcaagctggtggggaggtgcgccaggcccgttgcagctgagggctccggttactgctgcctgccagcccagacttggtgcccaccacctcggccatatgccaaggccaggccaagggcagcagaggacagtagaggacagcaggtttgcagcagggcttagagtaggctcttggaggagctggccttggtgccggtggggaagcatctaagccgccctgtttaggtctgaccctatctgaagggtgtgcgacccagaacttgctgagggtcaggctgtggctgtgtggctgctctggacctggagtggatggtgtggtgtcagggctggacacagctgcagcctggggcttgcctagtagaaggaggggacagattctgtcccaactaactccaaggcagctgtcctctgtcccctgctttcatgacctgagcattcctagggagccatctttctgtccttataccaaagcctcaatgggcgaggacagaggcaaacaggcagaggccactgcagtggagtccctgatgatgccgcctcctgtccccckgcagagccctgcccttccaccctgctgcagcagcacatggcggacctcctacagcagggtcctgatgtggcacccagcttcctcaacagcgtcctcaatcagctcaactgggccttctctgaattcattggcatgatccaagaggtgggctgtggtggggcctcgtgggttagggtggtgcaagggatgaggcctggtcctgggctagagccaggtgctgaccactgcatgcccacgtgttggtggctcagatccagcaggctgctgagcgcctggagcggaactttgtggacagccggcagctcaaggtatgtgccacctgctttgacctctcggtcagcctgctgcgtgtcttggagatgactatcacactggtgcctgagatattccttgactggacccggcctacctctgagatgctgctgcggcgtcttgcacaggtgtggccatctgggcaacaagggtgggaccctggggatgccccattgatgacgctccccatccaccaatggaytcctgctcccctcacagctgctaaaccaggtgctgaaccgggtgacagctgagaggaacctgtttgatcgtgtggtcaccctacggctgcctggtgaggacctagatgccctgcaccccaacacactacaggcctcggttcctctgctaggaacagtgaggcctgattccacattctgcccccggacagccagacttggtgctctgcagtctcggctcacccttctgtagagagggcagtgggcaggcctggagcccttgaagcaggagcrtgtgggtggctcatctctttcctccccytcccctcaggcctagagagcgtggaccactatcccattctggtggcagtgacgggcatcctggtgcagctcctggtgcgtggccyagcctcagagtgagtgttggggaccgtgggcccctgtgggagttgggtgtgtctggtgaggaggggctggacagggcctcctggtacttcagtttcctcatctggaaaatggacctcagcatcaggttttgaggcagagggaaggtggtgaggtgtgaacggcctaaatagggggcagacggagctgctctaagtaggagaatctgggaccccagcaggacaggtggccctggcccacagagccactggcttgtggccatgcctcaggccaggcatgggaggcaggactccggagggtgtgccgtcctgtggtggacagggccaggccgccaggagagctgaacacacggaggaccgccattgtctgcaaaggctctagcaataagcatgtgctacctttattaaactctggagcagcgaggtccaggatggccatgggggcccccagctcggcccccacacatgaagggctcccagaccccccttccctgcccccctgcagtgggagcagtgagatgcatatgaagccagggtaccgcctcagccattaggctgagaccagtgccagcccttaagaggctcctgctctcgagggacgtggagttccggctcggccctcccagctcggccatgctcgccaggcttttcgggctttttactgctgaaaagcaggggtgcaggccatgatccccttcactgtgtcttgtgagcccacagaatgggctctgccttcagaacaacgggtggatgccccaggccagagagagcagggcctctggctggggcttaggccagaccaccaggaacctcttgaggagcctttcctgcctggtgcctgcccaccggactctgcgtgaagttgtgaagctttcaggaggttgggtgttggtggatggagggagtcccatttcaccagagggcgggcttgtttcctctttctgtcctggggtgtgggcgagatcttccttcagagccgccttcttttccctgtgggcccactccctcccacccccttgggaaggggaggtggccctgcgtcagctcttgagcaccactcctcgagagctgtctcagcccctgagggtggacgggaggctctgctacaggggttcttccacaggctgtagaagaacacagccacttccacagctgtgctgtgttgaaagccacaggggcctgggtctctcagcctcacagggcatttgggcactaggaagtccgcgggaaagcaggaactagcacaccttgcagggcctggggcctttgggtcctgtgcaggggcagagcagaaggcaggttggggaccacaacccctgtctctaccagtgagcgagaaggcccattgtgtttcgaggcccatacaggaagctggggggccaggcacagtgcttcccaccagtatctgccagttctctggaccgaagcagggagcagggcgagcagcaagagggtgggggcctgggtgggggagccctgggcagtctaggttgtcatgggaccctcggagcctatggagctggcggactcagagccagccttcagctgcaggcctccagggttgtagagatcraattcctcagctactgccagctgcacgcggccattgaggcccctccggcctggctccagaaagactacgtgcttgtggacgctggccttgcggctgggtgcgtctggcggtgtggtgctgagtactgaggactgtgcgctcagctcttggagcgggctgggtgtttggggccagcggcggcagcggcaggcacggcggcagcagyggcagggtggggcgaacaggtagagcagcacgagcacaaggcccacggcacagcccagcagtgtggtgaagcctgtgttgaaagcctcgggctctgggcgcggaaagtgcacgctcacgttgtactcgtgcgtctggttgtggtgcaggcggggcccagtggccaggcacacgaagagtcccgcatgctgctcctgtacgttgcctatggccaagctgccgtcggccagcaccgcgatgctgccatcgcgggatcctggcgccctgagaagctcctgctgcggcgaaacycaggcaatgcgcatggccgggacgctggtgttgcagtaaagcctcagggaccgacccaccagcgcgtacaggtgctcttccggccgctctaggccaagagctggggccgacgagcagttctcaaagacgcggctgtgctggaagaagcgcacgcgggacgcgggtaccttgaaggccaagcatacgtactcgcgcgcaaagtcgcgcacggcgctcaggccccgctggtgccagcgctgtagcagrtggtagaggcggcagtcgcaaggcaaagggttgttgtgcaagtagaggccgttcttgaggaaggccggcagcgcggccagctcaggtacggagatgtgtcccagccggttggaggagaggtccagagtaagcaggtgggtggcgctcagaccgtgcaggtggtcgaaggagaacgaggcgagttcgttgcagcccaggtagagatggctgagcgcgcgcaggccgtggaaggcatgctcgtccaagtgcaccaagcggttattgaacagaagcagcttctccagcgcccccagcccgtygaggtcgtggcggccaagcgcccgcaacgtgttagatgatagatcgagcagcctcaggccgctggcgttgacgaagacgccgcgacccagcgcatctagttcgttgtggtctaggtgcagggcgcgcagctggaagaggggcgccaaccagccggggcgcaggcgctggagcgcgttgtggctcaggtcgaggtccgcagtagcggcaggtaactcggctggcacgtcctgcagccctaggccagtgcagcttagcaggtcggcagcgcagatacatttgtaggggcagttgtggagcgcacggggcgggaaaccctcggagtccggggtgcctaacccaacgcgcagcatgcagagcagtgtccccagcagcaccaaccaggtcatggcggcgaccaccagggacagtacagagcagctctgtgcaggttgcagttccaggactcaccctcttctgctctagtgcgacatgggtggcaccggatggcccttgccgaggaggcacggcgggttcttgccagccgacggcccctactctccggttcccaggttgtgaggcggtgcggcactcttagccgcgctcccttcggcttcgctagccctctccaagcgagttcctgatcggctcctaaatactccccccaggggcggggcccgggctcctattggttcccgtttgaggaggcggggcggctacatccctttgtgcccaatggccccgcatgaccgccagatggggagcaaggccaaccccaaagtccccgtcagcctttggctggcagctctccgccgctcgtttttcctcggggagtaaaagggggagtctggaagaatgtctccaagctgctgttagtgtttatttgaagtgactttgaaggactgataatattatggggcaggcagactctcactatcttaaggkggttcgcctgagccttcttaaagtggtaccccaggccgggcgcggtggctcacgcctgtaatcccagcactttgggaagccaaggcaggtggatcacctgaggtcaggaattcgagaccagcctggccaacctggtgaaaccctgtctctactaaaaatacaacaattagccgggcgtggtggtgggcgtctgcaattccagctactcgggaggctaaagcaggagaatcacttgaacccgggaggtggaggttgcagtgagccgagatcgtgccatcgcactccagcctgggcaacagagcgagactcgtctcaagaaaaaaaaaaaaaaaacaggctgtgtggcaccttactagaatacaggacttggggtttgggaagcagggagacggaaaggatgcagggggggtgatcatgtacgagccatggcactcctcattggcaatcccaagagagacttttagccaggccccaagccttctgactgcccttgcaccctcccctacctaggagagagcaagccacatcagtgctcctggcagatccctgcttccagctacgctcaatatgctatctcctgggacagccagagcccccagcacctggcactgctctgccagcccctgaccggaagcgcttctccctgcagagctgtgagtgggctggtggggcaggtcagggaaatctggggctgggtcgggtcaggagccttaagaacagcaaagtcctaggctgggaatattcaagaggcatcacatcctcagctacctctgacttgacactacctaccactccccagatgcggattatatcagtgccgatgagctggcccaagtggaacagatgctggcgcacctgacctctgcatctgcccaggcagcagctgcctccctggtgagtgggaacacggtgcacaggtccatgccacttgaatatgtgtgcactcctacacaggcacaayggacatccacatagccaggcatccaactccagcccacccttcactctcctccctgcagcccaccagtgaggaggacctctgccccatctgctatgcccacccyatctctgctgtgttccagccctgtggccacaagtcctgcaagtaagtgggccccacagcttggtggtggggagagcagtaggtacatgcagggcagtcctcatcccctcccctgttgtagagcctgtatcaaccagcacctgatgaacaacaaggactgcttcttctgcaaaaccaccatcgtgtctgtagaggactgggagaagggagccaatacgagtactacctcctcagctgcctagccctcacagcctgtgccatcctggarcctccacctttgaacccagagccaggctgggccctatttatgagctccctttgcccttctcctgtatcccacaccaccacatccaacctccttgcctgcctgtatcctcattggtgggagcccagccatggccctaattgtgcctgagcttgactttcagtcagggccacagtgagcattaaattattattccatacagccctggccctggcccttcttgagggagtggggtttgtggggtgtgcccagcagggatcctgccagatgatgtccacatgaraaggcaggtgtccaacagcttcagcttcacccagtgccccccagacaaataatgacaagtccagggtcttctgatgtgtcaggccagcactccccttgctgatgggaaaaccggggctcggccagccccactgcatcccctcacatgatgatacgaggctctggcactgactcgccaatagacttgtggggcagcacgctggctccgttgaggtagagctcatcattaactatgacgtcctcacccagcactgtcacgttctccatgcgtacctccaggagaggataggccttgtcagggaggcaggcacactccccgcccctctccccacccagcccagcccacaggcttacccactgacccacgcggcagcgccagcccacaatgcaggactcaagccaggaatgggaacggatccgggcatcccgcagcaccgtgcaccgccggatacacacaccatcttcgaccaccacgccaggtcccaggctcacattggggccaatgctgcagttctggccgatgcgggcacttgggtcctgagagcggtgggaaaaatacaagtgggccacttgtctcccaagactgagggggttaatgatgggctgggcaagggcctcaccaccagcacgttgcccacaatgccagggcctgagcacagccgctcaggctgcttctgcctcagtgactgcaggaagaggcacatgccagtgaggaagtccttgggctgcccaatgtccatccagaagcctgtagggagggatgcatcaggggcctcagcccagccacagaccacccccaccctgtggcctccctgcctcaccctgtaactccatggcatatagctgcccctccttggccataatggggaagacctccttctcaatggacgtaggctgcagctgtgggagtgggcagcttgtgagcagggtcatggcggtgatggcctgccccaccccagcccaccaacagctgtctcctacacacctggatgcgctgcagcactgcagggctcaggatgtacatgcctgcgttgatcttattggacacaaacacctgtggcttctccacgaaccggtgaatgcggcctgtgtcagcctcacacaccaccacaccgtacttggagggttcctccaccttggtcacctgaatgcaaggaaggggacctcggacctagtccagtgttcctaagccttgatacacatgccgttccagatctcaagagactctgccccaagtgcttaaagatacatactgcacagctctgtatccataacatccgaaggcagatgaaggctagggggcatgggaggctgggcatggagggtgaaagtgtcaagagagagaagacctggcgccttaccaggatggagccctcctggccatggtgccggtggaactgcaccatggcttggaaggggaaatcgcagatcacgtcactgttgaggacgaagaaagggtctgcagtctcagagagtaggtcacgggccagcgccaggggcccagctgggggaaggggacaggtcaccaccttgctggaggtctgagtccctggattcaggctcagcaggcccactccaggctgggtcttacccttttcctggccttaaaccctcccccaagggacctttctgcctctactgacctgtccccaaaggctcctcttcatgggacatggagattcggattcccagctggaaggaagaggcccccccagtcaggttctaccaggatgggaagttgggcggggaccgagaataagggccaagagtctgtgcctcaccctctgctcctgtgccttcatttccttctccagcacctgcgacatgtagctcacggccaggatcacgtggtccacgcctgcctgtcagaacgcaggccgacgggcgggctcagtcagaaggtacgggagcccctgacccctagtcgctggccatccctagtcccgccagatccgaacgcgactctgatcccgacccagggtcttaccgcggctagcgcctccacttggtgcagcaagatgggcttattgcagaagtccaccagtggcttcggggtgctcagcgtcagcggccgtagccgcgtcccatagccccccactaagatcagtgccttcatcgcgcctgcggacgttgagggggtgtcccgggctctgaggtgcctgcagcccgcctggccggtccctgccgcgcactcccaacgccgtgcccggccccgcgcccttcaccaacccgcctgacagactctggctccacctcgtccgcccggtcgccctgacgccggatccagggccgccacaacacagaacgcgacaccgggtagacggctgctggccccgaactcaggccggacccggcgcgggcagtgacgcgaccaccgcgggccaatcggctgccgcgtacgtggcacggccgccggcgtcggaacgttggagcgcagcgctgcgacagacgtagccaatgagcgcccgagtacgccgggctgccatggagacccgggccgggacccgcgggtcagctggccattggcggatccaaaggcggaactggcgccaagggcgaggccttgttccctgcttcgccgcggtccagcagccgccggccccgccccacggccccggcctcgccccgagggtgaccagggaaggctcccgggccacgggattttcacaaagacagactcgcctccgtttctagcggctttatttttgacatacacgacctcagacacaagcggggcgggcagcgctaggtgtacagaaaggagcgggctcggaccgagcaccccctcccccgcacgcaaggtccaaagcaaacgcaactgcggcgggagccaccggcgcaggcctcgggcggtggagacaggcttagcttccaggaaagagcagcagagagcgattcccagaacgcgagggcttacagttccccgagaagcaaaagaaccaggtccttcccagggttctccattattttttcctcattaaaatatattttaagtcagcacaaacataaccaaattgtacagctttaaagttcaaagcagtctgcatctagggaacgtgcatgtggtcaggagtgagcgcgtgagcagcggctacgtaactagcacaggtgccaggccccttgatgggaatccccatgctcactgcacaggcccagagagggaggggtggggtccctggcaagttgctacactggtccccttcctcttttaagcaccacccgtcccaccccaccctcaggggctggtgtcagcttggcccagggaagcactatagagagggctcacctgagcaccccaacccatgatcccatgttgcactttgttcccaagttggggctaagaaggctgggcctggcagggacagggctctctggcatggggcagggagaaagcagtggcagacagtatgcacacacacttgcccactaccattaaataacagggctgggtctccaggtgtccaaagtgctgaaaagaggggccctgctctaagggagcagcagcaaatcccaggccttcccactctttgtagtgccaggaaaatactgaatgtaagtgggtgcagctttgctcgctgtgaggagcagcagaatgcggcagcctctcctcccagaatcgaggaatctgggaggcacaggacatccccaaaaggtcccaaacagttccagaccctatgtcttaccctccaccctaccagggaatgactatctacactaatgaagggctactgcccccatggctgaagccacagaatggtacaggagagaagactgtaatttgtgaccagaaacaggcaagctgtccctcccagccccaaagaatgggaacctgcccaccagtggcaccagggctgggggctaggagagatggcatccatcaaggagcccttaagaggctgcatctttaaggaccaggaaatgagtccatcagttaccaaggcttctcacagctggcaggcttacctttaaagccaaacaggcacttgcctaaagtgacaatgaacagtgtggccctaggctcaaaggagagggtgctaaccttggcaatggctgaaatcggtgtcacctcctggccatctgttagaagcagcagatctgtgccattaagggctggcagccaaaatgactaaaaccatgagaaaggaagggtcactcctcaagccctcactgccccactctaagggttgagggccatattctaggcccacagaaatggtgctgggtcaacagggaaacaccaatttattctgctatcaggtctttataaaaaggcaacacctgtggaggaagggcatggggcaaaagctcacctcagaagtggaagtgttctgctgaggaaagcatgaaggaatgagtatatactaatgaacaaggctacaccccaggggaaggatcccaagggacgggctggcagccggacacatggacaaactgatggacccaggactgatcagacaaagctctcattagcagaatgtgggcacctgcacccagggcccataccacgtccctgtgagcaaaaaagcttaaagttctccctccaggcccagggccaagagcgcctcacaaagggctgctgccttgaacttggcctggggaaatgagaccctgagcggaccacagcccttgagccctgggaggagcagcccatccagcagcagcacagctgccgaaacttgaggaagaagactcccacccatagcacaagaactgcaaatactgtctgggccagagccaccagaggccctgaggcctgctaggacaccgactatcccccacttcagtggggtgggagggagtggccttcttaggcaagggaacttggtgagagaggctgtttcaggaataggacaggtgccaacctgtcacgtgccaacaggtgcctggggaacccaggcgccgccctctgccataagttggcctcagcccagcttcattaatctagccccatgctaaggtcagaccgaaggatgggtccagctttgtgcagtcagccctgtggtgccctgagggcacctattaaagagctagctgacacccacagcataagactggaaagcccccaagaaatgggcacccagagccctctacttctggggaacaagggaagagtgggcgtggaggggccctgcaccagcccagggctttaccttacaatcagcagggccctgcagccacagatctcaaagatctagacaagagaaaccaatgtccaagggcaccctgtccctgctgccaagcccaccaggggcacctcttccttcctaaggcagcctggacacaccagtcagagccacaaagctgaggagcctggctgagagggcgtgtggtctgccctccttcactttatatatatggattccaggctacagctaaaaacatttcttttagtttacaccaaagagaaatataaccctttaaaagcaagtctgtgtgtcctcacggcaagttcagaacaatggtccctgcctgcagtggagaggaaggggttctgggggcccagaacagggcctactggttctcgtcccgcatctgttccatgatgctgatgaggttctccaggccaaacacgtagcctctgtctggcccatcatgcacggtggggtcatcccggaagcccttgaatgtgctgtgtgcaaagtcaatcatgcggacatccaccttgggctgagaggagggacccgcctcggggctggtgttgctggggctggtgctggggccacaggatgacgccacctcagggagcaccatgtccaggtgcttgagacgcatctcagaccggcggtccaggcaggactcagcccggcactccttgccatcatagatgacaagcagggaactggagtagaagcggtaagaggcctgccgctccagcacagctttcaggccccgcagtttgctcaggataggctcaaacaggtcacgtcgcaggtccaggccattgtgcagatattgatagagggcattgcggaagccttcaatggagagcccacggccatagtacttgttcctgcagaggtaatgccctgtgtccagctggtacacctgaaaccccaggaggcagacagggtgagtgccagggaagtctgaagagctcacagtgccctgggcaaacactgtctggaagggactttgaccaacctgagcttttctgctcacctatctaagtggaaccaggcaggccacattcaccctgggttttcccattgcagaaccaagagaaagcaataccaggcct

SEQ ID NO: 94596 - DNA, 41831 bp, Homo sapiens
aagtaagcaatttcttcatagacacctccagtttatatattttgcaaataggcctttaacttgaagttcaattacttcaagaaaagtgtaacacttagaaggcttgtgaggccaacacctagtgtgttactgatcctatggtagggctgtgcatcacgtggttcacaattgaatttcaaaattttaacagtttacattagaaaactgttacctaacaaccaagcatatacaaactcatatacatacttaaattggtacggtggtgtatgtgtgcgtgcgtgtgtgtgtgtatgtgttgtagtcctcaagatgaagttaaatatagactttaattaccctgcaatgaatttaaaacacattctgtatgcttaaactttgagtgcgttggctgtgaaatgtatacatatataaagaggatacctactaaacccaccttaatcataaaggaaaattattttttgttagaattgcttattaaataggcatactttatactgtggtttataatttcaaatataacttggggttatggtcctattcactaagagaatgaaagatatccatgagttaaaagaacaaaactaaaaatttcagatctaacaattgaaagaaaattgaggcagtaaatgacctcttttactcttttatgttttacaatattatcatgttatttacagttaatgctgaaataattctcaagtgcaggaatataaatgttaagtggttttatgattccaagctgatatatttcacctgttaaaaattatgctgctaaattagcattagaggccttatgtttggtaattacaagtgtctgggctattggcgcgtctctatatatgtgtgtgctttgttccagtttcttcaaattatctatgtataattgtatgaaatatttaaatagcaaagaagtcaaagaagattgttaaatattcaacaagaatcataaatacctttatatgtattttaaaagtattgggctgttctgaacatgattatgctggtctgtctgycttttagcctgactccttcactcttgtgtgtgaagtctattagcaactttcaataagctaagcaatgttgtaacttgcaaaaaagcctccactctgagaaacagggccttatagagtaggaatgttttcatactgggactactgaaattttgcagatgtgtgcatctgttccatttaaggtgcccttaaatgtgttgaatgtaatgtgttgaatgtttatgtgtaatggctaaagtatctatatgtatgtgcataaaactgtcacaagatgtattctcaggaatactgttacctggagtttgaaaggaataactattaaaaaaaaaagttggggaagattagaaaaaagctcaagataaatgttcaaaatattattaagtacatgactaaaagctaattactacatatgataaatgcagtgttggtaatagtagatcatttcttaagccatgatacttaatgatatttatcttattcagaggaaaaacaaaaaaggtacccacttcccatgtagaaaaaattagactcagcaaagaggttgcttcttctgaaattagcttttgagagaccttggaataaaccatgtgttatccatgatagtatgactcagatccaattaaaacagtttaaattctggatataggatctcctatagcaaaacattttactttcatttttcagtatttgctgctttctagaattctattagataagctatgtcatttttctgaaaaagaaactgagttattgagtgtattaagacaaggcactgagaactacagtgtcaaaatcaaagggcataaatgggcatggcagtgctggtggaaaaatctgtggtactggtgatctggttagggcctgttgcacaggctgggagtaactggtttgctgtttcaagcctccaagagtaccttaaacaaggtgatagctcctctcttctttagcattatattcctttagtcaacaaagaactttstccactctgctgcccagctctgagagtatctgagatgagaataggatgtgtgtggaggggcttttagggaagaaagggtcataaatgaatagaagtacagtctgaaacatgaattaaatatccttcctcaagttataaaggatactttaatagaacacagtctccagaattcgctgctatcacaccaagtcatgctgttgccctgtgacctcacacttcccattccatggccttgtcttggcagggagtaaaaaatcccacttctttttactttagtgggtctcaactgcagcatttcagaaacaaattttgatttgacactcaggagaataaaaacaagttgagggcagaatgtatttggaaaagcttaagacaaatttactgatattattttatgatcatttaggattacagatcaatttacctccataaatctttgaattgtcactgtgaccacaggatgaaaatcctttattagccattttataggttaaaacaaaaaattgactacacagccgacttccctcagataactatgaagtctattatgagtactgaatgaccaaagaacatggaaaaaatgcatatgaataaatactgaaatgtttatgaaagatatttatgaaagatattaagacttctgtgtttaggtatgcacatatgataaaataaatctaaaaacattaaagatgcctaagtttcatttcttaatgtaggtaatagcttgactccttcaggaagatgttcattttggattcctggggtgtgcctttgttaatgccttgctgtccatcctcaacctccccagtctggcctgaggtcaccatccaattagacacctccaatacactctccgtgacccctccccacaaactgagctctactctactcatgctttgcaaatctacctttaaaaaataaaaataaacttctctgcccaggctttcatctactggaataactggtagatttcccagtgggattgttaaagatctggttgccctcacaatgtggccagaaatacgtggtcctgtgtcaggaattggtgggttcttggtctcaatgacttcaagaatgaagccacggacccttgcggtgagtgttacagttcttaaaggcagcgtatccggagtttgttccttctgatgttcagatgtgtttggagtttcttccttctggtgggttcgtggtctcgctggcttcaggagtgaagctgcagaccttcgcggtgagtgttacagctcttaaggcggtgcgtctggagttgttcattcctcccagtgggttcgtggtctcgctggcttcaggagtgaagctgcaaacctttgtggtgaatgttatagctcataaaggcagtgtggacccaaaggtgagcagtagcaagatttagtgcaaagagcaaaagaacaaacataccacagctcagaaggggacccaagccggttgccactgctggctcaggcagccttttcttctcttatctggccccacctacaccctgctgattggtccattttacagagagccgattggtccgttttgacagggtgctgactggtgcgtttacaatccctgagctagacacaaaagttctcctactagattagctagatacagagtgtccattggtgtatttacaaaccctgagctagacacagagtgctgattggtgcatttacaaaccttgagctagatacagagtgccaattggtgcattcacaatcccttagctagacataaagattctccaagtccctgccagattaactagatacagagtgcccattggtgcattcacaaaccctgagctagacacagggtgctgattggtgtgtttacaaaccttgagctagatacagagtgctgattggtgtatttacaatccctcagctagacataaagattctccaagtccccaccagactcaggagcccagctggcttcacccagtggatcccatactggggcggcaggtggagctacctgccagtcccctactgtgcgccggcactcctcagcccttgggcggtcgatgggactgggtgctgtggagcagggggcggcgctcctcagggacgctgggcgcgcaggagcccacggcatggaggggaggctcaggcatggtgggctgcaggtcccgagccctgccccgtagagggaggcagctaaggcctggcaagaaatccagcacagcagctgctggcccaggtgctaagcccctcactgcccggggccagcaggccagccggcccacccaagtgcggggccgcagagcccacgcccacctcgaactcgcgctggcccacaagtgccttgcagtcccagttcccgcccgtgcctctccctgcatacctccccacaagctgagggagccagctccggccttggccagcccagacggactcccacagtgcagcggtgggctgaaaggctcctcaagcgcggccagagtgggtgccaaggccaagaaggcaccgagagtgagcgagggctgccagcacgctgtcacctctcagtccaagttaccacttccgtcttttacacagagtacaagtgctctattctgaccccttaaggattgctcttgctaagtccatttatccccgccaagtggttttacttctgtctcttttcctgaccctaggcacatttagcatcaggatactcatccatttctgaactgtgtgtgaacagcacacaaacctatcacaatttgtgaatgagcattggagaggtgtaggggccaagggaaaactttcccttcaccctccaaaggtttgctgaaaatcactgacagaaagaagattaacaggagaaaaggcataaaaacttatttgattatagttttacctgacacaggagccttcagaatgaagacccaaaggtacaggggtgattacccatttttatacttaggttcaacaaagtatagccatgtagaaatacgattggacaaaataggcgatctaatgctaatagactgacctggccttggccagtctagtttagattcctggcctctctgtgcagcattccctcctcctggatatgggatagaaccttctctagaagaggagttttataacctacagttgagatgggtcaaataatttatggccagtttttacacagaaaggtggaggaaagttagagtaatgcttttgggttttgtgtctggcttcagggaaagggggttccggtttcaatgactcttcttagggaagatgggctccagtttctatgacctgcctcctagaatgagactgagaagagagcagggcaggaagtcagagaaacactgttgcgtctgaggccttcactttgggctatcattttctgagcctcaacagagggaaaaacaaaaaaggtaaggaggaactgcaaaggcagaaaaagagggtaatataataataactaccattttgtactgagcaccaggcatcctgctgggcgcattacctggcttcactcatttaatacaaccctaaagctgggcactgtctttacagatgagaaaaccgaagttaagaagtgatttgccaggtcacccagctagtatctggcagagccagggttcctccagctcaaaagaagagctctaggagaaatacgaggaagaaaggtttttaattgttgttttaaagggccagcataggcgctggagaggaaagaaaggcatatgcaaagggtggagaaacaaaaagtgatgttaagtcaagagccgaggagagggaactgcaggagaagcaaagtgaaaaaaggttaagaaacgccttgagtactgcgaggacgttaagatccaaacagcacaagaaggaaggtcaaaatgaggtgtacgaggcccgtgtgccccgccccgccccaggcggacggctgacagcgccccaccccaggaggaggcgggacttcctcaccgcagagtggctgcttccggtagaatccggaagcctgtacggagaaggggcggggccaaaactgcgcgcccaatcggggtgacgctctagccttgccggggactcgtgggtaacttgcttttgggagccagcggtatggcgtcgggctgcaagattggcccgtccatcctcaacagcgrcctggccaatttaggggccgagtgcctccggatgctagactctggggccgattatctgcacctggacgtaatggacgggtaactcctccgggctccggtcgggcttgccgcgcggcggggcggatcagtgcacctttattgactgcttgttggatgtaccgcgtccctgtaccaccgagcgcctcactctgaacgcgatgctagaaggggtgtggggtaggagccctggaggctctagcaggagcagaaccgacgcggtatcctgggttgcggccgggtcccaaacctcagttcctcccctccccccacgtaacgtgtggtcttccatcacttaggacccggaagcgacctaaatctttaggacatttcttcactttcagctagagaaactgaggcccaaggggagaagcatgacttgcccaagctcatatagctagttagtggcaaagctggggaaacagacttctctaacgatttaagttggcacctgcggttaggttcccgagttctgccacttgctgggttaccttggacaagccactaacctcattgagcttcagtttcataatttgaaaaatggaactactaacagaacctaccgcttaggcatcttggaagatgaaatgagcgagtacatgagaagtttacagtgcctggcgtatattaagttctctataattgttaattacatcattattacaattctgattttcctgtctattttctcttcaggcaccctgctcttcagggaggtcagttttttgtaagtaatttttaagcaccgtagttacagcacataatattgtttggagtcaggatattagtttctgaagttggttacagaatgaggaaacaaccccagagaaagcagtaagactccctcaagattacagaagattgtgacagacttgcaacttggctcttcctaggtttgccaagtagttctctgagccccactgttaactgactataaaaatcataaataccattatcttgagtggggatggaaaaataaatttattttaaataggtaaaaaccctgtgttccctcattcagtttgcaaattggtgttattttctaaaggtgatgatttccttttctttttaatgttaatctggctttgaagagttttatcttccattgctctatgtggttaaatgtattgtttctctttggcattttacccagttaccttaggagtccacccaactgataatgacaaaactttgaccatagagtactaaaaataataggccaaatgtgtaaaaagtttagtaaatattacctctcacaaaggttggcttttaattggccattatatgtaattatacttatatactttatttttgacatctttgcttgaaagccctaaactgtcacaggtaataataccctgagtgtctacctcaaaggtaagtagctacatttttgtgcctgagaaaatacctagagggtcacaggatggaacagctatgtgtatatttgtgagtctatttgagcaatttggttttaattaaactatgtttgagtaagttaatggttggggaaagtaattgtttcggttcaccagtcaggattattaatgataaccatagtagcaatgtttatgagcacttgactgtttctgttctggagtttttttgtgaattaactcaaacaaccgtttgaaattggtggtgttattaccaccagcatttgacagcgaggaattgggcacararaggttaagtcatctgccagtggtctcataactaggaaatggtggagccagggttggaagcaatgcaacagcttgtgttgtctcaaatgaaatgctttctgtggttcctaggcttacagggaatgactaagacattgtttggcctcaaaaaagcaactaataatttgtgtatttatttctgttaactgtatacttatttttgttaacttatttcatgtctctcctgctaccctataagcttcctgaaagccaagtttatcttctttttgctcacctatatattctttgctggaaaagcaccataaggtgcttagttattgttggccgaatgaatgaatagcttaatcataataggagaagtctctcagaagtcacttttgtccccttgcagctctatggcagactgagctcagtaaggcaaagtatttaccatggatcagagttttgggaacaaaaaaataaaaaatgaagtatttgttttttattgattcctcttcccctttgccaggagatactttggtttggaaaaactgaattctgcatacacaattttaaaattatttcccttttaatcttctctactttctgagttaagagctgtttctattccccttttgcaaaggaggaaaccagtgtagggagattcagcttcttccctgatgtctcaccagattcagcagagcctggcagagttggtgccagtgcccctacgtgatgtgctgtggtgtctactaggctagggctatgaaagtgggctgtggactcctttttgaaatgtggccagccacaatgtcccttccctcccaggactgccttcgtgttttttttttcctggccccttttaaaaatctcatccaacattacactttggatgtgcttattgttttctagtctcctccccactaagacctccaatttctcccctgattacaactgaatttcttcatttagaaagtcagaaaccagtctggggaatactgtggaaggtggagcactagcatgactggatatgtgaaacaaaggacaagtggattctctgggggaaaaaaaccctagaaaacacataaatgcatcatgacaggacagtgactagaatgtgttcatcctaaccatgggaacagagcaaagaattaatttctaaattcgctaccaggatttaaaactgggacgatttcacattaatactgcatttctgacttttgggggaaaaaaaaaaacagttcaaagacttgctagcactgggccctcagtcttaccaggtgacatgcgctggagctgacaggggcagyctcacctttagtcatgtggggtgtacttcatttggcccctttccctatctgctctgttttgctctttgatgttacctaactctcagcagcattgagtttgtgattcctgattcacaggaagattgtgttctagttacagtcctgtaccttttatagcaactctaatcctcctcttaccatctttgccttgttgggagatagggtaaatggcttgatctgtctgcagtagattgtgttagaattacgtaagtaaagcttaggagtgatgatggaacatgagagagaaaattgtatccttgtattacaaaaaattatagtgtaattccagtaagtccctggaagaaagggatacctttttattttattttatttctttcacacttaactaactccaggaaataacttaaaggaaaaagaggcagaataagataatgatgaagcagactttttagtgaagtttctctctgttaagtgaaataattaagtgttttccaagctggtctgttaactccctctggcatttgttcaaaattcagattcccggtcctctttggagtcagtaggctgaggtagagactgtaaatacattagaactgctctcatggttactgtttggcaaatttgggacaccctgacttcgtgcttaggattgtagcccctttttgttatggcttagcgtagcctttgggtttttttttgagactactgatgcattcttgttcttccaatatacttcgtgaacctagtgcattgaattgattttcaaaagcacaaattaagtcacgtaactttggggttagtatttttatacgttttgtttaggttttcccaaaaaagtaaaagtgtattttttttggttcttttatttactcgggaggtggttattatacttttattttcataataaatgaaacctactgttaagacaacgaaactatttcccagactacacagcaaattaaaagaacagtatgtgaaattcagatctttaattccagaattgtaaaacattcaataggccttactgcctgcttctgtgacccttatttcaagttctaagtaaacacatgcatcttatccacagccctgacaatcattgctcaggcaaatgttagaatcacttttttaatgatagaaattaaacctccaaagaccaaggtgttattgagtgaaagtgtctgttcccatccaccttatgtgtccctctcagatgtgtcctgaatccttacctctctctcttgaatctcttctccgctagactttttccccttgtttgtttcgtttgttgtcattatagggacagatgagcatagtagttaagagtctggactttgtagccatagtgcctatgtttaattcctgcctccagcacttactggttgtgtgaccttgggcctctgttcctcatctgtaaaatacagttaataaaagtacctacctcatagggttgttgtgaggttttaatgatttaatatacagaaagtctttagaactgtgtgtggcccacatataagtttggtttttattagcactcattctacctgtcatctaactgtgagaccttaaacatagtttgtattttaactcccctcccmcacacctaatcatttaaaagatccaatcagttttgcctgtcttgtcattcttagtgttccttgccacttaccaagtggcaattgcagtcacctaccctcttgtaatttatttcccatcctatcttatttattaatatttctcactttaagatcttacttcatatttacagcaggacaaaagtccagacactgagcttggcatttgacacctttaatgtgatactaccaacctcccatcttttttttacactagccaaagttggtcaataccactctccacgtctttgactgtaacttgcttatttctgcttttgcttcattttcagcctttgtttcttttcccatctttataaatcctattttgtaaatctcatgaacttctttcttaacgttctctaatacttgctcttattttatgtatgttttatctataatcacgttacctgcctgttattgtatagcttttcttgtaatcctcatataggataatacctgctgctttaacaaagcccagatttcagtagcttagcattctagtttctcattcataaaagagttcagtgtgagtgttattccattctgtggctcttccattctgtaagggctttgttggcagaagggtaaagtggcaataggaaaggaattctccttaaccttctgagctctgcagtgacacactacttgcactcacagtctggtggtgagagtcacatgagccacttggatgtaaagggaactgggaactgggatgtaaagtcacatgggccacttgaatataaagggaactgggaatgaaaaggtttgactgagttgacatcccactgacaactatacgatagcagtagggttgtgaattctggtgagtcattcattagctgtcaatctctgtcataggaactgtagcgtatttcctttacaaaacagtattctgaagcacctagtatggtacttgcatataggggattttttttgtttgtttttgtttktttttttttttttttttgagatggagtcttgctctgttgcccaggctggagtgcagtggcgtgatctcagctcactacagtctccacctcctgggtacaagcgatcttcctgcctcagcctcctgagtatctgggattatagacgcacgccaccacacccagctaatttttatatttttagtagagacggagtttcaccatgttggccaggctggtcttgaacacctgcccttgtgatctgccaccttgttctcccaaagtgctgggattacaggtgtgagccaccatgcccggccccggtttgktaaagatttaagtgaactagtgatagaacaaaaagattaactggagtagggtaaaggataagtaccgtgggtctggtagacttgatttgtttttgtttttgttttcgtttttgaggtaagtctcgctttgtcgcccaggctggaatacagtggcacgatcttggctcactgcaccctccacctcccagattcaaacgattctcctgcctcagcctgcctagaagctgggattacaggtgcatgccaccactcccagctaatttttgtatttttagtagagacagggtttcactatgttggccaggctggtcttgaactcctgacctcaagtgatctgcccgcctcagcctcccaaagtattggggttacaggcgtgagccactgtgcctggctggtagacttaatttgaatccacttccacaaattattaactgagttacttaaggattttatttatcttgtgctcttcaaaggggataataatagcatctactttgtaaggctgtcgtgaagatgaaatgaagtaaattacgatgcttggcatgtagtaaaccctcrgtgaaaggtggtcgttactaataaacacatcatgtttctttattagtcatctttaagaaagtttaaagaaactgtcatttagtgccttgtgatagaagtgattagaagtagccacaggcctcctgagatagactaggattcaggagatcaatattagagtccagaacttactaactagtgtgtgacttgggcaagtcataaagcctgagggtttctgattttatcatctctccatttctacttgtcatgggtcgtgaattacggagtcaaatcattatgaaaatatatgtgacgtgatttgttgaaatgtcaaggagacattgcctagtaaaaccaaaatgacccattatttttagtattayttaatactgatgattaagtattaaattgaaaaacattgcagacaatcccctcaacctgtgtcagaattcatattgagagagatacagaaactgaattgaaaacattttcagagtagattttgtttgtcttgtaggcattttgttcccaacatcacctttggtcaccctgtggtagaaagccttcgaaagcagctaggccaggaccctttctttggtaagtgggtgttacgccatctgaagctggatgtgttgctcaagtaaaggaaaactggatggttgattttaacttccaagttcatctggcaccctttccccaactttcctatcctgggtcttcattggcctgactccagtaacaagccaaacttcttcctgcctctgggccttggctaatctgcatggaaaggtagtagcttggctggctgcctcatctttgggcctcaagtcatttgtcatttcctcagagaggcctttttgagcgtcctctcccaaattaacctttatccaattatcttatcacctgttgattttcctctgagaacttcctttgatctgcgattacttttattagactataaactctctgagggcggggattgaatccagtttgtttactgtggttttcctaaagctaagcatagacatgatcagggctcagtgtaattgttaagtgaatttatgaatcagttgatttatggtccagaagccatttattttgtgcaaattggagctttctacaagtggtgcctaaatattcactccaatgtcctagtacaatgtaaattaagatttttaagattacttagtggcctacaagtgatttatgttaagttagcaatgtctcacctgccagatctcttaaacatgagaaattttacacatttttataaatagtgttatttatttttttcttttttttaaaatagagactgagtttcgccatgtttcccgggctagtctcaaactcctgggctcaagcaatccacctgccttggcctcccaaagtgctaggattacaggcttgagccaccagcctagccataaatagtttttttaacgtagcttacaatttagtagaacttagattctttttaatcagcatattgctgaccagttttatgaaggactctgtgctgttcactatggtagtcataagccacrtgtagctattaaaattaaataaacttaagttcatgaccagaatggccaacatggtgaaaccctgtctctactaaaaattcaaaaattaatcaggcgtggtggcaaacacctrtaatcccagctactcaggaggctgaggcatgagaatcacttgaacctgggaggtggagattgtrgtgagctgaggtcattccactgcactccagcctgagtgacagtgtgacactccatgtcaaaaaaaaaaaattttttttaaattaaataacataaacttaaaaattcggtttcttattcacgttaatcacattgcaagtcttcagtagtcacatattgtacagtgcagctatgggacatttccaatatcacagaaaattctgttgaatatagtctccagcctctgtgtaggatctatctactttgagttcaccaaagaaaatgtacattattacctcatttatgtggcatgaggaaacaatgttccaccaatatattcaccattttgaaatttccatataatgggatatagtcctctgattatctaaactttcttttaagccatgattagcttatatagcagataccgtgacttttcctatgaattacggttgttctcatgaccatgagaggtagatgaaataaatagcattgttttctcccactgtacaaccaatggccagaatcctcgcttctggcttgcttgtgtgaatttttttaatgcttgctttttttccccttttcgctcccttttatttgggctcccattgtcacaccatactattgtctatatcccttcctgtcagtgcctttccttttagcaatcctgtgttgctgccaccacacacaatctgctttttcttcttgtttttaatttgttgataaacttgctaattaatctttctagaatttggtctaaaagataaatgaactccattcactttaatgtttgggttttgtgacccttgttttttggtttttcgctttttgttgttgttgttgttgttgctttaagagacagactccgtctattacccaggcaagagtacagtggtacagtcatagctcactgcatccttgaactcctgggctcaagcaatcctcccgccacagctatagctaagactacaggtgtgtgccaccacaaccggctattttttttttttttttttttttactttttgtagagatgggatctccctgtattgcccaggctaatcttgaatgcttgggctcaagccatcctcctgccttggcttcccaaagtgttgtgatagtaggtgtaagtcactgagcccgactacctttgttttttatattgagaaacatttgtttaattcttggattttggttgttggataattgatacatgaatgtattctaggacctagattacatgttgtgttgtatatgtaacgctaacattcttaactgttcagttttcatattgagtagaaataaatgtctaagaaatacagtgatgggaaaagtctgttcctgttattgtctaaatcagtgatcctcaagtatgttgtataaggacccacacaaatccttaagaccctttcgggtcatccatgagagtatatcaaaactattttcataatcctaagaaattatttgccattatttctactgatggtacaaaaacattgatgagttagtttgctggtgccttaaccaactcaaggcagggactgtatcaggagttattcttcatcatcatgcatttgcaataaatatccttgatgaagcagtasaaattaataaatcttggtccctgaatacatgcctttttaatattttgtgtggcaaagtaggaagtgcatataaagtgcttgtgctgcattgctgcatactggaacataatggttttctcaaggaaaaccacttgcaccatagaggtgtgatctgaactagctgctttcctccagaacactatgtttgtttgaaagaacaactgacagatcaactatggtttttcagacctggctattttaatgacatttaaaaaatattaactaaatgaggctgtctcttcaaggaaagataccttgtcagtttttgttcccaaaattagaattttaaaaaacttgtgtatcttaccactctgggtttgatagcgtcccaacagttaacaagcttttctgatgagatctgtagttattttaccaaatgtgattttggggtactatggaatgaaatctgtcactatttgtaagatgtgtgtaactcagtaaatcagtacttaaaagacccattcaaaatacaagacaaacaatgggttttaatgtaacaaagaatgaaaagctcattgatagggtttacagagtgcacactgcagctaacctttataaaattaccacccagcacatttaagataggctaggctaagctatgatgtttggtgtgttaggtatattaaatgcagttagagataacagtattttcaatttagattgagttaattgggatgtaaccccattgtaagttacagaacatctgtattacaacagattagatacagaacagatgtgagaatataggtgtcttctgttaagccagacactgaaaacttgcaaaaatgtaaaacaaataataccactcttaattaataggtaatagagttatcctttttttttttttttttgagacagtcttgctctgtcacccaggctagagtgcagtggtggccttcatacctcactgaagcytcagtcttgatgggctccagcagtcctcccacctcacctctcccctccagtagctgggactgcaggggcacactaccatgcctagctaattattctgttgttgttgagaaggagtcttactatgttgcccaggatggtctcaaactgggctcaagccatcctccctcctcagcctcctaagattataggtgtgagccaccaaacccgccaaaaattacatgctttaaaatgtcttagtttgaatttctcatacattaaatatctataaatataatccatatcaacagaagtttcttggggtctttaataatttttaagagtgtaaactcctgggctcaagcaatccacttgccttggcctcccaaagtgccaggattacaggcttgagccaccgcacctagccatatatagtgtttttttaatgtaacttagaatttaatagaccttagattctttttaatcagcatattgttgaccaagtttatgaataatagattatgattataatagatgatagaatgattgggaattgctgatctaatgttaactatgcacagatttgctgaaccattgactccctgaacaccatagaacttctccattgagggttgctagtggttactggatgctagaggttgagtaaggatgacatagctagcagtctggtaacttaaggaatgaatagagtaggtttttttgttttttgttttttttttgagatggagtctcgctctgtcgcccaggctggagtgcagtggagcgatctcggctgactgcaagctccgcctcctggattcacgctgttctgcctcagcctctcgagtagctgggattacaggcgcccgccaccacgcccagctaatttttttgtatttttagtagagatggggtttcaccgtgttagccaggatggtctcgatctcctgacctcgtgatccacccgccttggcctcccaaagtgctggggttacaggcgtgagccaccgcgcccggcctggagtaggtattttaaaccggcttgaattttccttgtttatgatgcaaagaataagaaacaccagatttaatacatttttttaagaataaagttttacctattaaaatatgttctaatttaggccgggtgtggtggcccatacctataatccctgcacttcgggaagccagcgtcagaggatcacttgtggccagaagttcgagaccagcctgggaaacagtgagaactcatctctattaaaaaaaaaaaagttctcatacaattacttttgctggattagaaatacaaacgttaatcttgactttattagtcaagctttatactttctttttctgacttttttttttcaaggctttattgtatttcataattgttctgaaatgttagaatttttttcttaaatatagcttggctgtttcagaaatgtgcttcctctagcaaaataaaaaacttaaaacctctcctcactaccatctatcaaacacaggattcttcacagtgttatttcttggtttagcttgttttaagctgccctctccttcttatgaaatgctattatgttttaaatcaagatctttaagaaggccatgcccattttcaccttatgtgtttatatgaatcaagctttagaattaggatgaatatcaggtttcttgcagtcaacatgtccttccccctaaatttgttcttgcagtcttgcctctcaattaatggcagttccgttcttctagttgataaggtcaaaatccttgatgccatctttattttcctctcatctatctatccatggaggatcctcttatcctccacatctcatctatcctcagctctctttgctcttatttaagaacatatccatcccgaattgctgccatcatttttcacctgggttattgctatcgtagcttcctcagtcgatagtatcttgtcacttcactgtggtggtttttcccagtggcctgcagaatgctgaagggtttctcctcaccacatgcttccctgacctctgactggtgtatctccttccccaggcacaccagccatattaactgccaacctagtgtgcattttacttacttattttgtttattgtttgactctcgcattaagaatgtaatccctatgacaggagagtttcatgtttttgctctaaccctaggacctagaataattaatgatgcagcaatagctcgataaattgaaagaataaatgaaaaggatcacttaatttttcctagaggaaactagtttgcatggatagtatgacttattctttaagttttttagagtggcatttcctggacctggacctagatttcctgatttttagatgttaactttttatatacagcactgtatgctttttgtgggaaaatartgttttttgtaaatgaatttaaataaatccttgtcttcaaaataagaggaaactacctatactgaattagaactatttaaataatgatttgtgtgatggccaaagagttcttatcagaagtggcaaaaactacatacaggttggcttccaataacatgagccaggtatttttcagtaatattttgaagtgtcttttctttctagacatgcacatgatggtgtccaagccagaacagtgggtaaagccaatggctgtagcaggagccaatcagtacacctttcatctcgaggctactgagaacccaggggctttgattaaagacattcgggagaatgggatgaaggtaagaaatcgtgatgagagtgttttgtaacattcactctcagttgggaagatttgygggaaacaggaaattttctctttttttgatacagtcttgctctgtcacccaggctgaagtgcagtggcacagtcagggcccattgcaggtaaagaataccttacttaagcagctgttcttcagctatgatgccaggatttaacttctttgtcacatagcatttatgtattccactaaagttttctgaaagctactgcttgttgaaaatacttacatttaatagtcttgttaacttttaaaaaataagaacagatatttctactgggcctgctatgccacaataatataatacagaagtaattgtaaatgtgatatagcatatttgtgtctgttacaggttggccttgccatcaaaccaggaacctcagttgagtatttggcaccatgggctaatcagatagatatggccttggttatgacagtggaaccggggtttggagggcagaaattcatggaagatatgatgccaaaggtaaaagaagtatttgattttggggtgaggcttttacagtgtgttcattcagtaagcatttattgaaaggcttgtatatttaggcataacctgttctgaaggtgaggagatggggatgcttacagatcattctaatacagtataataaatgctgtaatagatttctgatttggaaatcagagaagtattacatctttatcttgaaattttctctttctttgagacaaagtcttgctctgtcacctgggctggaatgcagtaattcaattagggttcattgcagccttgacctcctggactcaagagatcctcctgcctcggccccctgagtagctaggactacaggtgcataccaccatgcccggctaattcttacacattttagtagagaggaggtctcactacgtacccaggctggtcttgaactcctgggcttaagctgtcctcscaccttggtctgccaaagtgttgggattacaggtggcagccaaccacgcctggaagtcttgaaatttccttttgaaactattatctctaacttttagatctcttggaagttgtcattgactattgaggatttgtctgtcttgtttacatgacagtctctgcaaagacaatacagattgctgtttgccaaatagaacaaagcttgctattaaaaaccaagtgttccccagtaatatgttgtattggtatagttattgtgtgagacaattggagttttaattgctaatatttgctgttggatttttttgtttgattgtcccccacccccacccccaccaacatacccactttaggagttwcttatttcctcatgtatatatctaggttcactggttgaggacccagttcccatctttggatatagaggtcgatggtggagtaggtcctgacactgtccataaatgtgcagargtgagattgctcttcaactatgactagaccaatttcccgtcaaatatgtctccaggacattgtctcatgggccagcgattccctctgtggttcctaagttgactttctttcttggaaaagtattttttgttcacatgtacaactaggaaaataaacagccataagtggatatkctttttttttttttttttttttttctttttctgagacagtctctctttgtggcccagattggagtgcagtggcgtgatctctgctcactgcaatctctgctgccgggttcaagcgattctcctgcctyagcctcctgagtagctgggattacaggtacctgccaccatgcttggctaatttttttatttttagtagagacagggtttcactatgttggctaggctggtctcaaactcctgacctcaagtgacctgcctgcctcggcctcccaaagtgttgggattacagatgtgagccatggcgtctggcccgtaagtggatattctaaaatcacataaattgttaaaattgtaaatcctggttttctcaggaaggctgaagaaagttcttttttataaaagaatatgttgaatttcagccctttggaagatcattaagtttcacggccttggaagtgagaaatttttccaaaatacggaattaaaaggtactaccaaggggggaaaatagataaatctaattgacctaattattacattattctttagaacctacatattatttagttgttccttgtaagaacttgctagaaccatttttgatgaaaatctaggcctgatacctctttggctatctgtatagaagtaaaaacttttttttacttttttttttttttcagatagctagtctagcatagtcaggctcctgaggatgccagcccttctggtagcactgcaagtgattaaagcttacatgactgcttttcttccacagtgtgatgtatctacttccaggttcttgtataactgccacacgtttctgcttgatatatacctatcaaaagcttgacagtagtaaatacttatgcaggaggggctggccagatgatgagtgagctcatatccttttgatcgcttgtggaattgctttgtactaaactgtgctttgccagtatactattcctgcttttatgccagaggtagcaaattttttgtgtgaaaaatcagaccttggcgatgaccttaaacagcaggatatgaagaactcccacaagcttagcgttccaataatggaacactaggcataaatgggttaactgaagagaatatttgcagtgttaaccctataaaactcacctttataatttctgtgaggaatattgttagaaatgttgtcatacatgaagtgacactatctgtctggaaaaattttcctcagcctgtggttctcccacttctccctctttgttctagcaatgaatcacaaaacagattgggtttccatccttgaatcagatcctaggaagatcagagttaaatttggacccaattttttagcttttctttttcaatttctttgcttccatatttaaatgtatcttaaaaacttttttaaagccacttcaaaaccattctgaaatgcaatgaagtataaagagacattctattttttgacacaaaaacgagaactcacttaattttgccgtagtttatggataattttacatttttagcaataattgtcctttcacactcacaaattcatataaatataattcaaagaataaaagtgtttttttagtaactgtagaggcattggtgcatattgggaaaaaccttagtggacttgaggagtaaaggcttttaaaccttatctaaaggtcgcaaagataccatgtagattattaagagttggtttaccagaaaggtcaatgatttcttagacacatttaaaaatagtctgacatcctcatctgtgaacattttaaatttttcttattgaactagattgcttaagtctgcttaatctcaaagtggctctcatatgattgaaatgttgacagatgcaagggtagacactctagtccaggaattctgttttaggtttttctacattttcctttgaggcataacctaactgtttacttcttccaggcaggagctaacatgattgtgtctggcagtgctattatgaggagtgaagaccccagatctgtgatcaatctattaagaaatgtttgctcagaagctgctcagaaacgttctcttgatcggtgaaaccataaggagcccagtgttcctgttcatgaaatctcccttttactggaaaacaggaatattgactaccaaatcacaatgcaattgaagccgtactgcttttttgagcagttattcattccagtgattaaaactgattgtgcagaatattctaagaggtcagaaattggtgtgtataactacatttttagtgatgcaatttattgattagtgagtaagatactgtttttattgagagatttgatttttataaagtaaaaatacggctgcattagggttacaaacagaaaagtgtcttaatgtctaaggagggcatattagctacactacaaaaacaaattttgtctgtacttctgaaaagaattttgttgtttctcagctgttttccaaaagcaaaggaagtctttatggtttttttctatttcatgttattgtgatttgtttataagtttgggtggggtgcataccatattcttggttcttaaaatctatcacttttcaccttayacttgatgtgtgaaaactataaaaacaatgtgtgaaacccaggggttctaaaatacaagcatagattttatcagggtgttttgtcaaagcaggttattcagtgattcctccccaccattcttaagaacgttaaataatgctgttgtgttagctctgagtagaaaggaaaaagtaaaacctctgtttggaggtaatattgggttgaattctgactgcccctttctagctggacctttaacaaatcacccaatcttttttgtgtttctctaaagtcatttatacattaaatgtaattatagcaactgtggggttctgttgagaattaagagctaacactatatatgtaaagtttccagtactagtcccagaatttagaatatgctcaacacaaagtaaacagcattatataagtttatatttttgtgagttataaagtactttgatatattctcattaaatctgtaaatcacctctataagtaagtggtaataataaagcagatatttttgtccccatttaaaaaatgaagaaattaatgcttaatagggtggtaccctggaaaggatctgggaagtggtagaatttctggtctgtacttttacaaatggagcccttgggaggtgggttaggtaaaagaagctttttacttaacgttgtcttatttccagtctaattttacgctgtagcagaaccagatggctgagaaaattctggaactatggatcttgaccccaaggatatattattttattccaagaaagatcaggtaggcgaaaagatgacaggatacagagtcaatccataaactaaatatttataactgttctgaattatacagagtctaaaaatatgtgtcagctacttcattcctgtaaatactcttgctgtgttataaatatggcaagaaataaacatgaccaatatcaatagacttcttgaggctactataagttttgagaaataaggttcaaaaaataagaatgctaacacttaagcacagactagagcttgcttgggtttcttcctgcattacaaggtaaaaatttgttaatgtttgtttttattcagcttgggaaagctttgtgccatgaatacgtcgcatttaataacaagcaacacacggcatatagaaataactttaattaaaaaacttacatagaagattataatatcagacgtgacaaagatttgagtttatttgcctggacaacttgggtttgtctggcttttgttttctttttctttaaaaataaatgtacagtaaaactacaagcaaaagtttgtcagtattgaattgaattttttaccccttaaaaggactagtataatttccaatctctaacaaaaacttagtgtcaaatctcacagataaggccaaatggccaatattttcagttatgtgggtagtacaacttgagtaaccttttttacatgacaaaaagtgagttatataaattgtcctcaactttcacataggaaaaaaatggtttaatagcttcaaaaggaattttctttcatgtatactcttcagtatccaatattgaagctttgttctttgaaaaattttaatttccaatctaggatgcaagcaagaatatatgtttatttgaatagagtaagctatggcaaagaatgaccaaattagctagaaatagaaatcagccagaattaactaatttcttgctaatctagaaatacaatcatcttttttttttttttcaaattttatactgatagggctttactgtttgtggctcattttaaaactggtgtcttctcttcatgagacacattaattggtaaaactcaaattgagttttcaaagatgtgatagtattaaagtgcaccaatatttgactcaaatttgcttgctttattttgttaggagtaaacagaaagtagcctgtgtttagtcccaaagatagcagtgattttgaataaaggagttttgtgttgcctggayatatgaatttctgtaaataacttctgttggttaaacatgttaaaacaacaacaacaacaacaaaaaacttctgtctctatattcaggacgttcagatgtcttttattagtggaaacctgtgttttatctattctgcagcttacatttcatagggtagttcatacatgcatttccaaggggagtgggtcattgccagtgttttaaaaactacataggggtgtgtgtgtgtgtgtatgtttattttatacacacatatttgtatattctaatatattactaaggcaattttaatgaattaccatgtatataaaaaaatagctgtcacttggcacacaggtttgtatgtatgtgtatatatatatgtatgtatgtatggtgtgggtacatagtcttaaaaattacccagtaatgtgatttgacatcaagttgcagcaattaatatcttggtgtttgtaagtaagttgcatgataaacacaaatgactaccacttgtctgtagatgaaaatctggttacccttatggttccagaaggaaaaacagacttatcttgcctgtttcataaacagcataaaagattaatacatgcagaacatgctcttattctggaggggatgggggatccagaacagggctttatttcctcccatctttcctacatttacatagttttcttaacctgttccctgtcacctattttttttaacattagtaagtcctagaccaaaggttttgtattcttccattccatctgactgcttttttggatggtggccattctctggtacactggtaccgaagatttcaccatggaaagctgtgcttgacctttcaacctgatcctttttttcatcttgacataataaggctgccatgtcttcacccttcagtggaaaagcccgtcgttcccaccacaaagactgaaaggggaaaaattttcagttaagtttcaactaacttgttttgtttaaattcatctaacaagtaatctgtacatgtctatattgtaataattgttctgttctttagcacataaatgtacaatttttcatttcaacttaaatagcaactcaaaatggaatatattgagaattgttgagtgacttttgggatttatttctttactttgcctctgccaagaagaggaaatgctgccataggcagtggtcttcatttccgacctaagagtactttgggaaagtgttcttaggtttgatatacttctacagtatcttcattttcattattaaaggtacctattaactttttctttcctgagctttctgcaacttgcctattaattctataatctccattccattctagatctagttctttttcagtatctatttaggaagaaaggtgtaagaactttatggatgcagtgttagaaagcagtccctttaaagtaggaactgggtctgtggtgaggcatgtaaaaatcttaagatatgaggagaaagaaatagcagctaactttggccatgtagcaggtgctattcttcattaatcaggtttgtttcgtaatgaaactttgatagyacttccactctctaatagataaataagtacttggaagttcgtattgacttgttacacaaggtgattatagttagtagtggacacaaaatgctgcaatacagatcttctatacctaacttattgaatttgttatgtaatgatgtaataaacttaatttttttcaagtagtttctacaaacaagtagttaaaagtcaaggaatgggaagtttaatcatacatattacacttaccttggtttcttgactttgatttaaagaaggtaagccatatgcacacagatcctggttctctgaaggaagcccaggaggacttgcagcagcacattgctgactgctactgaagttattagggtattctttcaaaagcaagtcctgtccttcaacatttttactgtaagctctagcaagaaaatcaggaaaacacaattattttttattttttgaggtcttgaaaatttatgaacaacccaaggtatcactgagtcaagttaacttggtaactttaaacagttttgcccaaagatttttaaaaattcccctggtgctatttattattttcatactcagaggatgaaatagtactttatgaaatattttaccgaattataacagttgtggggggagggttattcttgttttttatttgggtttgcttttgtcttttgtctgactaattaaatgaaagatgctccttaactaaagtgactaccagacttcacacaatcttgcctttttgagttttggctattttaaaaatgatcaaatgtataataaatataaaataggaattttctcatatatataataattatgtctgatttatttccccttccctcaaagctcatttgtgtttctaaaagtattttagactttttgcattttagattaaacaggtttcttgagaaattttttatttttttaaagaaaaacatattttggaagtagtgatgttaaaatggattacctaaactccagtccccagtgtgaggtccattattaaagtagattgaaatgacctactttatatatacagagaattttcacattatttgttagttaaatccattcctgaggctgacaacataagagaggaaaatacagaaactaatttcatcattatataattagctcaaatatattttgaatacaagctcattctatgtagtattttacttctggtgcacaatagctgatgttacaacagcatgttttcctttttactggtctcacccaraattcatgcagaggttttgttcatttcacatggattctatggcttggggttttaaatttgtaacctgcctgctgtttcttctgtgccacttgctttgctcccatagtgaccacctggcttgctctctctcttcatattttttgtgccttagggagaagacttcatcagaaagatcttctatctggaattagaaataaagatttttgttttaatcagaaacattttgaaatataagatcaggctgggcacggtggctcacgcctgtaatcccaacactttggaaggccgaggtgggtggatcacgaggtcaggagttcaagaccagcctggccaagatggtgaaatcccgtctctactaaaaaatacaaaaattagctgggcatggtggcaggcgcctgtaatcacagctactcgggaggctgaggcagagaattgcttgaacgcgggaggcggaggttgcagtgagccaagatcgtgccactgcactccagcctgggtgacagggcgagactctgtctcaaaaaaagaaatataagatcaggtttcaaagagtttctcatgtagaaaacagtaggaagcaaactaaaataaatgctatctgtgtaagttgagagaacaaatgttatgagatgaactccaaattcctgtaaaaggggagtcaaaattttttaaaaattatttcattattgttatttttagacacgggtctctgtcgcccaggctgtagtgagtgcagtggtgcagtcatagctcactgcagccttgaacttctgggctcaagcaatcctcccacctcaaaaaacttaaaaatacttgtttcctattggttcatatttgaagacttcggtaggctacagatgagttcgtaatactttccatttgccatagcttagtaccagtagtcttaatgttttattcattcaggagtttttatggatygtccattgtggagtacatactattctaagaagatgttaatatcagataaaagtaaaactaataatcttagacaagtcagcattaatttaatgaatgacttatctaggttttgaacctggaatactaccttagttagggtgtttaagaatttgggtttcttggctaggatcattcagaagtaaggaagaatacattagaagaggaaagggcattagaaggtaaattttagtagttgaaaaacatgaccactggacatagaaagattgttacttgacagaaaccaagtgtcttcaacagtgtcatcttctagagaccatcaccttggaattagtttggttatacagtatttttccctataatcttatcttgatataattttatccatacctattcacaaccccttacctgcaattccaaaatccaaaaatctgcaaaaacaaatttttcataattcatttggtgacatagcctgatctgaaatgatgtgaggctatttttagtgtttatccaactcaactatgaatatttcactacagaaacattaatgtctgattacttttacgcccgagactctacaggtattacgtgatatgtttaccacattacttttttaaagtccaaaattttctaaaccgaagagcaaattggtcctaagattctgaaaatggcatttaaacttaaataatgagtgagactaatctcatgcagaaaaatataattaatactgacaatgaatgtggatattcacgtaaattcagtatctcaaaaactcataaacaaatgctatattttcttttggcttttttttctttttgaaacggagtcttgctctgttgcccaggctggagtgcagtggtgcgatctcggctcattgcaagctccgcctcccgggttcacgctattctcctgcctcagcctcccaagtagctgggactacaggtgcccaccaccacgcccgactaatttttttgtatttttagtagagacggggtttcaccgtgttagctaggatggtctccatctcctgacctcgtgatccgcccgtcttggcctcccaaagtgctgggattacaggcattagccaccgcgcccggccttggctttttaaattattgtgtatttctatattatgctggtagtcaaatttgcacaaaacatttttcgaatattcttttaaaagaacttccttttcataagtgaaaagaaaaaaatcagtgtaagttaaagggcttatatattcctttagttccctgaatgtcaaagtaagcaggtttcataatacataatgtgcaattatcccattaaatgaaaggcagcttacctcttctttgcctaaattatattcatccaaaggctgaagaacaaccatcctccagctgttgaagataaaaaccaattttaaacagcttttatttatttaaatgtggcaattttatactcagcacagctaaatgtattagtgtttccttggcacttccatggttcaaattgttgtattttaatacttaattttttaaaagaaaaacatttgtattatgagaaaaggacaaaagagaaaatgagactttatttttggccttatggtgaatagtctgttctgtatagctrcattttatacataataattatgtactgactgaagtcagtggtacgctgataaactggcctggccaaaaagtaacagagaaggaaaaaaaccctggtttgtatgtttgccaatttctttggtgtgaaaatacctaccatagccccttttgagccatcagtagtttaataactggctcacagaartcttctatatttaactatctgctcagccagctagctccagcctaccattgcaagttgaaatatatttttgctatagaacgtcatagccacaaatgttattacttatgcaacaagtatccacagattgagttctcatataactcttctagaatattatgctcttaatacctcaaagtaattatgaagtagtaaaagaaatgaaattagaatagagatgtatagcaattgactgaaattgtcacccacctgtctctgtttgcagccttttctgtctctacttcctggtgtcatttatattcttaagaagctgcattcatgatttctaaaaagtttggctaacgttactgccagtagggagcagatctgtgtatggcattcagggacctccacaaatctggacctaactttgtctctagccttccattatcaatctggacctaactttgtttttagccttccattatcaacctgcacaaaacagtatctggctaagccttacacacttgtcctgtgcctttgttgtcgtatccctatgtaaataccttctccaccttcccattccttcatggatgacttcccagaccttcccactcatcttttgaatgtgtttattgctgacttggcaatgcatcaaaatcttttttttttttttttttttttggtcacaggtattactgtcttacagtgtgaataccccatgaaaaygtagaactctttgcaacttatgtcacacctgtatcttcaagggcaaggattatttgttgctatagtttttatgtcactaaagtaccttttagtgtcatatacatagtagataacactggataataataataaaaaagactaagaatgctaaagtagtctaggaattcctaaatcttaataaaaactgagaaataaagttgtgatactatataacacttaaggcacgagtaatttttttttcaccgtttcccctccatggctatgaaggaactgggagaaggatgctcctttcattaattaaaattcttcactttgaaaatttaagtttattagggaaggaaggaagaaaaatatgaagatgtaagtatacataccttggagtaagtatttccttatattggagtttctctaatttagctggggctactaatgacatgggaatcacaatgttatctatgtcataagagctctcacttctcaatctccgtcgtgcagtattctgcaaaacaggattacagtagatttacagtactgtctagttacttgtaatgataccctcctttcatcagttrtgtaaatatggcagtacacgttacataatttttgtaaatacattgttataaagtctgactaaaaaatgttaagaaaaccaaaaaataaaacatttttctatcttttgtaaatcagaacaatctcttggtagatgtgtaatgtgtatttatgtgtgcaagcatacaagcttatttttaagaccacaaaaaataggtcttaaatgcaaaactctttatcagaaaagaccaacatacatcaccctaaatgtcaatgaaaatgatcagtaaccactttttattaggaaaggcagtgaaacatttttggtcagcccttcagtatactcttcatttatgcattcctggttcctgagtttcggaattcatttctaaaccctcccaccttttgacctctctattccctggccagataacaaaaaaacaaacaaacaaacaaaaaacaggacaagaacaagaaagtcctgaattctcattagtaagactttatttagcttaatatgttaaggaatagagatgatcatgataatgtttaaatttttaacacataaaaagaagctataaccaaatattaatgaacttttagcttcatagttaaaaataagttgtatgaatcaaatatattgttttctaacaagatagttataaatgtctgttaatatgtgctagtaaggctgttatagattagcaaaatataaattattttcaaaatcaggtgtttttatttttaaagctattttagagttcaacatatggaaaaacctactcgtgatgaattctggattcttgataaaacgttgacattggaaacagcagtaaaattgctatgggatcctgattctgtgtgttgaaaatcagattcttcaagtttagttctttctcctgccatggaaagaaccattgaatgttacacattaaacaagtctaatatcattagaattactttcctaattagatgacaggtgattgattccttgttttgtgtgtgtgtgtttaaattcgtgtattagaaaacaaaaaaggaaatgaaaaaagaggagccttacttgcagtcatgccacaagttatttccattttctggggctttggcagtttttatcgaatatatttcttattgttccctgaataatccctcatctcatccctttattcttgtttcctgtgactcctattcatagttgaaccaccagaactatcttaattttcttatctaatctcatttttcatatctgactttttatcctaatttatgtgaggtatctgtccttggtcttctgaacactcttaattttttgaaaaaattctgctattataagtacatgtttccgaaagtacttgttctctggtactctttttttaaaacagcatcctgttcttgtttcatagatgaaatttctcatatctctcaggatattgattagaagtttacttctgttagtattttctgtatatcttccaagttctttttttttttttttcctgttttggttcccagttastgtgtgtgtgtgtgtgtgtagtaaatatatatatgtatgcgtttacttactgcccttattttagtacaagtgttttaaaatgagaatatttcctgcataatataaaatctaatacccagtccatatttaaatatctccatttgttaaaaaaaagtcctttatagctagtttcttcagataaggatctatatataaaaattggccattgtctcctaggtttcttatagtctagaataaatcatttttcattacattgacttttgacaggctggaccagatgtcctacccttttggaattgtctagttatttatttgtagtatgacatttctttattttattcctgtatgtacatcaaacttgaagttagatctaaagtgtcagtcaatttaagtgaaacattttatatcttaggtaatgtatacttcatgttgcatcttattagatgtttttaaagctttatatatatatataagttgaatcttgttgactttctcaaaatcctgaggaatctgcagtgcatcaacatctccacagtaggtaccataaatggttaacagtttctgtaaggcaactttgcactagcctattttgagcatagaacacaactttgaagattaaatcccatccagggactgattggtagaagacaactagtcagggaacataggagggaaatacttaattgccataaagtgggtagataccagtccacaaataattctaaattaactacgaatatgctgtttcatgtttgtagactcatagatgttttgtgttattagtggctgttctggattataaactcccatgagaggttattttaaaatcagaattttwaatttttaatatttatcactactgcttatatcctcactttaacctacctaatgctgtttcactcaaatgtcttttctttcttccctgtaacagttgtgcagaagattctgaccttatttgaggcttacatataggtgaatatccatttctccattgattcagagtactatgtactaaaacaaatgaaaaggaaatattaagttttagttccttaacacagacagtgaacatgtcaatctgtttttatttgtaactgcagaattttaagataccagttcaaaattacagataaacataaataccaagacacacaactccaactaaaaacatccccaggaatttccagtttcttatattttctccatttttttgagggggatgaaaagggaagatgatctgttctcaaagtcttccaaattacagaaacttgatagagtgaggattggctcagatatataaatcttggcgatcagaatctttaagttcttgcttacctttaaatctggaaataagttgggaccaagtaagattcaacatggtcagactagactgtgcgagcaagaaccagaatcatttaatatctctgatgccttagttgcatcatctgtaaaatagggataatagcagcgaccttggataatgattacatgagtttattcctgtagtagtaagtaaaagtgtctgatgtgataagtgtgcagtaaatgttagcgttatcatgattgtatatctgaacccccttatttccagccttggtctaacaaccaaattggcttctttttttgaaaggtttggagatgtggaaaggagtggaaaaagaaatatgtaagctgaagtgccaaactcacactgaaataaagggcatggcctaccagctgacaaggagtgtctggtttcaagatggcaaatgaccctaaacatgatagacaaataygttttacataggtacatgcacagataggcacatataaatccacatttgcaagcaaaaagtggaacctgtaaagcagaatttctgaggaatctctaaaagactaatactatatggaatttgaagaggaaacccagagcagaagcacatagtgaagtactgccacaaagatgtgtgacgccactaaaggtgctctagacccacaagaaaggaaaactgggagcaggacaactatctggatattgactgcacatgccaatatctcagtcagactaacagaatcagagctttaggcagagaaatgaatggttggagagagaaggcaatgcccaggtgccctgctttgaaatgtcccgcccatccccaaattagtctgaaaatttcaaatgttgtaaaaattcccttcccatcaaaagtgtcccataaacagcagtggtagaagagttttaactgagtatcacagcttcaatgatgagtatagaaaactccaaaaatctgaataccaacacaatcaaaaaagaggtacaaaccacaagtggaagaaccatctcaagaaataatgaagcattcatggaatacagattagcaactctttaaaacagtattgccaagagaaacaggtaagaggccctctggagaaatgtcagaaatagaaaatgtaattgttcaaatgttaaaatcatcactaggctaagaaacagaatggacacagctgaaaatcaaaatcagggtctggaagaggaattccataacttgatggaacagagtgatagaaaatatggagggaaaaagaccgcaatggggtaacaagatgagactagaaagagtgaaaaggagggaatagttgaagaagtgatagctgaagtgttttccagaatcaatattaaaccctaagatttcaacgatgcacttgcatgtcaaacagcaaatgaaaaatcataaatgcatcacagatgataataccctgaaagttattaatacaagaaaacagcatggcaggagtaatctaaacgtactaaaatggtaactagaattgtgagaggtggattttaaaatgtatgtgtgtgttaaaacgtgtgtaggtgttaaaagtgtccattcttttaataacattttgctgtagcatttaagcaaatcatagacaattaacgtttctcttattttctacaagcaattctccactcttctgaaaacatcaaattttgtgaaggaatcaactttcacaaaagttgattttttttttgagacggagtctcgctctgtctcccaggctggagtgcagtggcgcgatctcggctcactgcaaactccgcctcccgggttcacgccattctcctgcctcagcctcccgagtagctgggactacaggtggctgccaccacgcccggctattttttttttttttttgtatttttagtagagacggggtttcaccgtgttatccaggatggtctcgatctcctcacctcgtgatccgcccgcctcagcctcccaaagtgctgggattacaggcgtgagccaccgcgcccggccaaaagttgatttttaaattaaattttattcaaatgtttttttcacatttattttccttctaattcgttactgtcttgtaaggttttcatggacccttgaaaccgtaggaaatgtatgacaattctacacatcctcttcacctgttctaytgataaacctcccagcctttcagttcttgctctcccaatcctctcctagagttcatcctaagatcacactttcatagcatttctcatatatcctgtctttacttccttcccttttattcatccaacaacaactttacagagaaccaattacatggcaagcattattctaaaccctaggtaagcaaaactaggatttgtagcagcccttgtcgtttacaggtgttaaggaatgcaattgtaatgtgataggaaaatattcatttcagttgtgaaactacatgatgttactgagaatgtataagagtgctagtaagagctctacgaaaggcttccccagatgaagtgacagactccaaatatgaacagaaatagctgatagctaggggaaggaggagaatagcatgtacaatggcccaagggaacaggacaaatttgggaactgaacagctatgtactgtagagtaaggaagcatggtgagaaagaatcatgagggaggagccagcctatgtagatagggctttaaggtgttaagaatattccttctcgaatgatttaaagggatggggtggggagcaggtgtgacattagatttgcattttgaggaggtcactgcctacagtgattaaagggaaaaatggattaaaagtctatttcagcagtatagataagagatcatgttggactgtgagagtagtcgaaggcacaaaaggaactcaaacacataagatcatattgacaacttggcaattggtttagaccaagttggaggaagtgtgggtgacaaagactgagctctatgtttctggcttgcttgtgtgggttatggtgctattgttcctcctcttccatctatctgagacctaatttcagaattacagaaaacttgaaatagaacaaaaaatttctgtatacccttttctgaaatcccccaaatgttaacatcgtatcacatttgctttacctccttctttcagaccacaaatgaaatttagttgctgacatgatgcccctttagccctaaatacatcaatgtgtatttctcaaaacaaaggacattctcttatgtagccatgcagttcagtaccattagctaatctatagaccttattcagatttcaccaatatctctataatgttatttacagataatttcaactattcattgcagatggcattgcagttgtcagatctcattaaggtcttatatctgaaacagttccactgtcttccataactttcataactttgaacattttggtaagtataaacccttaaattggttttgtctggtattcctcatgattaaactagtcatccattcacttttcaacccactacagtttggcttttctctgcttgttgcctgaaatcagcaatgccattgtaaactgccaaatctaatggaccatacaggataaatccaagcaaagatctgtctactgccttcacacaacttaccctacaggaatgccaagttatttgtagatatttgttgttgtttgtttgttttgagatgaagtctcactctgttacccaggctggagtgcagtggcgccatttcggctcactacacgtctgcctcctgggttcaagtgattcttgtgcctcagcctcccgagtagctgggaccacaggtgtgcaccaccaccctcagctagcctttgtatttttagtacagacggggtttcaccatgttgccaaggctggtcttaaactcctgacctcaggtgatccacctgcctcagcctcccaaagtggtaggattacaggcgtgagccactgtgcctggccttatttatagatatttgaatatatcatactgtgtcatgtctccatgacaagacatatgtttgtttttgttatttaaagacttgttactcagtatgggccaacagcatctgaatcacctgggaccttgttagaaatgcagaatttcaggtcccattccagacttactaaatcagactctgcattctaacaatatccccgaagtaacttgcttacattttaaagtttgagaagcactaatctggaacgctccacccttctttctctgtaaattccaattaagtagtcgaagctgcacttaggcatcaccaactttctggagttcctctccttgcccatttctcatctccctgaacctctctttttctgccttctaagtagttacatactccttatttatatcttctttatataatttctttttaagatagagtctcactctgtcacccaagctggagtgcagtgatgcgatcattgctcattgcagcctcaagctcctgggctcaagcaatcctcctgcttcagcctcctaagtccctgggactacaggcatgcaccaccatgcctgcctaatttttatattttttgtagagacagggttttaccatgttgcccaggctggtcttgaactcctgggctcaagcgatccccctacctcagcctcccaaagtgctgggattacaagcatgagccaccacactcagccttcaaaggtatttatcatctatgtccattatactatataatagttatttgtgtcttcctccattacattataattttgacttcctgtaattcacctttgattcttcagcacttaatagtctgcctggcactaagtgctcaataaattctgaactcaaatcactaacagcaaaagaaaaattaatgaccagctatttaagacagatatataggatgaaatttctcattacattatttatgcattccccttaattgtgtgcctaacacgtttaactgccttattttatttttttacaaacagggtctcactttgtcacccaccctgaggtgcagtggtgtaactatggctcactgcagcctcaacctcccaggctcggatgatcctcctgcctcagcctcccaagtagctaggacaacaggtgcacgccaccatgcccagctaatttttgtattttttgtagagatggggtttcactatatttcccaggctggtcttgaactctgggctcaagcgatcctcctgcctcagcctccctaagtgctgggattacaggtgtgggccaccgcacctgacctgccttattttttttaaatcaaatagtagaacaacattaaaagaaatataattatctaatctctaatagcatatattttcatatttgcatactctttcagtcaataacgttttatatttcatatgtatttcaagtatgaaatcataattttaattaaatgcatacttatatttttatcacatactctattactttttcagatggttatataacattccgtgattagaaacaatgttctttagctatttcctagctgttggccatgatacttatcatcataatgataatgctattagagacattcttaaaataatcatcttcatggatgcatttttttcccttttgaaaacaatctagtctcgggacaaattccaacaagtgaaatcgcatcattaaaaggtaactgcacataatacttatatttttctgtatttctttaggcttttccccctaagcatagataactgttcttcatccttggtgccttcatcttttttctctttaatttttactgtggaaaattttcaaataaacacaaaggagactagaataatgaactcccgtatacctatccttccgtctcagcagtgaacaacttataaccaatcttgtttcatctctcccaccaacatttttgctagagtatttaaaagcaaatcccagacatgtcttttcatctacatatatgttagtgtgaatctctaacaaactgaaaaagtacgtctgggtttatgtaaccacaatgcattattacaagtagcaaaattaacaataattcattaatatctaacagctagtccatgttcaaatttctctgtttcaaaaattatatgtgtgtctataaacagcaggcttattcaaatcaatctcaacaaggtccatacattgcatttgattgatataacaataaatatttctacacgactataattttaccagatatagaagtaaaatatttttatccttttatatcacaacattctttgataagtaggtttccatccttatatgaacttttaagatattttttaaggctgtatattccactgtaatgtatttaaccatatccctattatgcttttcaagttgttgctaatttttcattatcacaaaaacatgttaagatgaatacagttgcgaaaaaagctttcatatttaggattagactagattcttggaaatggaatagttgggtcagaatgcagggttaacagtccagtaaacatttattgggaataggtacaaaataaacaagggagtttttaagccacactgaacttataaaaaaatacgtagtttaaacgccttgtaatgcattttgcagagctcctcaaaaggcttgtatcaattcttaatatccaagatatttgagggtgctatttttactatagttgtgccaaaat

SEQ ID NO: 94597 - DNA, 97535 bp, Homo sapiens
tgcttgagcctgggaggcggaggttgcagtgagccaagatcacaccactgcaatccagcctggatgacagagggagactccatctaaaaaaaaaaaaaaaaaaaaggtagatagctaacatcatttttaatgtttgcatagtattttactgcataaaggtatcctactctatttaatcgagctcatattgttgaatgtttaggttgtttcaacattttctacattgcaaagacttgtttcattatttccttagaataattataggagtggaattttaggatcaaagagaaaaaatctttaatatgttgatttatattgtcaaactgctacttatattcccaacaggagttaaagtgccagcttcctaaatttttgccaatacagggtcggtatgatttgtttctttaatgcctgccggtctccctggagaaaatatccataacttgtattgttgttttaatttacattctcttctcttcttgtttttttttgtttgtatttaattggtgctcacttcctttgctcatttttttagtactgaagtatgtatttgtaaaaagaaaaggtaatatagcaagtattcctaacattaaaacttcaaatatttattgatggtctgccctctgccaggcactgtttgaggttcttggcatgtgttagtgaacaaaacacaaaaatctctgcctttacagattcatgttttagcagagagagacgtatatatctaataaccataactaatagtatagtcagggataggcttttctgggaagacttcaaagagccaagggatctagctctatgggaatctatgggcaagaacattcaagcagaaggcctaaggtgagccactgcctggcacacttaagaacttacatggagcctgtggttcttggatggaaagattcctaaattaatccataaattatgtttgattccaaataaatgataaaagaatgttttccagaacttgaaaaaatcttaaagttcatctagaaaaatcaacatgagataaaagtcatggaagttttgaaaaagaaggcattgaaggtacactaacttactaacttttccaactattaaaatgtattatagtactatagtaattgaaaaagcttcgtacaggcaatggaacacacagttcaggaataaacctaaatatatagatatatatatggaaatttaataaagaatgtatttcaaatccatgagtaaaaagaagcttatttaataaataatgtattaactgaattgtttaaaaacaaacataaagctggttcattcactcactccaaaaccaaaacaaatttcagaaagatctgagatttaaatgcaaaagaaaaataaaaacccattcaagtactctgagaaacatacttaaaaaaaaaaatcttgggattaagaaagaccttttaaaacataacctaaaccccataatctataaaggaaaagaataataaattagactaaagtttttaaaaagccctttatccaggccgggtgcggtggctcacacctgtaatcctagcactttgggaggccaagacaggtgattcacctgaggtcaggagttcgagaccagcctggccaaccccatctccactaaaaatacaaaaattagctgggcgtggtggcaggtgcctgtaatcccagctactcaggaggctgaggcaggagaatcacttgaacccaggaggtagaggttgcagtgagccaagatgggccattgcactccagcctgggctacgagtgaaactccatctcaaaaggaaaaaaaaaaaagccctttatgaagaaaaagaacaccttaaagcgaaatcaactgtcaagtattcctattgtgtttctgctcagccatctgccacccagcattcgtctccccacccctgaaatagagtgccacactcaactgttgtttcccaccttcatcttttctttcttaaaatacatccacaaaggtataccagataaaatagaacactaccaatacttttgaaaccctttgggtagtgtgttggttaattttatgtaccaacttgactgggctaatgggtacccaggtagctggttaaacattatgtctgggtgtgtgagggcattcctggaagagattagcatttgtttttatttttttgagatggagtcttgctctgttgcccaggctggagtgcagtggtgcaaccttggctcactgcaacctccgcctcctgggttcaagcaattcctctacctcagcctcccaagctgggactacaggcgtgcaccaccatgcccagctaatttttgtatttttagtagagacggggttttgctatgttagccaggttggtctcaaacttctgacctcaagtgatctgcctgcctcagtctcccaaagtgctaggattacaggcgtgagccaccacacccagccaagattagcatttgaatggatagactgagtaaagcaaatggccctccccaatgtgggtaggtattatccaatccatggtgggcctgaagagaataaaaagggggaggaaggctgcattcactctctgtctgaatacttgagctgggccatagatctttccctgctctcagttctccctgctttcaggccttgagacagcatctgtaccaccacctcttcagctctcagggcttcaaactacttcactcattttcatgggtctccagcttgcagatggtagattgtgggacttctcagtttccataatgatgtgagacaatactttataataaatatctgtctacttgtttcctatttatttatctggaggactctgagtaatacaggtattccaacactccaggctgcagccctgccaactcactcagaactcactggtctcatattttgtgtttgtcatcctctgctttttactacaggcttaccattctatttatgtatgcctaacaatatactctttaggttagcctggtttttagtgtttatattaatggcatcaaggatacatattcttctgtgatttacatttttccctcaaaattacaacgtaagatttatccaagttgatacatgcaggtgtagttcatttgtttacataactgtatggtgtttcactgtatacatttatcataactgtctacccattctagtactgacaaacattgggttgttcctagatttctgttataatgaacaatgtaaccatgaaaattcttatttgagtcttctggtgcacatgggtaagagtttctctgggggaatattcctagcagtgcaattgctgggtagtaggatatggacatgccccatttttctaggtaaggccatattttccaaagaggttatatcaatttatactcccaaattcttgccaagatctgatttttttcagactttaagacttctagcagtctcctaggtataaacatgtatgtccttataatttttatttgcatctccttaatttctgctgagctgagagtttttccatgccttttgtccagctcgtctttccttcctaggaaatgctgccacctcattcctgctttcagtctggccccaaagttagatgaaagaagcatgtacctacattttgtgatatacgatctcatcattttccatgtacctttcctttcagttagctaatgccatttgtgatgagccctagtggcctagtttcctcttttccattagaatcttctaacagtttagcttctcacagagaagggacagagtacctgtaacatgtgcaatgataaaaagtaggataggtcagttgggggatgtgagagatgggaacaaaatgccccttggtggtctgagactagcagaaaactaactaggaggattaaaaaaaatgacagttgccccatttccaggacctctgacatgataagaactatactagttatttatgagtattatttcaaattcttacaataattcttttttagtttttaagacaaggtctcactttgtcacccaggctggagtgctgtggcrcgatcacagctcaccacagcctcaacctcccgggctcaagtgatccgcgtagatgggatcataggtgtgttgccgccatgcctggctaatttttctttttgtttagagatggggtccaactctgttgcccacgctggttttgaaatcctgggctcaagtaatcctcccacctcggcctcccaaagtgctggaattacagatatgggacacaataattctttaaggtgtatattattatccctattttatggatgaggaaactgaggttcagaggccacagaacactttggagtgcccaaagcagagcaggtcagcaggaagtcctttggttatttattattactattttgttgttgttgttgttattgcttttaagacagagtcttgctctgtcacccaggctggagtgcagtggcgtgatcttggctcactgcaacctctgcctcctgggttaaagtgattctcagtcctcagcctccccagtagctgggattacaagtgcccaccaccacacccagctaatttttgtaattttagtagagatggggttttatcatgttggccaggctggtttccaactcttgacctcaagtgatctgcccacttcagcctcccaaagtgttggtattacaagtgtgagccatcatgcctggcactagtcctttgcttattaattgagcagaaagcaccaattttaggtggaaagctgtattttgcattggggatgtttgccatttatggggtgttgccaatctgttatgttggtcactgggaagggactgccttcccatggaggggagctaatactgtatagtgaaaaactgcttgattaatagttagggtggcttacatctggctcagcttttctcccctcatgtgaaggactttggaagaagccctcactcactgtacagtagaaaggattagggcaaggctccccctggaactgccagtttgtgccttagtttcattacctgtaaaacagggataatggtacctatcttgatgtattagtttcccttggctgctgaaacaaattaccacgaacttgctgacttaaaccataaatttatgctctcacagttctggaggccagaaacccaaaatcagtttcactgggcccaaatcagcatgcattatagggctggcccatgggctgggcgtgaatctgtccttgtctctgtttatttcagggatacatgtgcaggatgtgaaggtttgttacataggtaaatgtatgccatggtggtttgctgcccagatcatcccatcacctaagtattaagcccagcatctattagctattcttgatgctccccgctcctccaccccctcacccccagtgtgtgcttgtctctttgtttctggtggctgctggcatccttgggttgtggctgccatactccaatctctgccaccgtggctaaatcgtctctctcaacctcccttttatgatttgatgaggatactgtgattccatttagtgttcgtctttcgaatccaggataatcttcatctcaaaatccttaacttaacctgcaaagacgctgtttccatataaagttacatttagaggttgcagggattagggtctgatattattgggggccgttattcagcctattacactcagggttgttttaaggaggaaatttaatgctggcagagggctgagcacagcccactgacagcagagagcactgagcaaatagacaaaaaaagaggtctcttacaatgcctcccttatagggctgccgtaaagttcaaacaaagcacaggtatatcacttatacgagtagaggagagattaaagaatgaagtaaaaactgaggtctgttaacagcccctctcccgccgccaggatttgcacacctttctctgcaggaagccttgaaccctctccactcgcatttccaccacctccaggcaagatctcccacgtggaggccccacccsctccctgacgcgccccactctcgccccgcccacctggtgggcgtccccggccgttagcgccctggaagcatccgggacttcagggtcagtacattacaatgcctgacaaatcctagccagttctatcaaattatatctttcttacaggcttttaagctattagtctcayaaagatacatttaatcagcgaggtaatggcatgatgagtgtttttaggttaaaaagagaacaggaactgttgscagcagaatggcgatattcaagacaacacgcacaagaagaggcgggtcctacgcgcttcgctagggaagcccgggtcagctcgctgcgcaggcgcagtgagttcgacmcaccatgccgactgtcagcgtgaagcgtgatctgctcttccaagccctgggccgcacctacagtgagtggcggccctatacgttgggccctacgcctcttctcggaggcagggcctccctccaaaagggcaatgtggcgacattcatgccttcctgaaggttttggctccgggaggccggggtttacgcgggaaggccgatgatggtggcggtccggctgggctgtggtagcctcggaaccggcatcgcagcggtgccactgcttgtgcccggcttgccgtgtcattcattcagcgatctgccatcgagtgcctacagcgtgcctggcaccgacatccaagccaggggatagaacaggaaggaaacccggggttgcatcccgagcgtagccagttaattgcaatagcagcgctgtgggaactcagtttataagggggtaggaggagagatttgtgcagcggggtggagaacggcattccacctgtcttcgttttattaatgtttcctgarcgcctgttatgtgtcaggcactgttctaagagcttaggactagagctgtgcacacgacacgtcaggtccackttctgtctgatggaggcagacaattaaccagcacgttaataaaatgatttcggataatgttaaatgccatcaaggaaagaaaaggtgttgtgccaagaacaactttagatagggtggtaacatttgatctgagacctgaatggggagtattaaatgggtgtagacttcattctacatttcatcttttaatcagttctaaaaacacaaccattgaaaaaaaggagggagatattaaatgcagttatcagttacctcacagccgtagcagctgccccaccctatttttttttttatttttattttttgagacggagtctgcactcccaggctggagtgcagtggcgcgatctcggctgacagcaacctccgtctccctgttcaagcaattttctgcctcagcctcccgagtagctgggattacaggcgtccgccatcgcgcccgagtaatttttttgtatttttagagagaccaggtttcaccatcttggccaggctggtcttaaactcctgacctcgtgatccacctgccgcggcctcccaaaatgctgggattacaggcgtgagccaccgcgcccggcccccaccccataatttttagcttgtataaaggctggaccaactggttcgtgagagctgttttttttgtttttagggctcagtgtgttaacaaaggcctaattggtttaatgacagccaccgcttcccagaataagattactgttacagtgaaaataaagctggcttttaagaatctttcctaagtgtgtacttttagatagtacctattctctatgtgatattcttcgtaagttctgccataagtccctgaaagtaaaggaaatacaagggtattgtattactcttaccctttgtacttggctctaatcgcctaatcgctttattttataatgagcttatttatatttcttacctgcccttctaaaccatattctcactaatgggatgtggtacaggttaataattccttatccaaaatgcttgagaccagaagcgtcttggattttggattttgggatatttgcatatacataatgagatattttgggggtgggaccaagtctaaacatgaaattgatttatatttcacatataccttatatgcatagcctgaagttaattttatggaatactttaaataatttttttttgcatgaaacaaggttttgactgtgtttttgacaagtcacatggagtcaggtgtggaattttccacttgtgacatcatgtctgcactttaaggttttgggttttggagcatgtcagatttcagatttttggattgggaatgctcagtctgtatacctgaattgcctaagatggtaggtggcaaatatttgttcaaaacatctataatcagttcccatcccagtctccatttctagggaggtaagaaataatccagatttttaaaaatggtgagatttataacctatttactatcatctgatgttttaacatattctgtctgcttccctttttttttcatattgtcagtgatcaattaagattgattttttcacaaatatgtgtttgttagctactgaatcttttaaggtccaggtacatggctgatgcttgtaatcacagcactttgggaggacgaggtgggcagattgcttgagctcaggagttggagaccagactgggcaacacagcaaaaccctgtctctacaaaaagtagctgggtgtggtggtgtatacgtgtagtcccagctacttgggaggctgtggccggaggatcacttaaaccaaggcggtcaaggctgtagtgagcggtgatcaagccactgcactccagccctggccacaaagtgagaccctgtctcagaaaaaaaaaaaaaaaattcagtcagaaggattgatgttatttattgagatgtactttcaagaggtcagaaatgattctcctcattagtttacctttattgtgttcttgcttgaaactgttaactgggttgaggtcagaattgaaaaagcatgttcagcaaacatgtggtttccaagtagtatggatacatcttgtttcttacctttttttttttyccccagtcttcctctttttttcttgttttcagataatgtctcattcacacttttaaaatccacattctctctctttagtccctccaagggttgctttctatttgaaattccattgtttctaccagtccccaccttcctttttaccacctctttgcttagcaaggatatttctctttcaagctgtttgccattttggttattttgctcttctgactcctttggagcagttttgtctccttagtctaccttttcaacggactttctgtgcagatggtttcctcttgccactccttttcttgttaactgatttattatcactgctcttcaattatagtcctgttctggcgtggtgtaatagctggcagtagtggcagaaccttctgtgtatatcatatacacccctaaggtgtggttacttgatgtgtcatttcgttagaggaaattastaatcacgattttattgttgatttttctttgtatagaaacccatgaaataacagctgaaaggaataaaacatatgataattaggattcagcgtattttaatagttctgtaccacttagttatctattactgcatactaaattatcccaaagtttagcatcttaaagcagctatcatttgttatatagtttctgagggtcaggaattggggactggcttagctgggtggtttttgctctggatctgttaccagattgcagtcaaggtgtttgccagatccgtagtcatctcaaggcctaactgggtctggagaaactgctttcaggttcattcaagtggttgttggcaaacctcagttccttgctgatttttggccataggctttagttcctcccaccttatcctctccataggactacttagcacatgttagcttgtttgccccaratggagaggtccgagagagtaggtaagtaagagagtgccgaggatagacgcctgttttcaataacagctcagaagtgatacactagcccttctcatattctcttgatcacagaccaatcctagcacaatgtggaagggaacagtacaagggtgtgaataccaggaggccggtattattggagcccatcttggaggctgactaccaccgtttcccctctaacctccactgattcagttcctcccatatgcaaaatatactcaccccctcccaaggccctcagaagtgtcatcccattacagcagcagctcagaatctagaatctcatcatctaaatcaggaccagatgtggatgtggctccttgggtgtagttccttcagtatagcttctttagtacactgttggcctgagagactcgagagaccatttatctgccccacatatacctaacatacagtggtgggatgggcataggataactcctgtagcccttccwcttcaaaggggcggaaatgggagacacaaaggagtcattggtccatggcaattctggaatcaagtggcaaatgttggatgttcttgattaggtctgaaggcctggaataattctccatggctgtctgccctgccctctaggctcttggtttccacccctctgagtgatccctagaaagcatgtgctttacagctggttggttttctcagtctacttactgctaatagaattttgagagttcaaagactttattttatcctatttctatccctttcaattctagctggcaatgcttctgcatatgtatttcttctaaaaacttggaaggtctttggtgcatgttactggcttccattttattagtcaaaagccacaccacctacacatctctgaaatatattgagtttctgctgataacagtgctcttaattaagccctattgtgtgattaattggatttatgaggtgcattctttataatttttaatagcaccctttgttggaatgattagtgcctttgatctttctgggtcttaagattttatggtcatatccttgattttatctttggaccatgttttcctggcagtgccttggatttggtctttgctcagaagttatttcttaattttagcattgtttcacatctggagaagatgagaattttttaaatccccaacatcctggctcatttttgtttaacagccyttcctttagcttatctctttttttcacataagcacaagaaaaacccaggtggcactgtgaacactggttggaaatcttagttacatcaccccattgattttttacagtccacattactgcaaggaatggtgttgctaagccttccgcctcttcttaaccaggattcctcttcttctgctttctgataacattacctcactttcctccatgtcctcacctgcatccttaccaaagactatgaggcttctttcttraggttttcatttacacgcctcaaagcccactgcttggttccaaagccattcccatgtttttcatttttgttacagcagtacaccacttccagggactaaagtctgtattagtaatctattgctatgtaacaaattattccaaagtattagtagtctgttgctacgtaacaaattacyctggtacttaggagtgtaaaacaagcctttattattttacaaaatttctgagagacaggaatcggggagtagcttaggaaggtggttctggctttgggtctcaccatgttgcagtctagctgtcagctggggttgctgtcatttcaaggcttggctgggctggagaatctgcttccagactcactcaggtgattgctgcagacctcagttcacacaggagcatgaatacaaggaggcagggatcatggaacaggccgtcttggaggctgggtacctattactacctgccctagttaatgatatccccacccattttttcccccaaaccagagatcggggagtcatcttagactccttctacacactccctattcctacctcccatcattcggccatcgagccttatacattccacctctttaacgtttttcatattaatcccttcttcctcattcttgctggtgctgctttaaatgaagtcttcactatcgcatctgtactattgcagtagactccctgctccaatccatcctctactctgcgagcagtctttagaatgcagatctaatcatgtttttgcccagccgaagaatcccttcagtataattctccattgcctgcctgtaagaaagagggcaaattgttagttgacccctttctccttgttccatcatatcttctgatatgaactttatgtttcatccatgttgaactacttaagagtttccaaatttgccatgctgtttcacgccccacaatctctgcctaacgaactcatcctttctgtgaaggtttagctgaccataagagaaactgattacttcttttgtgccagccctgtaccttgtacttaacacagtcatatttatttacacatctggcttctttactagatgaggaagtagttaaggcaggaattgtgttttatttatctttgtaaccctggtacctagtacagtgcctggtataaggtgggtactcagtacatagatgttaaattgaaatttagtgtctgaatcaggaatcttaagaccagttttcgctagaatatactgctaatgatgttttgtgttcaatttttggtaatgtgagaaccctgaaaagctaaacagtaggatataatattaaaataaggaagagaacttattttattaattgctaataaactattaattattgtagactcactgtgtctcagggtactatgccaggtccattttatgcattagcatttaaatctttccaatagtaccatgccataatggctgtgaaataccattttatagatgaggcagctgtaatgttgacacaagataccaagaaagtttacataaggtgccaaactctcagatctaataagtgggatagaattcaaactctgattgacttggcttcaaagccaaaagtgtcaggccacctcagaccattttacctgataggacttatgtgacattctgttgtgtgagatctgtgatttggagcctactttatatctgatctctacttaacaggtgaacaggtgtttttcttctgtgtacatgcaaacttcccagtgcaggtaacctaaactacagttgatattagtgtagattaatcaagcctttaatagttttttcttttttttatcttaaatttttttggcccagcttttttttttttttttttttttttaattttttgagacggagtctcgctcttgtcagccaggctggagtgcaatgtcatgatctcggctcactgcaacctctgcctcccaggttcaagcaattctcctgcctcagcctcccaagtagctgggattacaggcatgcgccaccatgcctggctaattttgtatttttagtagagacagggtttcaccgtgttggccaggctggtttcaaactcctgacctcagatgatccacacacattggcctcccaaagtgctgggattacaggcatgagccaccatgcctggcctgtttgtttttaaatgataatatgtgatgcctgatatttagtagtatgattggtgtaaggcaattagtaataagaaaatgcagtttgtatgtagttttcacttatactgaacagagtgaaattaaccatctccttttttattttcctagctgacgaagaatttgatgaactatgttttgaatttggtctggagcttgatgaaattgtatgtattggatatttgtctatttttcaaagattgtgtgcataagcttatttttcagggttatactgtatttcatctttgttaccttatagttagactaaggtgataatgtttgtgggccatgatttctgtgttcagagggctaagctccatgtctgtctgttgccttgactaaaatctcaaaaggagttcatgccttattccatctacaatcaccttgttaccaggctcatgctgtggaaatggatagaatgtgttagataaccccagtatgaaagtaagctccctcctttggcaaattaatcacagaaagggaccaagaagcagtagaaatgttgcttcaaccagagttaccctgcctccttcacttccagcgcctcctccttcagctcctctgcccccataaccttcctccgtgcctcttcaaccagtactaatgcattactatattcattggtcttgtaaaatgaactaatattttttaaggacttgcttataaaaatgaggaagcattttctttgacttttgattgtataatgattacaatatttaaaaaaatcaagtcggctatacattttaatattgttaataatgattatctattaaagacatactttaatttggtggggttgggggtctgagtccttcctcgcgggggcttgatgggtcctgagcatcctctggccggggtttctgatccatctgctccagcataagttcacaaagtacagtccgcaggccagcagcatcatctgggaacttaggaaaaaaccagccctactgaaccagaaactggggatgtggcccaagcaaccttttaccaagccctccaggtgattataatgcaaggagagacgaggttttaccatgttggccaggctggttctcgaactgctgacctcaagtgatccactgctttggcctcccaaagtgctgagattacaggtgtgagccaccatgcctggcccaatgtgctttatatagtttcactctgttgcccaggctggagtgcgacagcgcgatcttggctcaccacaacctcctcctcttgggttcaggcgattctcctgcctcagcctcctgagtagctgggattacaggaaggagtccttatcttggacctgaggctgctttcttgaagaaaacttgactttatttcatttagtgggaagagcagcagcccagctaataagttctaatatgcaataggctgcaggctgtgaagtctgaagctaaggagctgagggcttaacaagtttctagaagctgccatcaacatgccaagtcagtaaaactgaaagctggtcagatttcaaggtctggggaggaatccactgcatagtgggtcttgagctctagagagctaggccttgctaaaataaaagaattaccttacctaccatctttgttccaggctccgtagaatttgtgacagccctggctgacctccgagcagaggctagctgtcccatctgtctggactacttgaaagacccagtgaccatcagctgtgggcataacttctgtctctcctgcatcattatgtcctggaaggatctagatgatagtttcccctgccccttttgccacttgtgctgtccagaaaggaaatttataagcaatccccagctgggtagtttgactgaaattgctaagcaactccagctaagaagcaagaggaagaggcaggaagagaagcatgtgtgtragaagcataatcaggttttgactttcttctctcagaaagacctagagcttttatgtccaaggtgcagtttgtccactgatcaccagcatcgctgtgtttggcccataaagaaggctgcctcctatcaggaaaaaactggagcaatacaatgcaccgtggaaggagagagtggaactaattgaaaaagtcataactatacaaaccagaaaatcactggaactgaagaaaaaggtaaaacatacggcagaagaagtcaagtctgaatttgagcaacttaggttatttctgcaaaatgagcaagagactgtttttgggcaattacaagatgacgagatggatattttagcacaactaaatgaaagcctaacaaaattttcagattatacctcctcattaaaatatctactaaagaagatagagagcatatatgtgaagtcagaactggaattactggctgatgttaaggatatctatcacagacataagaatttaaaattccctaaaccttttttattcaaattaaaagaatatggttaccatctgtctccacaatattgtggccaaaacaaaattatcaagcgatttcaagtagatgtaattctagatcctgaagcagcacatcgtaaacttatagtctcagaagatagaaaaactgtgcgatatggaaatacaacacaaaacttacctcataacccaagaagattttatctgctcccagctgttctgggttctaagggataaaattgtggcaggcagtaccgggaagtagaagttaaagacatgcctgaatggattcttggtgtctgtagtgactctcctcccasaaggaggaagagtcaaccaattttagtacaggatggattatggagaatttggtaatctagtcggaataattatattgtattgggccataaggaaattattctgctgccaaaagtaacacctagtaagattggcatttttttagactgtgaaatgaatgaggtttccttttataatttgaatgatagatctcttctctgtacttttaatgatgattttacaggagaactttggccttatttttatactggaactgactcaaaacctcttaaaatttctacartaacagattctgtattttctttcacctagtagacataactgagccagttaatctagttttggccattctgtattttgtccagtttttctyataaaaaaacaatattttttatctcaatttcagcaacttccaaaaaatgtgattatgggacctactttataataaattatggggtcaatgacaaagtactttagaaattctayggtaaaatacttgaaaaatatattactgaaggaacgtattatgtaagaaaatctattacttttgtaattgccaataaaagcccaatttttttctcaaaaaaaaaaaaagacatactttaatttaaaagataattttctgatagttagtattatttttttcctaagccttctatcttcacctrttcagtgcttttataacactaccttaggtgtaaagttaaaaaatgttcaggctaaaaaattgtacattatcttaccttatttttcctgctgccttactaatgttacagaaagatcatcyttgtactaatctatttgtatacttgagaaattggctgagatttctgtagtttataagttgctattcgtaattttactacacctcagaattatgtttgaaattatgtgatatctaagagtgttggactggatgttagattatttgagttctagttctaacatttactagctgtgtaactatggacaattactttgcctgtctgaactctatagtccagacgagtctctctgggcctccttttcatttgtgaaataaggggtttggattatatgatctttatggttttcttttttgactctgaaatttatgtgattttwaatttctgtaagattattgtcaggtagcactgacaaattcagtctttacatatggtcattgtatgagctgagatgctgaaactgaaagaagatgtaagcttctgtgtctttttttttttttgcaaaggaattagatctttttttacagtagttcctccttatccacagttttttgcctccacagttttggttacctgcagcaaactgtggtttgaaaataggtgagtatagtacaataagaaattctgagacagaaagagactacattcacattactcttattatagtatattattttaattgttctattttattattagttgttaatctcttactgtgcctaatttataaattaaactttttcataggtatgtatgtataggaagaaacatggtatatgtaacatttagtcctatccaatgtttcaggcatccactggggagcttgaaacatatcccctgtggataagggggtgctgctgaaaaatgaatgcagatgccttcatttctccggttattatattatcttctctgtatataggtccctcctgagatctgccatctcctgggaggtgactcagctttcttcactattgaaacagtaattttattaacccctttgattgaacattgtttaaactcgaattcttcctcttctctttttgcctctccccattccccttcttttcttttccccctttttactccttcctcctcctcttcattctcttgtttttcatttttcattttccctaattataaaaatttgcctcctaagtttgagatgcccaaggtagaggttttttggagcccagcaccaccttgtacagccccagcattgcatagactcctgtggttcctcaggtgggactttggcacataatactcgtggccagaagtgaatttctctgcatattgtgcaaatgtggatataattcttaatttggacaaaaatttgaactacttatattgtggcagtgggagggcatcatgtaaaacaaaaatcattacatattttgatagaaatccatcagttattttagcaggttgttggtggtggaaatagtaggaattctggttaagtggagtttccacataattaaagcgtaacattaacagttggaatacaacttgtaatcatttcaagtgaaaatttcttaaatatatttacagttccctgctgtagtaaacataaggaatagagtgtaacttctctgcagtggttatgtttaagaaaatctgttactctgctgtagtgtggtgcttgagatattctaaactctttgccactgcattaaacgtgattctagtggtgtttcttctgtcatctccctcttggctgccttcattctgctgcactatccctttgctatcactagtttgcttcccattgcacctattatcccttctaatttttaccagtgtctgatggtctctgactgtttttagtttttatactacccctctcattctcatgtggacttgggtgcccacaggatttaggttttagagtcatcctataagaagttgtgtttcttttatttagtgaatcatctttcttttacccctttgacacttttgttgttgttactttatgttcttggtgatgttttaattttcttttakcttgagatgggaaaactttttctgtaaagggccagatagtaaatatttaggctttttggctctatagtctctgttacaactcagctattgcagtgtgtaagtagcagtagataatatgtaaatgaatgggtctgtctgtgttccaataaatctttatttacaaaaacaagtatcaggtatgatttggccagggggctattgcttgctgacccttgtttagatggatttgtgcttttctggggtgattgaggttgccagatatctgaactcagttaaagctgragtatttttctgtctgctatgattataacacttaatattttcatgttgtttttgtcgtggatataataatcccatgttcttgttatagaaaatatgtataatgtagttactgccttatagggctgacaacttttactttttaaagagagtttaaattatttaatttttatcattactttttggcttgttttagacatctgagaaggaaataataagtaaagaacaaggtaatgtaaaggcagcaggagcctctgatgttgttctttacaaaattgacgtccctgccaatagatatgatctcctgtgtctggaaggattggttcgaggacttcaggtcttcaaagaaaggtaaggaaatatgttccttaaagactttgctaagttgggttttcttttctttccttgtcattatcagcagccatgtttaaatttctaggaaaaagcttgtagaggaacgtagctttagctctcaatagagggttgatttgaggaattagattcatgcagattgtagccatttgaaaatttccatgaaaattttagtcatagccattcatctttgagaacatattttaaaactggtgtttaatgcttttatggcgtcttaaaaaattatttagcaggtgtgtgtgattcccctccgtgatctaattggaatgagtagttcactggatgtgttaaaagttgagaggaaatggagagctagcaataaatacccttacattatgagttctaaggaagctcaggagtgaagcctcctaactggaaaaaccaaagatcttatgacggctctgtgatcttgagcaagttagttggcctctctagtttcaatttcctaatctataatgaagaagatttataaggccccttccagcttttcatttaatgaagatagaggggctggacatggtggctcatgcccataatcccagcacttcgggaggccgaggctggtggatcacttgaggtcaggagttcaagaccagcctggccaacatggtgaaaccccgtctctactaaaaatatgaaaattagccaggcatagtggcgtgcacctgtaatcycagctactcaggaggctgaggcacagaatcgtttgaacctgggaggtggaggttgcagtgagtcgagatttgcaccactgcactccagcctgggcagcagagggagactctgtttcaaaaaaaaaaaaaagatagaggataacaaatatatacagtgaaaaaaatgaacagctattaaaaattgtttttatttttgattacttcttcattatctggtcagctgcaaaagaataagagttctaactgatgggctagattctgaaattgtgagggtttaggtgagtgatgggtattggtgaaatggtgataattaggcattaggttaaggatggttaaaattttagagttgactcagttggtttcctatgggacaatcagatgcttttattttaggatcaaggataactcctgagagttcgtttcccaaacctgcccagtgagaatctgtatttttaccagtcaccttgtgatttttatgatcagacagaattaggaaagcaacttaaaatgttttctacttaaagtgagtccatggaccagcagcatctgaatcacatgagaacttactagaaatgcagtcttagtcgccacccaacacctattaatcagaatctgtggtttaacaaactccccaattgattgtaagcacattgaaatttgagaagcactgccttaaaacagtagttcccaacttctccctatgataagagttccctagagatgccttcaaaatgcaccatttaccaaatctttgtcttcacttattttattcagtagggccagatggaaccagggaatctgtattttccataagctctgtttcttcctagaagctcagaatctcatggttagaataactatcataacttaaaggttatctaatccagtccctcagctgatgttgaaatgctccttaaacggttgctcagttaatggtttgtagcctctgctgggatgctagtgataggaaatacattactrtgaggcatcttatgtcatttttggacaactttaaatgttaaaaagtttgttagtttttttttttgttttttttttttagtgttcagccaaaatttgacttgctgtaactcaacccattgccctaattcattttgtatacttcytatatacagcatagaatgtaattattttatataatgtcttgattaattatgagtaaattcatttaaatattattttaggataaaggctccagtgtataaacgggtaatgcctgatggaaaaatccagaaattgattatcacagaagaggtaataaggacaaattcttatttttcttttaaaaattttcttttgtacatgtctgtataaagtggggaggaaagagaaacaaagcttactcttttttttttgttttgagacagggtctggctcttttgcccagactggaatgcagtggtgcagtcttggctcactgcaacctctgcttcccaggctcaagtgatcctcccacctcagcctcctgagtatttgggagtacaggcacacgccaccacacccggctagttttttgtattttttagaaatggggtttcaccatgttgcccaggctggtctcattcctgagctcaaaggatacttcccctgcagcttcttgagtatttgggagtacaggcacacgccaccacacctggctaattttttgtattttttagaaatgggttttcaccatgttgcccaggctagtctcaaattcctgagctcaaaggatccttcccctgcagcttcttgagtatttgggagtacaggcacacgccaccacacccagctaattttttgtattgtttagaaatggggtttcactatgttgcccaggctgctctcaaattcctgagctcaaaggatccttcccctacagcctcctaaagtgctgggattatagctgtgagcctctgtgcctggtccaaagcttacccttctaaaaaatgtgattttctttgatcatttgctaaaatgattatatacttagcccctagcccttaaaaaaacatttttttttaacctaggaatgaaaaagaacaaagcctttgctttccataaataattttggataataatatccaatgcatgtttaaaacacatttgagatataattgtttaaattgtggaacattaatgaaattttaaaagattttaaacttttcagaggggttgtttggtaaatatatgaattatgagcaaactttttctcaattatttaatacattttcagaaatcttactgaaatataaattctgtgaaggtagtgactttttctcttgtttaccactttattacttgttgactgaataaattaatatatacttgtttgaatgaaaatgtatgccagtggcaagaatgcagctaccttcctattacaagatattacaaagaaaagccttactgtttgctatctctaatgatattatgaatttcagacagctaagatacgtccttttgcggtagcrgcagttctccgtaatataaagtttactaaagatcgatatgacagcttcattgaacttcaggagaaattacatcagaatatttgcaggtttgtggttgcattttctttcttccttgccttcccctttccctttgtctccctatctcctttccatcctgatccctctccctcttctctcttgccacttctgccttctttctctctctctccttcctttcttcctctgcagattttttacaaatcatttctaaattaatagtatgtgacagaatatgagaatttcactttgctttaccagataccttttactgcttgtaaatgccatatgcatggagaaacaggaggtatattttgaatactgtatagagaagaattatctagtcctagagacttccctgctttttgttgttgttgttttggttcagatcagtcgtggattatgctactaagtataaaccgtgttaatgaagtatgatatatcatttttaaaatggaaataacattttggcttattctcactttttgagtgagagtaattataaattgacagaacttgagtttaaatgactaaattttacttattcagtctttacattactatgcataatttcctgcacagctcctttagggcaataatcttcacacctgtataatttctgaactcttaaaggtcagtgaaggtaacaacgggaatccttgaacaaatttaagtatttcaaaatcctaatggaaactgtatacttactgatgatgagaaacctcagactttagcctaacatattaagcttatttgtgttggttctgaaatagatcagcataagttactgcatgttgatccaaaggtatgattgatagttatatatgtctcaaataaaaatagaaaaagaatttttatttatttttttgtgtgagatctgctgcagctatttgctaataattgtagtttagtaaactgtagagcctaggaggggtttatgtgtatgggatgggctagggacaggatagagggagaaccrtagacattttctgctgtggtgaaaaacatctttgtccatgtggtagtagcaacatttttttcagattccaaatagcatttattcccagtccttgtatataaaagagtttatatgtcagcttgctaatatgtcattattaagcaaaacaataacaatttaaatataatttcaaaattaagaacaaaatacaagatttctgacaagtataggtataacttaagtggttgagccagattatctgctctggctctattatctgtttattttaagaagttattttaatctaaacagacattttcttacttaatttaactttaagctctgttttatttggtatttctggaaatcatgagctttttctaaggggaagaattgaacacatcctaatactttggtgtgccagagttcttttctgtcagtaaatcctaattaacctctttaatgagctttggaagtttacgtatttcaagggatatatcgatattgtctaagttattaaatttattgacaaagttgttcataawgtttctttattatccttttaatatctgtggtatctgtagtgatgtcacctctttcattcctctgtcttctctcttttttttcctttgatcagtgtggctagaggtttatcagttttattgatctttttgtttgtttgtttgttttgagacagggtttttctctgttgtccaggctggagtccagtggcatgatcatctcattgtaactccagaactcctgtgctcaagtgatcctcctgcctcagcctcctaagtagctgggactacaagcatgagtcaccacacctggctaatttttaaatttttttgtagagacaggggtcttgctttattgtccaggctggccttataggctttaagtgatcctcctgtttcagcctcctaaagtgctggggttacagttatgaaccactcattttattgatctttcaaagaatgaacttttggtttcattgattcttctcttattttttcctctatttttattgattaagcctcttttttaggctaattagtccctactgctgaggcaagaccctttgcctactatatccattgctacrtgagcagtgaagttttagtctgtgtgagcatggagcactgtttcctctaattccgttgagtaattctttcctggccttgggtagttttctcagctgcatgttctgatcaatactgagctcaccagtattccagtgggaccctctgcatatcttcagagttctctctctgtgtagctctctggttttctctgggactctgcccaccttggcctccccaaactctcagctatgtctcttgctctcagggagtctcctggactccactgggcctgctttcctgccctatagtcagggctcacctcacttgtttcctgtgtctcagggattgctgccctttattgcctgctgttagttgccataaaaactattgctccatatattttgctcttcggttgtttcaggcaagagtaaatctagtgtgttattctgtcttggcttgaagtgcctagtgagtcttttacttcagttattttacttttcatctctgcaatccactgccttttaaaaaaaatagttccttcttttctgcagatatttcctcgtctatttattatgtgtatgttcttccataattcttgaacattttttagtagcagctttaaaatctatgtggcagtatcagaatctggggcatcttagcgttggtttctatggactagttttgtctggagtaagagtcatgtcttccatatttcttctcatgtccattgccttttgatgcatatagaatatcatattagggaagagtcttgactttgctatgtttctctgaagagtggtttttgttctttcaggcaaagacttgaatacttagctagattcagactcagcagtggttcagttttctgctcagttctttcagctttcagttgctgctctattatagcaagactttgaaatttttaccattatgttagataaaaccttgatttctgaatatttttagttttttcatatcttactatatttggaatgttaatctttttactgtatatatgttgtaaacctttttttgtgttttttgacttttagtttcttttggacatgtaaggtttttaatttgggtatagttatcagtcttcctgtttgacttttagattttatgacctacttaagaagtggtgtcctggaagttgactctacagttttaagcatattcttttttttttttttttttttgagatagagtctcgcactctcgcccaggctggagtgcgccaagctctgcctcctgggttcatgccattctcatgcctcagcctcctgggtagctgggactacaggcgcccgccaaccacatctggctaattttttgtatttttagtagagacggggtttcaccatgttagccaggatggtcttgatcacctgaccttgtgatccacctgcctcggcctcccaaagtgctgggattacaggcatgagccaccgcgtgcggcctaagcatattcttctatattttcttatctttttttttttttttttgagacagagtctcaccttgttgcccaggctggactacagtggtgcaatcacagctcactatagccttgaccttcctggctcaagtgatcctcctacttcagcctcccaagtagctgagaccacaagtgtgtggcaccacagccagctaatttttacattttttgtggagatggggtctcaccatgttgcccaggctggtcttgaactcttgggctcaagcagtcttgctgccttggcctcccaaagtgttgagatttcaggcgtgagccacctcacctggcctctgtattttctttgaataatttttatggtgtcttttgtatgtgtgcctgtgtgtttgtcttttgcttttcaaaatgcttaggtctttgattcatctggagttacgtttttttgttgctgatttgaagttgaaattttggtgatgttttgaggtactgttttaggattaagggaccaatgttaatatctaagaagacagactttcttacctgtgcatttgtcaattattaatttacctrcatttatcaaaccatgcatattttatcctatgatagttctgggtttattatcttctgtaagcatatgactaattgagtaaagtaacactcccttattgcctgttagcaattctttttaaccctatttattaaagttgtagttcaccagtcctgcagtcctagaagttgaccaaaatttaatattaagcattttaaactaatttagtgcacatacactttaaactaaagaatgttaagaacacaaattttgaccaagttcctcctttcaaattgactgttagaaagccaaacttgtgtcctttcctggtaagacttaggcttttagattctaattcagaattaacatttcctggctcggttttacatccctacttctatttctttctctcctattttgttgcttgctgtaatttcctaaaattaccttaaatcctttgtggataaactgtagaacaagtgaaatgaataccttttgaactttccttatacattaaagtaaacttgaactgtaattcagagctgttaaaattaaaattaaattttttccatgactaaggtaatgcagctatgtgataaaatttaggaaaacatagaaaagccaaaaaacccacaattcgatagttcgttctaatttattaaaacatgtttacttgagtatatcaagaagaaataggttaaaagaggtaaaggaaatgctaactttgaagatatcctagaaacaatatttgggaaaagataatggcaaggaattttcttcagctcctgaaatcatgtatttcaggtagttttgtgatttctcagtactcttaatggttgtgagaatttgttcattatatgccactaatgatgccatgtagtagcaatatgctgtttcagggaagtatctgaaataattaaaaaaaatatgtagtctatatttaygttatctttagaatttcggctttagaatattcaaatctgtctcattctcctcctttcctttcctccctccttctccctcaacctctcaacaattaggaaaagagcactggttgccattggtacccatgatttggacactttgtcgggcccatttacttatactgcaaagcgtccttcagatatcaaattcaagcctctaaataagaccaaggagtatacagcctgtgaactgatgaacatatacaaggtaaatattctttttgattatgcagcagctttrcaaaaatcatgaaattccatcaaagtcaagccttgcaactagggaaatgtaatcaatacttttaaaaaatagcagtgtctggactccaacctagagacagtgattcatctgatctagagtgggacctgaacatagttttattttatttattattaaatttttaacctctgatatgatttcagtgtactgctaggattgagaaccactgaagtagaccataccacattgtaatcttcaaytgaaactcatgcaagtataaagaacagtaaaacttagctagtgttttttgtgggaaatactgttacaagctgtctatctcccattatttaaaagtccagcagcgaaaatgaattcagtagtcactttgaattgtatttaataagtagaaaaaataggtgtcgtttagaaaaagcagggtcatccttgccctgatttgcaagtgacttcttcgtatttatctaaatagttttgtcatggtttatgtttcctttgaaatgattcaggcataccagtgcaaatctgttttcactcttgagaaatgattcaattgtgttcattgaatactggaatattaatttatattagaaaatcttataaatttagagctttctttaatttgggtctgttttaatgtttttctaacttttcccctcctttttttttttttttttttgagacggagtttcgctcttgttgcccaggctggagtgcaatggcacaatctcagctcaccgcaacctctgcctcccgggttcaagtgatcctcctgcctcagcctcccgagtagctgggattacaggcatgtgccaccacgcctggctaattttgtatttttagttgagatggggtttctccwtgttggtcaggctggtcttgaactcccaacctcaggtgatccaccggcctcrgcctcccaaagtgctgggattacaggcatgagccaccacacctggcgttctcttcttttttaatattaggtcagtatgtgaactatagtgatagaaattaaaaaaaaaaactaattttatttgacttaatttgttttcagactgacaatcacctgaaacattatttacatatcattgaaaacaaacccctgtatccagttatctatgatagcaatggtgtcgtcctttcaatgcctcccatcatcaatggtgagttattttataagcatcacagatctttgctgtttccttttaatcttcagcatttctgtagaattctcaatagacttggctgaatcaaattcaaataactcataatctgagtatctcaggtcttttgtagattctaatcattcttttcattcatttattcaacaacattttattggtgattcttatgtaacttatgctcatacatttataaatattttctgatgctaggttttgggttctattatgtttcttcaaaggttattgatgttttggttttagcargtaattcacttggttaaactcaaagtcaaactctgtcatgtctgtagttttttttcttttgttttttttttttgttgttgttgttttttgttttgtttttgagacaggctcttgctctgtcgcccaggctggagtgcagtggtgcagtcatggcttactgcaaccttaaactcctgggctcaagcgattctcccaccttggcctcccaaagccctgggattatagatgtgagctgccgtgcctggccttgcctagttatatagttaaacaaaaacttttaatttaaattttgccctcttaattcctttctgaaggctatttttatgaggcagtttgaatgtatttacaaaacttaatgatgtctgagacatagatgtttgcgtttctggaggtaagaaggaggcttagctgatttgctatgagaaggagaagcttcttctcaagatcttggaccctagtagttacagtggttaagaacatgrgccccagagttaaccagttctagacccaaatcctagccttgctgctcatgatcatggtcaaatagtttaatctctctgaatttagtttcttgccagcaattacatcataggattgtggtaaagattagaggagacaacctatgttaagtgcttggcatagcacctgacacattgtatgcattcagtaaaggcctgttaattattttatttttattcttcaacttgcagtaggagctttaaatataagttgtttatccctttgctcttaagatgttaggttytttttttattatttttatttttttgagacagagatttgcttttgttgcccaggctggagtgcaatggcacactctcgtgccattgcaccatgtcgtgccattgcaccatgtcgtgccattgcaccatctcggctcaccacaacctgcacctcccgggttcaascaattctcctgcctgagcctcccaagtaagtgggattacaggcatgcgccaccacrcctggctaattttgtatttttagtagagaaggggtttctctgtgttagttaggctggtcttgaactyctgacctcaggtgatccgcccactttggcctcccagagtgctggtgggtgtgagccaccatccctggccaaggtgttagtttttaatatgttttacatttaaaatgtagtttctgttttgttgagcttaatagtgcacttctatttctgaaattagttattttaatgttattgttttgtgttcattgcaggggatcattccagaataacagtaaatactagaaatatttttattgaatgcacgggaactgactttactaaggtaagtaaaacttttactcaatttttgtatgatcagctgggatagattttatttccggaccaagactaagtggctaaaatttaaaatatgtgcattttgtaggtgggaacatattttagaaatttagacaattaaaaagatagagatattctacactttggttatggtgctttcattaattcgacaaatgtttagtgagcaccaaatgtctttccagtgccaagaatttaataatgagttacatgtytcttcacttcaaagaactcctagggggagagttagtcatatacgtaactataaaacacaaaatggaatgagtactatagcgaaatccatataaattgtttatctagttgacttaatttatatgcggagtaatttggtacctttgtgtacttgttaaaatcttaaaaaaaaaaaaggaactggcgatgaagaagctttatttagtaaattgatagatggttggtttatgcacacaaaattatctagaatataattcttcacccactttgagtcagttcatctattggaatggattgctatgaaagctttttctatgacatatgacttctttacatatgttaaatgaggtggcagttaaacaatttaaaaaaggtaacctcaaatggcaggagaaggctggagtatagaaatagggcaaataaatggtattcatgtacatcttataggattagagaccattgtaaggtatttcctttataacttttaggtactccttgccttcagaaatattgtcagggtagtacagcttttaatattaattttttaaaaaatttaattcgtgcatttacagaccttgaatgtctttcctgaagcctgtatatataggagtgaaatatttatataagagtaaagcatatattccaataaggtcacggtattttttttctaagaattttttttgaaatagaaaaattatttaacaaatctatatggtgtttactacatgccaattatttaatctttgtaagtaccagacaagataggaattttcattatctccttaacaggtaagaaaagtggtttgcctagtgtcatactgttaataagtgcttgagccaggattcaagcagcctggcttcagagacttaggagattgttaagatttattccagtaattagccatttgtctctgttgaagcccagtgaacctgaggttgggggtgggggaacgaaacgatttgtctcagtcatggattataactgtcagagaactgcgtaaatgcagaacacctgaagataaggctaggcctactcatgtttttattccacttcctttcttaaaatgtatacgtaaaggtccattagatgtgaggacacaattatattaaatattaattcatttccatctgagtgaagagaatatatttatagattactatatttgtttttcttttctttgcaggcaaaaatagttcttgatattattgtcaccatgttcagtgaatattgtgagaatcaatttacgtaagttcatccagcacctttattgatggcccattgttctgaaggcgaggctttgtgctaaatgtaaagataggccaggtgcggtggctcacacctataatcccagcactttgggaggctgaggcgggaggattgcttgagcccaggagttcaagaccagcctgggcaacacaagaagatgccatatctacaaaaaattaaaaaattacttgggtttggtggcctgcgcctgtagtcctagctattggggagactgaggcaggaggattgcttgagtctgggaggtcgaggctgctgtgagctatgtttgtgccactgcacttgagactgggtcacagaatgagacactggctttaaaaaaatgaatgaataaacaaatataaagattaaaaatgtggttcctataactagaacatataatctgttcagggagataagacatacgcataaatattggataaagtcataagcattaagtactttaaaaagttttggtgatattccggctgtttgtaagggcaagttactgccagctgatacaatctgagaaggcttcatggaggcaatgaaatttaagctgtgtttggggatcattggatttgagaatatatagatggaggaacagcaaaagagcagctaaacagaggtagagaagcatatataagagcaaagcatgtatcccatgtcggtaagattactgtattttttccaaagcatatttttagtttaaaaaactatttaacacatctatgtggtccttggtactagcatcatagtttattctagaatattaatataattgaaaataaatatataactgtagaaagcatgattgaaattatatgggcagtatcagttttttttcaactgattttcatttcagtgattctttcagttttattatgtaacacactgccctggtaaagcctagaatgtgtgtgtcagtattggcaaggagtccctgtcggatgcatgctttgcagtactggaaaataaacctttcaagtaggtggtgcctgaaaaggacatcggasccctaggagatgaaacagtagagtattattgtttatagcaagatcaatccaaacagtgctggaatgygatagatggagtatgttgaggctgtagttgtagcccaaatgaaagatttgataaccatactcatgtctgtaatttatggcacatttttttcttaagtattttatttctggcttttgttttcagggtcgaagctgctgaagtggtttttcctaatggaaaatcacatacctttccagtaagtgcttaagaaatgacttcatgattatgacaacaatgctaataataatggctatagagcactcatgttctgtctgtctatccatcccctacctacccacccgtgtgccaggygctayactatgtgcattacatggatttagtcttcaccataatcctgtgagggtaggtgctcttattaagctttttccagatggagtccctgagaccttgagatgttaaataccttgcttattatttttaagtggtagagctaggatctaaattcagacagtttgacagcagctgtaaacacaacattatacaacaacattgtgtggtcataattcctatgatttattctattaactagttaactgagtagttttttaaaaaatgtttttattctttaattggcacataataattgtacatatttatggggtacagtgtgatgtttctatacatgtatataatatgtaatgatcaaatcatggtagttggcatatccatcatatcagacatttattattttgttgtgttgggaacattcgtagtctgctcctctatatttgaaaatatacaataaattgtcgttaattattttgtagcatcctacagtgctgtagaacaatagaacttattaaataagtaatttatagtctcactccttttaagattactcagccctccgaacatagtctgttcacgcttgaattaacagttgctgaaggcatcactgtaactaataaataatttcaaatgtattattaagactaatttagtagtaaccacatagttattttcaagcgtaagatcttggtaaaaaatctaaaccagtattattcttgggtggttttgtccccaagggacttgacataaagatgactgttctaaaacataacagtatcacagtcacttcgtggttctcattcagtgagagcattctttgatgagcttttccttcccctttgaatctttcactattcccttgccatttatgaagtaaatcacagcctgaaatagtttctgctatttaaatagcttttacagtagatgaaacctgctaagatcaaaacctccccattccggaagacattaacatttagcatcatattttattctagagtgttaattatacttcaaaagaaacataactgtatgaagcataactgaaattatataggcaatattagtttttaaaagttgatttggattaaatatctattgtcagttagcttttgttatttaacaaactacccccaagacttagtggcttaaaacaacaaccatttatttatctcatgattcttttggtcaatagggtggttttcctggtctgagcaagtttggctaatctctgctgggcttacccatatgtagtcagttgactggttggctagcaactggatgatctgggatggcctcactcacgtctgcttcttggcagtggggtcaacaactcacatgtccctcatcatatagcaggctagcttgggctttttgacttggggttggttgcagggttcctagcagcaagagagcatgcccagtgcccaggcatttttcaaacattattctgttggccaaagccagtcatttggctagatttgacaggtggagaaatagatgtcatctcctgattggaagatyggcagtgtcacattgcaaggccatggatacagagaggggagaaatttgtggccatttttgcagtttatgacagtagcaattgggattagctggacatagctttttagatggttttaaaataatgccagagaaaagtttctttttcttcttcttcttttttcttttttgagatggagtctccctctgtcgccaaggctggagtgcagtggcgcgatctcggctcactgcaagctctgcctcctgggttcacgccattctcctgcgttagcctcccgagtagctgggactacaggcgcccgtcaccacgcccggctaatttttttttgtatttttagtagagatggggtttcascatgttagagaagatggtcttgatctcctgaccttgtgatccgcccgctttggcctcccaaaatgctgggattacaggtgtgagccaccgcatccagcctcttttcaatatgatgatttgtcaagtgttaataaaagtgattatatatttttgggaagaaaaggagaaatatattttaatatttggttcactcttctcctcatatggataaacccttaaaatcatttatttgtaatatagagaccttttgtaaatttgaaatggtgggctttctgaaaaggagtactgcatgagtgttttggcatttgttcatttatttcctcctaaacttaaattagaacagcttttcttagggaaggatcctctgggggaaactgattctttctcacatgaaatagcatattttctcaaactctgaaaattttttttcttgtgttttgttatttcatagaaaaaaataaagttttaaaataagagaactaggggagataagttgtcagtagtcagactaatggttaatggtgtgtactttggaattaggttgtcctaatttattaattcattaatttgttcattagttacttctttttttttttttttttttttttgagatggagtctcgctctgttacccaagctggagtgcagtagcatcagctcactgcaacctccacctcctgggttcaagcgattctcctgcctcagcctcccgagtagctgggattacaggcttgtgccaccatgcccagccaacttttttgtatttttagtagagatggggtttcactacattggccaggctggtctcgaactcctgacctcaggtgatccacccacctcggcctcccaaagtgttgggattacaggcgtgagccaccacgcccagccatttgttacttcttgtatgcatacattcacttattaaatacatataccaaacgcttattatctgataatcagataataagcactgggcatatagcagcacttggacttggcagtttactattctgacctggaactagttattcagctaaaattcaaattccttacctgtcaaatgagaatactaatagcatctgttgtgaggattaagtaagattatctttaaaatgcatctcgtactgttcagctcataataactgtttaggtcatagtaactattgagaaaagttattattactttgcaatcttcaccttgtgcctcccaaaccctgcagtgcattctcatcacctggggatcttgaaaacgtgcagattgggcttcagtagctctggtgtcactgccactagctatcaagacctgcagtcagcctttctcacgagcactcaggtgatgctagtgcttctgctctgaggaccgcattttgagtagcaaggttccagaccattgccttacttgaatcaaaacaggttttaaaatctatggcctttttgctagtggcatgttatacttttgagagtgaatgagtgataagaaatattcataaggacatttccaaaggtgttgaaaagcctgggatttatgtgtgtgtgttctcacctcactaatacggtggagttatatactgtttgaaggagactgagtaccaaattcatcattgcatttctccacctggaaatggtaagaaaggaatatcttcatcatgctcttagacttagtatgatggacactgtgatattggaattactctttcttggtcatatccatctgcttgcataggacgagactgaaaatctttagcaggatttataaacgtctttggaatgatgtagcacaacagtgttttactgtggggaatggggaatgactatctgaaagggaaaattgtttggcattttatattatttccaggcagtgcaaactgtctagcaagtagaatgttcatatatgaatctaatatagcaaatttatccctcataatactgtttttgaaacatcaagtttattctcaatgtgtggctctaatgacaatttcttgggaacgtaatagaactgcaataatgactaatggaaaagactctaaagctgtatctgatgggaaatgatttactttttaaactctttctatttaaggaattagcytaccgaaaggagatggtgagagctgacctaattaacaaaaaagttggaatcaggtatgctctgaaaacttcacttaattcaagaacaaagtacacgtatgactaattttttttttgcgatccttcagagtctgttaaggaatgataaaacatcagttaagatatctggtttctgatagaactcaaaaagaaargttactgtttcagctagtagcatatgttgaaacacaatgtaaacattaaaaaaataatccaatgaagtttatggtttgttcattcctttttcagagaaactccagaaaatcttgccaaacttctgaccaggatgtatttaaaatcagaagtcataggtgatgggaatcagattgagattgaaatccctccaaccagagctgacattatccatgcatgtgatattgtagaagatgcagctattgcttatggatataacaacattcagatgactctcccgaaaacttacaccatagctaatcaagtaagattgcacccttaaataaacactccttattgttagaaactgattatttaatgccaggaaggcttcgagaaaacagaacgtaggaatcaagcagtatttggacatgctctgcaatgagaggcatttgctgtggagaggatacaaaacagatgcccaaatgattagagtaagttgaaaacctgtgatgactagttctttgaagaaagacargttttgagtttggagcccttgttgaatctctcagagattcattttctcaacttgggcctgaaggcagaagctgtgtgtgggagagatggaagtgggggtggtttgtacatctgtgtaggagcagaggggtggcagagcggtggggagggaggaggtaatattgatagggaaatagtggcattagcagtacgttagtaagggtgaaaaggtttttaatcttttaaacatttttatttaaaaaagttttaatggcatgttctgtataaatctcccttttaaaaaacaagaaataattgcggtgaaatcaagtggatgctttttttttcagtttcctcttaataagctcactgaacttctccgacatgacatggcagccgctggcttcactgaagcacttacctttgccctggtatgtcttacatgctttttctgcccagatgattatttacttagactctctgaattatttattctatgatgctttataagaatttataaaatctagactgttagaacttccagattctggaagaataactttgttacttgagattatacaattcctggtaaagtaatgttgaagcttttgtttttacagccacaaaagaaaatgaaggcctagaaaaaaatacctcaaatgagagatgacaaagtattttatagtttcatgtgagtgttgagagttcacaatgtatttcataaccaaatttattaagttagaatatttggtcttaatttggttatggctgtgcccactagatgccgtcctgggtaaaggcttgtggactgttccacattaaattaatttctttgtctttgaacatgttcacaaacatttgctttgagttgaaaagctgacataaaaggcctaaatcaggaaatgacttttattacaaaatcagaaggaaatttccctcccccaccagattgaccatttgaaagaataaaatgtgtatgcaatttgtagttccgtttttccctcttgctgagcatttctgtggtgcctgcaatgtagttcttgagcattcaagtatgtttaatctatgaggggaaaggaagcttcttctttttctcccctgcaacttagccctacctctgaaattctcaatattttagagtatttaagggactctayttctagtttgcttaataaatattaagcattaagatttttctgattcaggagtcattcattcaacatttgttgagcatttattatatgtcaggcactgcaccaatgaggaagcctgaggctgagagaggataagtacgtagcacattttacacggacagcaggagaactgctgtgttccaggccaccatacctgcatgatctcattatatcatgagcagggtcctgacctttagcctcctagaacagtgcttttccatggtctcataccgtgtacactaggtctgtaatgccatgtcattcatctttgcacatatatatacacacatttgtagttgtgagcatccaggatttcatataaaatgaagtaccaaaaataacattgaaaaatatatttttattttttaaaacatatgagtgtcayaggaatacatcttattttaaaggactcatactttaaccatgtagattaaaccataacagttctyttccccacttcgaatcctcttttcctccccagaaacaactgctgttaaaacttgggtatgcatttttccctgcccttttatattagtggtgccagtttgaaaaaagttacttattactttatcctttttatacttatactttatacttattacaatatccattgccagtttgattttgtgaccttagagcctcatgtgtcttcgaaggagcacagaggccgagtcttgactagtggctgctctgcagggaatgtttaccctgtgccaagggctttgtgtacatgattccatttcttctcagtatactcctgtgaagtgggcattcctgtctttcacagcagttaatttaagtaacttgtcctacgccatggctgtggatcagggattcccgcccatgcctgtctgcatccaaggcctgtgactgaactgtcacaccagggatgttagaaacagtctgtttagctgtccaaagtcactttaatacattcaatgtttatcactggggggaagagaaaggagtgagctcctagagggtttcagatttgtactaaattttcctgtaggaatttcaacattaaagatgtttataaagatgtttataggcaagcctaagcatcgctgagcaaagatggtctatgttgttaaatccagttttgcacaagagtaacagccatttttttaagcctagtctctgactttctaagtgtaaataattcacacttcatcatattgatttttgctatatctgcatagtagttgtaatattttcttttaaattggctcacttttaagttggcttatgtacttcagccttgttataggaataatatctgtaaaaactataaggttcatttacttgttgtatttttctaacacattaaaataaacacataaatattaacattaaaaaagttcctggcaggcatggtggctcatgcctgtaatcccagcactttgggaggccgaggcgggcggatcacttgaggctacaagttcgagaccagtgtggccaacatggcaaaaccccatctctactaaaaatacaaaaattagtcgggtgtggtggaggttgcagcaagccgagattgcaccactgaactccagtgtgggcgacagggtgagactctgtctcaaacaaaaaaaagtttcttactgtgtactaactactgccacttcagggtagcttaatttaaattgcctcttgtcactatcccttattatccattgccatgataaaatacaagttcactcagatacacagctgcgttgccatgtgtctgcagagtgtttttcttttacacagagaggactagtttcatttgagaatagattgcttcatgtcagttgcatttcataattaatcagtcacattatacctaagtcttgctgtaaaacttctttatgctgtggggaaaacgcttatccccagtgtgcatgtcaccattctccatctcagcagctgtagcagatccgggagctgttttctgctatggctggatgtggcttcaggatctttctcaagaaagcatggcaagaatcactagaactgacattgacatgaaatgaattctttttaccatttcagttgatgtgtatcattttgttttaataagtgaaatacaggccaactagcctttgaaaactagttgtagaacagcataatgaacaatattgcctaacattggacaatagtacaataatctgatggtacatcagtttttgtgttacgttttaaatgctttttcaaaaagctagcattaatatacatgataataatttatccttagtaatgatttgtcagttatcatcattgttggtattttttgagtgcttactctgtgccaggcaccatacttgcattatctcattatatcatttattattagacttgatgtatctaatcgtcagtgagtttttaatttcataacttctgcctacaatgctggtttctgagggtggcaagcatctttctcttcgattggtgggtactcagcagtttatttgttatgagtttcaggcatgtgcacagaagttaagtgatacagtaaagaacactgggcagagttccagtcacttgaattctgttgtcagtcctactgttctgccacaagtcagtatggatttagcaagggttataatggtagtcaaaatggaaagtcatgaaataccaaggagggagagaaagtttctgactagagtcattaggaatattatggaagagaggtcatttaagtcagccttagggaatggtagcaggtgaggctgggaggacatttcaggtaaggtagggaaacataaggtttagggaatggctagggcatcatgggagattagattggaaaggtaaatgggaaactagcttaggaagggcccgagtacagtttataccatctccatgtgaaaaatttactttagctctgtatgatggctaggactcattgtgaaagaagtattaatgttaaattccatctgctatgggcctgagattgatgtgtatttattgttagcttattctttttttgtttgttttttattattattattattacatttacttmagctcacaccaggcctattcttaacttgctgatatgtgtagagaatataaattgctcttagaagttgacttacagcattactttttattttaaacttaagtaattgcttttccatattaatctgttttgtgtgtacttcacagtgctcccaagaagatattgctgataaactaggtgtggatatctctgcaacaaaggcagtccacataagtaatcctaaaacagctgaatttcaggtaagaattttaagtaggtgagaattcatgtaaaaacctagaggtagtacatgagttaggaaaagtctcttcagttattatacctgagatggtgaaatcttagagctttttaataatatcttcttgggtaagtttayagttggttattacgtgctttgctgccaaaaattctttacacttttaaaaataatatcttcttgattaacttcatactgggttcttacttgctttgtattatctggcccaatctctcttgtctgaactttccatttcataattgattttttaatactattttcagatttcatttttttttttttttttaatttttattttttgggacagagtcttgccctgttgctcaggctggagtgcagtggcacgatctcggctcactgcaacctctgcctcctgggttcaagcgattctgctgcctcagcctcccaagtagttgggattacaggtgcatgccacgatgcttggctaaattttttttttttttgagacagagtctcgctctgtcgcccaggctggagtgcagtggcgggatctcggctcactgcaagctccgcctcccgggttcacgccattctcctgcctcagcctcccaagtagctgggactacaggcgcccgccactacgcccggctaattttttgtatttttagtagagacggggtttcaccatgttggygaggctggttctgaactcctgatctcaagtgatccgcaaagtgacctcagcctcccaaagtgctgggattacaggcatgagcacctagccaggtttcatctcttttccattcatttgtaataaatgaatcaaaacctgttcccagttccttcgtaagtcattcactttgaaattgcccattatatcagttcttgactgtgctgcttatgtcttttattgtaattgtctaagtttattggcagtttcatttagaggttaggaatatttaaatgagaatgatactgctttaatattgagtattaagtgatttgtgttatagactaggatattaactataaagggagggcattttaagattataacatctttgcttattaataactttaaatagttctcttttatactgataagctcttgtgctgtttctcttgcatatgcaagtctgtatgttttttaacctagattttagagaaaatcatgtcttcttctagaatcaaggggaatcttagaactggaaggttatattttaaagaaggttaatgctattataaataatatctgaattctgatttgaaatagtttctttggattttggtttttacttctacaaaaataagggactgggttagttctaaaaagaattctaaaagttctaaaagtgtttaaaactaaatttaaaaattctaaagtttatctatagaaccacctgctaatgttgtagattagagctagactaattaaagaactaattggtaatatatatcaagtatatgaattctttatctatacttagggtcagaactttgaagaatccttatactaattttggaaggattgtagtaatgagttgttatattttattttctgaggtctagtttcctattgcttttaaagtttgcccatggtgttccttttaataagaggtattcaaattcatttgcatagaatgatttttcagtaaatcttaatggatttttgcttattcgaaatgtacctttttctcccagttttacttatctagcttgattacttttttaaaaaactttattttatttttatttattttttgagacagagcttcgctctcttgcccaggctgaagtgcagtgtcctgatcttggctcactgcaamctccgcctcttgggttcaagcgattcttgtgccccagcctcccgagtagctgggattacaggtgtgtgctaccataccttgctaatttttgtactttaatagagatggggttttaccatgttggacaggctggtctcgaactcccggcctcaagtgatccacccaccatggcctcccagagtgctgggatgacaagtgtgagccacctcgcttggccttttgtcaacttttattttagattcagttagtacatgcgtgggtctaattacaaaggtatattgcatgatgttgaggtttggagtgtgactgaacccgtcacccagtagtgagcatagtacccaataggtagtttttcagcycttgctccccacctctctcttcgccttgtattcccctagtgaagcttgatagatttcttaagatgtggtaactgttatgttcttcaggatttacatcctgtcttttctattttatataagtggaaggaaaataatcagaaatgcattaaatgtcactataaatagctgtggcttagcacacttaagaatcaatctttctgcataaagtaccttaaagatcaaagagagtgcctgtcttttgacctaacagattctatattttacyttgctttaccaacaggtgagtcctaccatcattaatttggctaagaggtttatatttatggttaagttaaatgtaaagttcttcatgggcctataactcagtttcttgtctaaatcctttccttctcctgcataattcttaactttgggctcttttttgatagtaaatatgttggagaatgggcaagataaaaatgtaacttggctaaaatatgtaaaattttattatagtgacaataaacaaacttacagaatattaccacaccccttccaaattaacaataatattccttaatcacctcacatatccagtcattgttttagttttcccaattgtcattttttttttttttttttttttttgagatggagtctcactctgttgccaggctggagtgcagtggtgcaatcttggctcactgcaacttccgccttctgggttcaagcaattctcctgcctcagcctcccgagtagctgggactacaggcacgcgctgccgcgcccagctaatttttgtatttttagtagagacggggtttcaccgtgttggccaggatggtctcaatctcctgacctcgtgatccgcccatcttggcctcccatcaatttttttttttaacagtttgagttcggattcaaatgtggttcatacattgacattgatttatatgcttttcatgtctctgttaatctacaacttgcacctctcatccttccgtctttcttttcctttcagtttgttgaagaaactgagtcatttgtcctatagaattcttacatttaggattttgctgaatatgttccaatggccccctaaatttccagtaaattggtagttggatatagaagcttgatcagattcaggtttaattttttgtatttctgtaggtttttaaatatgcaaataaggcatatctataaaatacactgataaaattaagaaaagttttctataacagtagtttgtttattatatttcaataagttaaatttccttttaacttttaacattgtagttttgtttttgtgaatggtttgggcacttgccctccaatggggaaaatgaataatatttaagaagcaccaagttgaaggcgagtagcagcttgttggtatagtgagtgtgatgggaaagacgttctctttttcattcaaaacacaatctaacaattccatttagggtcttatggttacttgtgcaggatctaagagtgtctgtgttttagcttgggtgttcagggcaaacctctgtaggagagaacatttgagcagacacttgaaggaaggaaggaagccacatgtgaacctagaggaagaatgtaggagcagagtaagcatggaggccccaggatggaaatcttgctgaccagtgtggcctccagtgtggctggagtgcagtaagcctgcggaagcagcaggggttgagggtagagagggagtcagggcacatcacatagggccccaggtaggccatggattttattcaaaatttaatggaaacctcttgcagatttttgaccaggggagttgcatggtctgatttccatcttaaaggaccactccgtatggagaataggccacaggttggcaggaatggaagcacagaagccagcttaagaatgttatgcagtagtctggggaaaagataatagtgcttgtggtctgaatgcagagcccagactctcacaataatgttacaccactgcttataaaactcttctggtaacatgtgttggaagctaatatattccgtatagcttacagggagaaatatgttttacagacaaagcaggaaatttttgcttttttttaatgtaccagggtatgcatttcttaggaataggaagaatgaaatgactgtacatgctttctttcacatttgctttagttaataaaaagtttagaactgtagttacagcctacccatagcagctgtatatattttttagcacctacatatttgtattctgttttcctcattgtgatattttaattgcatttacatttttcctggtcctaattctgattaattcatatttaatttatttatggttttatttatttatttgtttagagacaggttctctgttgcctaggctggagagcagtggtatgattatagcttattgtaaccttgaactcctgggctcaggcaattctccacctcagcctcccgagtagctgaaactaaaggcatgtatccatacctagctaatttttaaatctgtggaggtggtgttttgctatgttgcccgtgctggtcttgaactactagcctcaagtgttcctcctacctcggcttcccaaagctttgggattacaggcatgagccactgtgcctgacctatatttaatctatttaaacatttgtatttcttgtagtctatttcaattactttgtgaaatgaggcaggatatgaaaacttgcaaacatgcatttgaaatcttgaaagcaaactttagtttttaaaatgataatcaattagctgggtgcagtggtgtgtacctgtagttccagctacttgggaggctgaggcaggagatcactagagccatttgaggcatttgaggctgcagtgagctatgattgtgcccattgcactccatcctgtgcaaaacagtgagactgtgtctctaaaaaaagaaaaaataaaataatgaatgataatgaataaaataaccaaggcttagatataagcaaacatatttaggttgtatttgtttctcgtttattttttaatcaaatttatgatttttcattttgtaaatttggaagccagaatgttttcagttcttttcagttcaatttcagtgtcctggaattgaaaattgaaagtgacttggatattttagggcaatgcattttccagaagtgtcttcctatgaagccatagtctttctgccatggtctttgtctttaaccaagtgtctttgtttgggtcctatttggtcagtgcaatttcatgtcttttcctgtaggtggcacgcactacccttcttcctggcctcctgaagaccatagcagcaaatcgtaagatgccccttccactgaaactgtttgaaatctctgacattgtaataaaagattctaatacaggtaagaataagtcacctttgatttgatttgtgtatttaaaacatttttttcattatgaaaaccttaactatacataaaagcagaaaaaatagtataattagcccctatgtacccagcacccaccttcaacagttaccaacacatggacaggcttctttcatctataccactatcaacttcccatattattttaatatgaatcatagacattgtatcatttcatcagcaaacactttagtatgtatttatttatttatttttttcctggaggcagagtttcactcttcacccaggctggagtgcagtggcctgatatcagctcactgcaacctctgcctcctgggttcaagtgatacttgtgcctcagcctcctaagcagcagggattaaaggcatgtgccaccacacccggctaatttttgtgtttttagtagagacggtgtttcaccatgttggccaggctggactcgaacttctgaccacccgcctcagcctcccaaagtgctgggattacaggcatgagccactggcgcccaactactttagtatgtatttctaaaagataagcactaccacttcagttttgttttataaatttaattttcatgattaatttatttgaatcagaatttaaggtccagctatttggttgctatgtctctcatttcttttaatggaaagcatttttcaacaaagaatttaataattaagaagattactgttaaaacctcaacttgacaagcactgtggaacattttcttatatggcgtgatttatatgcatattgtcttaacatacttgatatcatgtcattctagtttagcagtgactgtccaccattaccattgtaccagtgactgcgaatgtgttttaccagtttttgttacttttgagtaagccctgggcttgttagtacagtgggttgcttggtccaacacttggaatgtggtggttggtggttatttaatgagtatatatttagtaagtacctccacttgattgccaaggaattcagtcttgttcaaactccacatctccagtctctgatacaaatctgactgttcgaagctgtatgtgcattggtcccttggtgagcaataccttaagtgactcaattgctgtgtttccttggtttctggatttaacagatcaattactagcagtgtttatgcagcgatgcttactctagactctgcagaattcagagtgtgttcttttgaatcagttgacaaaagcagagaccttattctcaatttctccagaagaggataaacatatcattcttaactttccaaagtagtcacaactattgactgtaaatcgacctatcttaggaattatagaggtatgaccagagctactactgtccayggcaaactctccagccaaggctggattccatctgttccccaatattgtcccatttaatggattggcaaattaagacagaaagtggtaatttgcccagggctgcataaaatattgaacttggagctggagccatagtacagatctcagtcacacatccttagagaatgaaagttcgtgtttaatatcactatgtagaattttctttaggtggtaaatttactataatagaaatcagaaaacatgtttagtgccagctgcaaatagttttgagtgttcttgtgccttaaatcctccactggtagagataactgagaatttgatataattccattgtcaaatttttctgttagccttgagttgtttccattcatcttatttctttgggttttgtattgttttgatccttgatgatctgttcatgtttataaatatatggttacatttataaatcagggttaggttaattacactaggtttcctcaaaagttttgtaatactgtttcagcagtaggcctcttccctaattgctagggctcgctgagggccatgcacggttctgtggggctgggcatgctcacaaccaggcagagggtgcgggtgaggaagctggggctgttgtagggatggggcacttggcagtattttagtcctgggtagtggtgcctttgctatttttgttttaatttgtgtttgttggaaaggcccaggtgtagactgtactctgcttctctttctggcccgaaggcttatgcttaggatgacttcctattgagagagctgttcttaagtgctagtgctataggccatcttctaacaaatcacctaggtggccaggtgtgttggttcatgcctgtaatcccagcactttgggaggccaaggtgggagaaycttttgagcccagaaggttgagtctacagtaagctatgtttacactaactacactccagcctgggcaacagagtaagaccctgtctcccccacgygcccccccgcccccccaaaaagaagaaagaaaggaaagaaagaaagaacaaattacttaggtgattatcccagaaactcagttcatatatcttttagatttgcgtttctgcagtactttgtttcgttgggaaggatagttctatttctgtaggaaacctcttctatatctgtcttttgttataattacaccactctattttctccattgattcatttctggtattacttttgcctgttgtcttgtaccattcttctttattctttttttaaaaagttttccatcatcaatgggatttgagaaatgaagggaggtaaatgtgcttggtaagtctaccatcttgaaaacataggtttgctttagtttatttggagtatgttttctgtttaggtaggcctggattttgtttcataacaaaatgagcttctctgatggagtattctaaaaatgtacatatggattccctacttgtcatctgctgtacatagaggacaacaggggaggcagcaaagcaccacagttccatagagagactctgcagccagagtgcttggctttgagtcatggttctgcctttaccagctgcttaaattcggacaatttgtttattctctctgtggctcagctttctcatctgtacagtgggaataatgatagcacttatttcattgatatgttataaggattaaatgaaattgcagtttgaaaagttctagccacgtaataagaactgttggtgtttggtcttgttgttaagatatttacaattcctaagctcagataatttagcatcctggtttatgggaattttttactagaatgacttgaaagccttagctgtccattaaagggctaatgtcaccttgctgaggcacttggggccaattcttatcctaacttttgacttaattggttctgttatgctttttttttaatttttattttctattttttctattttttatttttagaataagaaaactaaaacagacgaatgtgggaatttatttatggaaacaggaatgttgttttttgagtaattcgtcacctactttttttgagtgaattaacatgtttttactgtttctcaaaccagtaaccatttttctctgttggattcacattagcaatttccttctaaataatgaaacttttttgaagaaaaaagtctaaaccatagttttccagttgatgtgaaaattcctcagattttcattggtgggagcagtacctaaactactggttcaaaagagtagagatagagtggcaagaatgagcaaggcagtctcattcagcacagcacattggtggaaaagatttttaagttctttttcattgctagagactgctttagaatatcagagaaagagttgccagtcttaagggagacaaacctgtgagcagattcttacagataatgctgagagaawgtaccagttgccccttggtagctcagaagggagcaacagttgccattaayttgttttctaatattaaggaaaaacccaaccttcccagccttgtatcaatttggggtgggcaagcaygtcttccaaaatgaaaatagaatccatactggatttcgatatgcctcccacacattttatgtgaccagtattcctgtaagagtagatgaaagactcctagccctattttcatgcttgacctcgttggacagtttcttattctaatgtagacttttttgactgaccatccgtgttgtatgaggccgtcaggctgccagtttagagactgcatcaggcacactttttgagcattaagacttccactctaaatcagacacattcaggttctttgaggctgagccaaccactgcatttattgagactctagatatgaagttgctgcaacattttaaaaaattagtcatgactcaagggactcagctgatttatgcattttgttgggcagagtggcatatgcttttggaatgagaagttgaatgcagactctgctgtggggtaaatttttcagttgataacaaggaagtcagcagacgcagcattgaagctgccatatcaggctgctgtgtgagctattggttggtgattggtttaaatccttaacattttaattttttctgttaaatgtcaggaacaactaaactataaacaaaatagtttaaaagaaaaatgacttctggggaacaaaggacctaattgtgaattcttaatccttatgcccagaaaagcaactgtattttgcaaaatccaatattcaggctttttcttaaacacagattgacttctgtgattgcagtttattcctttatggtcactgaagctgccaatgtatatagatagaatctctctgaaatggcaagagaaaacatatcactgggttgagtgagtttaagtgtaaaaggaacaagagccaaagaaagattggtttggctttgcaatgtaagagggtgatttagatttagtaagatacaatcctccaattgtcaatttgacatatatctgtggagaaccctgaaaatcaaattgccatgcattttgtttataactactacatttacaaaatgttggattttaataaacatagatggaataggataggttaaagcctcttgaccgttcatagggctccagttagtgtcactttcttcatgaagcaggctaagccttcactttttgctcagagcattattaactttctctaaagcattgctgtagtcctggtgcaagctacatttcctctacccctcaaatcactgacaaaatagtttttaaaatttcacattttccctgaaacttttctaaatgagcgaatgatctacttcttcttacctgcttagtttggatgtagaaatacagaatttttttttaaactttagtcacaatatatgtttaagattcttgttcctttctcctcccttgaccaccaaggccatcacagaacaaacctaattcactgttcttttatgatttggtttrttctttcaatttgctattggtttgtatcatatatgtatgttggtgtttgtgtatctgtcttataagttacgaaaatatagcggtcagatctttaaaggtttttgtgtaactctatgcttaaaaataactcaataaaagcattttcattgtgggcttgtgaaatacttcagttctgagaaattatccagtaattctggagccctcaaataatggaggattatctagcgtccacatgtggaatgtggttttccaaagagagcttatgtcatcagtctggattaatttaatttcaccatttcatatttttggcatgtagaatttccaattattaattcaaaaaatatgggtgtaaggagcatygacattaacaatttttgaagtaacacatttgcatacatgatggcatcttaactgtgtaaatacatcatttttaatatagaaagttattttagtacatttggttccacatagttaagatctgctaacgtgagtataatgtgtcctgtcatgcattgaatattgtgttttttttttaataggtaaaaaatccattccaggtttacattaactaaataaaagccaacccacaaggacgtactttttccttcatgcgttgagaaggtcatagatttttcctcatatttgtttcttggcttttcagcactattttaaaaaggaagttctgtactttggtgctataatataggagggcattttaaggaaaattgttcttaagctttatttctttttaaaaaaattgaaaatatatttgtgatgttttaagacctttcatgaatatgtatttttaatttaaaagcaattctaatcttttcttattttttttttttwaatatccaacttctccttagtcctactcttagaattagttgccggcccttttctgtgctcatacaagcatatgttatgcttttatttacagccatagataatggataaatactttttaatgtttatacaaatgggatatactttacctgtcttgttctgcaccttgtttctcctctgagcacattctatcaacttcatttctttttaatggctggataatcttccatcatatcaatgtactataatttatttgcttagattgttatgaatgtttagatttttaccaaacttttgctaaactatgtctgttgcaagaaatgtccttgtacctttatacaaataggtatttttagaactagaattgatcattccataggtgtaaacatctaaatgtgtgataatttgttgaattctcttcataaaaggattttttacaaacttagcatcctaccaagagaaaggttcctgtttacccacatttgatatgatttttggaggcattatgtcttcacaagattcttgttgcatttgtgaatcatttaggcctgcactgaaattcttcaggagatgtataaaatttgcaatataaattatagtcttgtgggttccaatgtgagataaatttgttggatggaatagaagaatcaagttgctttgttttattttctgaatttggccagactattaacctcaagctccacatcagcctctgattattctagaagctgttttggtctcccaataggttttctcctagcatctttctttgggcttttaggtgaatgtgagaataggagtggaaagtttctctggaagactctgctcttttccagtctgtgccatgtatgataacataaccaaacaccttagtttttaatcattggtactttggtggaagaggatctataccaaacaggagcctatttgaaaaatttgagttatatgtaatagtcatttacaaggggacatcatgtaccactcctttttcttttctgttaaaaaatcatttggcgtgttctttcatcttatagaattgtagctagccgcccctcctttgcgcagcttagatcagccctctccaggcagtactttgaagtctgtgaaatacatagataatttaggctgacatacttgccaggcccatttaaaaagcagaattgtttgatggcatgacacaagcagtctgttaactgagttataaaagaactgaggcatttccaacaaaccccagctttggcatgacttttaaatagttcttattttgtggtgtgtagtcagtggactttctatgatgtagtatggtctcttagtgcaacatactaggaaatgggaatgttactatacccagcaatttcaaggaggaatgggtggaaataagtttgtggttattttctcctttgattcagttcagctacagtagagggagtatcttagcaagatataaggaagtaagtccggagagagcaataacccttgggaaacgtaaaaagccagccaatcagtgtggagttgggagggggcgcctaaataatgaggttaatctaattattacggtgggcttaatacaaagccctagaaatcaggcttttcttaaaaatattgcaaaattaaatctaaaaatatatagttcattattgtatgtgtatgctataaacatcctgaaacctttcttgaatgaaatagagtataaattttttaagttctcttttgtttttgtttttgttttgaggcagggtctcactctgtcactcaggcatgatcatagctcactgcaatctcgaactcctgtgctcaagggatcctcccacttcagcctcccaaggagctgggactacaggcatatgacaccaccagtgtgcctggctaatctttacatttttttaaataatttatttgtagagatggagtctcactttgttgcccaggctggtctgaaactcctgggctcaagtgatccttctgcctcggccttctaaagtactgggattacaggcctgagccactgtgcctggcctacattctatattttttaattgtgattttattattctcatcacaagtttacttaatttgttttttaaaattctaaatttttaatccagatattgctgctcatatcagaaatataaaagctttacataatttagaaatcaggaaaaaagtacttggaatttggcaaagattaccaaaataaagcttccagtttagttgctaagctctctcttaatggtagtattactgttgggctcttctctcacagcaaaaatggaactccaaagttgtttcaatacgtgcctgtgtgttaaagtggaagcatgtgacatccacaccaacaaatgggtaccacatggcaaaaatacccagaagcaagtcagtagtatgaaagggataatttagttctgtttcgtttcatttttttcccttcagagggagagaatgaaagaaagggagacacagagagagagagagagagagagagagagagagaaagtttgtattcctacagtggaatcaggctcttcaatttagtttatgaatatggttggtttagtgaggttttgtgcctgtctgattttaatgtcgacttatagcttttagataccaaatttctttatctttaaaaatggaaatgatggaggtgacagtggtatgctcctcgcttatctcagctggcatagatatggcccactgtctgctcctggccctgtttaatagctatttgtgtgtgcttatcttctttttaggctgtaggcatttactcagaaaataattattgaggtctggcatggtggctcatgcctgtagccttagcactttgggaggctgaggcaggcagattgcctgagcccaggagttcgagaccagcctgggcaacatggtaaaaccctgtctctactgaaaatacaaaaaaaaaaaaaaaaaaaaaattcagtgggcatggtgatgtgtgcttgtactcccagctactcaggaggctgagttgggaggatcgcctgagcctgggaagtcaaggctgcaatgagccaagatcatgctgctgcactccagcctgggctactggagtgagaccctgtctcaaagaaacaaagaagaattactgacggtttaggttgtagatgtcttgtactggctttgacctctatcatcaaagaatatctagaatagagcgccttgaatatagtgtgtactgagaaatgttaaatggcaagggcagttatttctttgtatctgttcagtccgaagttcaactcagaatatactttccataagtaacaatactttcatggctagaaacttcactgactcttaaaaataatttatttcagttgcttaaatggaattcttaagtttcacaaaaacttttgaaaataaaacatctgtttatcatataaaaaacatttcaacaatgcatatctttttttttttttttttaagacggagtctcgctctgttgctcaggctggagtgcagtggcgtgatctcggttcactgcaaactctgcctcccgggttcacgccattctcctgcctcagcctcctgagtagctgggactacaggtgcctgccaccatgcctggccaattttttttgtatttttagtagagacggagtttcaccatgttagccaggatggtctcgatctcctgaccttgtgatccgcctgccttggcctcccaaagtgcggggattacaggcgtgagccaccgcgcctggcctcaacaatgcacatctttgaccatattaagtggatatatagccatacataagcttgcccttatattgtttgttttcatttaaatgtttttgggtgtaccctatagtggaaagagcatgggttttacagtcagttaattctggtcaaatcctggttttgaccagataattaatcgtattagcaatataattaattaatatatataattaatattatatttattattattatctaatatatataataatatataatataatattaattatattaataataatataattaatcgtattagctccagccaattagtttgactttggccaagttacttaatcattctgagctttgtttctccatctgttttataggaataataatacttactttgcatggttgtcttgagaattaaataagattatagataaattgacagatagttaatacctagcatgtgccagataatcgataccacagattaacagttaatgttagttttcgttttcctccatttatgtgcttacttttatattattttaatattagagtacagtgtcttaaaatattcatgttttacttggatatctagaagataaaaggcattctgtattttatgtcaactattgctagtagcttttacctatgggagtaaatccgtggaagaagttttgctcaatgtatgctaacatgaagcagctttctgttttcagtttattccctcagatattagtttgttttttctctttttaatttggaaagcaaaatgaggccagcattcgttctatgtttgtgttagagcagcggtctccagaatgtattgaagggccacaagtgttataaagttaaatgatgactgctgactttcagtcttcctctctatacttaggtacttctttttaaaaatgagttttgttacaggtttagatgatttttttttttacaaaataaaaatttaataaattaattttcagaaatcaatagcttttatagatacaatatgtctaatttcaagctctaagggaagaaaagacccatgttataatagcacaaaacataaatgataacatacttagkaataaacacaagaaatattatttgtagaaaatgttaaartgctaatgagagatgaaataagacccaaacaaatgggaagatacaccacgttctttcatagaaatacgcagcatcataaagatatcacttctctcattaatgggtgcagcacaccaacatggcacacgtatacatatgtaacaaacctgcacgttgtgcacatgtaccctaaaacttaaagtataataataataaaattaaaaaaaaaagaagtagaattactggataatatggtataaaaaaaaaaagaaaagccacctttatcatattctcaattcttgtaagtatttagatctgtttctgaactgttctgttccactcatctgtatgactactcacaaattattgccactctgttttaattgctgtagatgtataaattttaatatctagtagtctccctctatcactattgtttttttatatgaactttagaatccatttatgtaatttttttcaattctattggtattttttttaagatcacattagatttgtaaattgagagaggtttagatgattataattatcactacaagatcaaaaagttccatcaccctaaaaacgccttattttagttgcatttttttcccatacctaatcccagacaactactatctgttctctgttcccataagtttggccttttccagaatgtcatataaatggactcatactgtctgtagccttttgagagccttctttctttcagcgtaatgcctttgagagtcatccaggttgtcaagtctatctacagtttgttcctttttgttgctgagtggtatcctactgtatggatgtaccagtttgttatcagtgttcatttggactgttggaattcttttttaaaatattgcctttagctgggcacagtggctcacaccttaattccagcactttgggaggctgaggcaggaggatcacttgagcccagagtttgagaccagcctgggcaacagagtgagactttgtctctgcaaaaaattaaaaaattagctgagtgtggtggcgtgtgcctatggtcccagctaccctggaggctaaggtgggaggattgcttgagcccaggaagttgaggctgcagtgcacttttatattatttgtggttgcgccagggtgggcaacagagcgagaccctatctcaaaaaataaagtgaaataaaatgaaatattgagtttgtaagtttgttttagttttcaaagtagaataatatatactaatcatggaaaaactgggaagtaaataaaagttggaaaaaattatccttgcccaaacataacctctgttaacatttaggtatatttcttttcagtctttttctctgttcatgggkttttttggcttatggctatatttatgtagttgtgattctgtttttcatctttttattattattattattattattgtagagatggggtattgctatgttgcccaggttggtctcaaactcttgccttggccttccaaagcgctgggattacaggcatgagctgttttgcctggccctattcttcatatactttaaaaaattattattattgtggtaaaaaacatatgagagctacccttttagtaaacttttagaggtgcacagttacagtagtgttaactatgtgcacgttgttgtgggtctctagaacttttcatcttgcatggctaaacttttatactcattcaatatcaattccccattccctttccctccaacccctggcagctacctttctactttctgtttctccgagtttcatgacttagatacttcatataaatggaatcatgcagtatttgtcttactgtgagtggcttatttaatttagcataatgtcctcaagattcacccatgtggtagcatagcttcataaactttagtattctgctttttttatgctttgtgaagaatgtattcaacataggtagtttttaaaatattacaaagtacacactagtgtaaccatcagccacattaagaatggaacattgccagtatcctaagcttcttatatgacccctccccatcacagattcttcattttaacctagggtaattgttagcctaactttggtcatagtcattaccttacttgcttcatagttttccaatctatgtttgttctttaaacaatgtaatttagttttgcctctttttgaaccttgtggtctctttttaattttcatttactatgataagtatttgctgttgctgtgttatgataaaccatcataaagatgctttctaatagccgcttagtatcctgatgagtgattgcactgtactttatgtagccatccctaatataggttgtttataattttactattggaaataatgttgtagtaaatgtctttctacataaagcctttttgaatttaggattatttcctttgggtagtattaatattatgaataagagagtatgaagctttaaggctctgatatattggtaaattgtttacaaagaattttaccaacttatacctcagtgaagccttattttccctggtcagcattgagggtttttcactctttcccccaaataaaacaccttagggaatttgatgagctgaaaaaagactattttatcttattttgcatttgtgaggttgaatccttctctgaatgtttaatatttggttttcttttttgttgactttttctaagtttgtactggggtaaatcagtttcttaagcaatggttaatacagcgttgtgaccagttcctttatttttctagatgtaggtgcaaaaaactacagacatctctgtgctgtttattacaacaagaatcctgggtttgagatcattcatgggctgctggacagaattatgcagttgctcgatgtgcctcctggtgaagacaaggggggatatgtgatcaaagcatcagaaggtaagacagatgagccgaatccagagttagtgacagtgtcaggaagaggctacaccttgtttttgatgaagttggtagttttgatttgggattttagaaagaaagggagagttttatttcaattaattgtcaatattatccagaaaatatcccctttccctccagcattttaagaaaacacttttcagaactctcgtaagtgctgcacagtatactttcgttccaactgagctgtaacccctagttactggcacctttaagccatcaaaatggctaaatcactggcacctttaagccatcagcacatggtgaacccagaagttttaactggaagctggtaagacctaaagtgatggtttgcactcaaaagctgcctgtctgatggctttaagacaaaagaaaaaagaaaacaaaaacaaaaacctcagaagttattctgaaagatttcacacatgttaatcaagtcataaagtttgcagagcaagggtgggaatcctcgtgtataaaatcccaagtacagtaaaatctttgttggagagtttaagctaggctaactaaatggtatatatgtgctcctaatattctattaatagtttctcattatccaaggaactctgaaatttttgcttttcatatttctgcagcttcaatctaaatttattttgttagatgaaaggtccagaaacaacttgagagaaatatttcaccacttattcctaccgtttacctcactgtgctttataactctatttggcatcttaaatttctaacagaacatttacttttaaagtgttatttaacagttagtaatgagatttggtggggtaatatttttttttcttttatttattagtcctcagggattgtttttgttggtggttgtttaatttttgtttttgttttcattttgagactcctttgaaaataaccctgaaatctatgggtttttttagattgaagatgtgtgtggttctttttttttttttaaataaatgagagattaaataagcaggaagttgtttcttacccactttccatgagaaataataaaatgcagacattgttatgcttgtggagttctagatgttagaactggattttggagttcatccagcycacgagcccggttttatgagtgagggaactggggttaggcaagttaaagaagccggagccgggtcatgcatgttgaccccacagcttctgcctcccagtatccttgccagtgttgtctgcctttttagtgcctgtatatactcattcaccagtttaccatcctagaattttgctttaagaccaggtcatccaggcttatggcaacctgtaagctgatgtgaagcatttcttttccttccatgcacaatcttctcagaaatcttatttcttaaacagtttagctagataaaaatttgatgcagattgcgtcctgaacgtgaggtccaatttctttcatacttgaaaggttgcaaagagctgaaatggtaaatgagagcatagcttgtggtggatgtgatgctttgtgtaacctttagatggataatatttctgtaaactggtatcttaatattgtgacttctcctgcttcaatcagttccttagatatttatttatcagaagagtgtgagttcctagttataaggcagacttcagaaaagacaatgataagtaggacacaggtgctgctgtcaagcaaccagccagggaaaagaccaccacataccgaccctcaaaccaagatgttaaaatgattgtcttgatgtttccgaagaggaagaaagtgcaacttcttcagggcatccagaaaaacaatagggagtttctgcaaagtgagatgggcctttggaagaataggtggagacaggggaagcaaggcaaactaatgataggaaacacaggctgtatgtttggaaacacagcagacagtgtagtgtggtttggctatagggtgaggaaggagcttgaaactatatttggagtcttgaatgctagggaaaggctgcagctagttaggagaaaagcattaaagcttcttttttttcttcttttaaagcaggtaggtgatattagatctgtactttaaaaggattaatttagcagcaatatgtaggttgggtgggatggagagcagaggtgaagagaatggtgggaagggattttagcacattgtagaggartgataatgaggacttggcctggatcgtgctcataggatccaaggaaaggactgatttaagaaaccttaagaagatagaagccacagcattcatcatttggaaaattttgtgatagtgccacttggaactttttgtgatacagctaatttgtgttgatcttctgcttaaaagtcaggtttttctaattctaaacttatgatgttataatttgaattccatataatttagcacccatacagaatataatacttagtatctagtttcctaacatgtagatgtctgctgtttttgtttagaattttttttttttaattaggaaatacacattcctaaactgtcactacttctgatgtggttgtaggtctttatgttcaattttgttaggccaggttgttattttggtttttgatttagcatgaatatttacagactcagacttgtggttccttttgaatctacattggctgtcatagtagaacattgtaatcttttgaagtttttccatgtatgaaatgtccaagatttatgaacatgaaaagctttttacacatgggcagcctgaatcagtatgtatttcagtatatctaacgggctttctttggaaaagggcaggagatttactttcaccccctatcaccatcattggccgcattagtctcttggagtcctgggcacacatctagctctgagtgctttttttctcagggtgctttctgcaagaaccatcaagccacagagaattggtatcattacaaataatggttcctcatttctcatagggatttctgttttgattatctaatggcaagtatgattatccttttttgtttatggttgaagaaaacaatgtataaagaagtggcttgtcaaaataagtcagtaataaagttggtattaagtttttcatctaatatatatgtatgtgtttgtgtgtgtgtatataaaatacacacacacgtacacacatacataccacaactaaggaacaaaattgtttttcagactcctaagcaaatcagtaaacacaggaattttgttactggggcatgtttagctgcatcatttcctccagtttattgttattttacatacagctttttcaactaagaaaaggtcttcagagtattaaaaagtagagtggaagcagattaagaactactgttccctgccattcttgattactgagttgtctgatattactctggcatatggcttactttttaataattaaaaatctctagtggctttgcagttataattgagctaagtctgttctccagagattcctgcatatgtcagttacgtcggcacttatacctatttcttcctgtccttttaatgtacactactaagctttcttttgtactgctttgtttggtggtagggatgaatggaacagaactcgattcacctttgagaaacctggctccgtgcgttataagaaatctggaaattcatctgattgatcttcgcattaacctatggagttttgttgacattggagcgtaaccttgcttgttatgcagggggcagtcctctgcagcatgtggagtatctgcaaaagcacccagaaagcccgtagttgtagctagagtgaaaagccgtggtcccctggtcttacatatttcttatttgctgagcatccttgcagttaacaacttgagatagaatgtcaagttgatgacagaataagatcaatgttgagtgggaaaaaaagaagaacctttaactttttagcagactgcagagcattttaagagtttcaaaagggttcaactccaaatattttagtggctttggatcagattattatggcatatatatatatatatgctttttctttttttcaggcttcttccccttcattttttgtggtttgttgcaaacttaattatgtatgttaagaggcatctatccttttcaaaaaccacttctgggcaaggaaaattctccacatttttgtatttggaacagttatgtggttgccgggcagatcagtggcaaaaattatttcttgtagaatgtatgggctttgtgtgtgattggctgcgttgacttgagcctgtgattttttttcccctttagcttgttacctatttcagttttgattatttacagttctacagaaaacttgaatttaacttgtgacaagatccctgttggagagacaaaaggtttagaactttagttttgacaattctagttttcatgctgctcagaatacattttgtgaaatgaaaaataaccttgtaagtaatatgcacatttaatcctgtaccatctgtatacacagtgggtagtaccttctgctacagtaatacctaatgacctggagttcatgacctttttcccctttcaggacacctgtgaaagatttcagatgctaaaaaatatgggtgaaattgtgatgtttccctggtcatcacactggtttttagtgtaacatgagcttggaaatatatgagaaaaatatctattgaacaacttgttgaagtaaaagtgttcaatttatggtttgatttatacaaaacattctggactataataaagggagatctttctagcatgcccacatttagttaccatcaacaaataaattgtgaagacaacaggttgaaaaaaattggaagtttttaagcttctgacctttggttagtctgtatggaaacagttttgattcctctggatgtctgcttttttgtgtttgaggcaagctttcaaatactatcatttttcttagcttctttgaaggaattaaaagacaaagcaatattaaacaaataagcagtgwttcctacacagttggaatagtggtataacacaggcactgtttttatagaagcttcagcaatcatcacatgagtcacttagccctgccttgtttttactgctcttgcctcactctcttgtatgcacaaggcaaagttctctccactcatgttcacttaactctttttgaggggtaggtattttgatgttttcgtgatactttagtacttgtagcaaattggaataaagtcccaagatgaatggcttggtcagcttggtattccctctgatagatattgtagtaatagtgtttcttaacctttttaaaattaatctctccactaagggccttttttagatattttctttttccttaattgctccttcatgaaattttaataccacagattcactatatatatactgtatatatgtattattatgtactgtacgtatagctgtgctgtatacataaaaatagtaagtgtaaagcttacttttaaaaatttcgatgcagggttatcaataactaagcaaaatttttaagttaaatttaaaaatgattaacatttcactttatatctgctgggtaactcttaatgttatttatttacttacataaactgtagtgtatcaaattatatttgccaatcagcaatgtatacatatagtaatagtaataaaaaattataaaaatcattcaaaacttattttagcaaaagtaaaacagttgttattttttgagacagggtcttgctgtgttgcccaggctagagtgtagtggcatgatcatggctcactgtgattctcccgcttcagctacccaagtagctgggactacagggcatgccaccatgctcagctctttttttttttttttttttttttttttgtagaggcgggtttttgccttgtcacccaggctggtcttaagctcccggtatcaaacaatccacctgccttggcctcccgaagtgttgagattataggtgtgagccaccacgcccagctaaaataatttttagtgaattaacttttaacttttccttgatataagaaaataacttttatctagttgatagatattgtcagcatttttttcttttgagtactttttgttgttgttgagacagggtctcactctgtcacccagactggagtgcagtagcgccatcaccacttgacctcccaggctcaagtgatcctctcacctcagccatcagtgtagccgggactacaggcacgtaccaccatgcctggctaatttttgttttgttttgttttgttttctttagagacagtttctctgtgttgcttaggctgatcttgaactcctggcctcaagtgatcttcctgccttggcctcaggtgtgagccaccacgcctagtcttttgagtacttaccataactaatgatgtgttaaataaccttttgaattaaatagtaamatataaactatttttgtttaattatcagagcctaagctacacacaaaagctctaaagatcagccacaaggcagtcaaatggcctcccattcaatgtgacttggagatctagcaatggatagagtcttccaatcacagccatctgctgccatagttttatagcagtgttcttgcacacatttactgtatcttccatattaatgttgcttgtgggatacccaagaaaacacaatgagaggaattaaatactgaggagtaaggtttttgtcaagtagggctcagctttggagcaatgcaaaccattttaatatggaagatttttttcatacccccctgccccgccccttttcctctaagaaccagttccgcccctgtggaaaatgcgtgctataacataatgaatactttggaattatagtagtctcctcttatctgcagggtatacattccaagacccccgatggatgcttgaaactgcaaatagtattgaacaytatatatatgatacgtttttagtctgttaaccaagacagctactaagtgactaacgggcaggtagtgtatacactgtggacacaccggacgaaaggaagattcatgtcctggggaggtcagagagggacaactctactcagtttttcatcatgctactcagaagagtgcacaagttaaaacttaggaatgatttatttccctaatttcccacttaatattttcagacctcagttaaccacggaaagtgaaaaactgcatataaatggagactactgtatttacatccagctgtatatactgggcaaaaaaagaggaagatattttcatttacctcatggtcctctcttctcttctgcatccatactagatcttggcctccactattctatagaaaacgatgttgtggcccaaatacaaagaattataaaagaagttcatttttagcttgtgatctttcaagggcccgggtcctgaaagttcaaaggatttttaggatgattctgattactcagtttttatcttatacatgtgagacagatttactttcctcaggtatcagcagttttatrcattggccaaaatggggcagcactcggttttggcacatttgtgtgctgcagcatattggttaagagtcactgtcctgggaattcctagaacatgatgtattctgataaactgtcaacgctctaagtggccagttccagctctactccagaaggattaagagaatggatggatgggtggctggaaagaaggaaaacacattgaataaatccctaggtagggatggtaatgtggagtgatctcctgagcacatgaccacaaaaaataaaggcctttttcccctggagcacttactatggctttaacaagagagagaaataaaacttccatcttgtttaaaccattgccatttgggagtttctttcttaaagctgaaactaatcctcacttacaaatcatattttaattcctacttgccggaaccccttggcagtattaagatgccatccagctctaaactgaatcaagtttcaagctaacttctaagttattttaaaattcttagtgaaattgttcattctcattcattgcctgtccccactataaccctttattttgaacacatttagatggctcattcttgtatctacatgtaaagtgttttcctggacacactttaaattattgcctttaaggttattactggtaaccattggcatttatttccagtttgcatttgcatttgctaatgaaggcattggccactcccaggaaatatgttttagaggactggcttttaaaatgtcttcttggctcccactgataagccacttaaaaaaaaattgtatatatgcttccaagtaagatttgaacaaagggttacctgtcttacaaaagtttgaagcccacccttgtagaaaatgaagaagtttatgaatgctacagcaaagatgattaggcatttttattcttctctttctaccttactttcacttgcttttcttttgtgtgctgtgattatgagtactaagattgtagcaataccaactcatcatatcacatagaggtggtacaytgtgagtgtgaaaagtgattgatatctgtctagctattcataaatcaattaaatttcaggctttgggtgttctctagttccggttgcacaggaactctaggtgcttgaaggtttttgacatttctggatactggaaaattaagagtaattatttttcattaacaccgacttaaaaaggaatgtctgccagaacattgatggttcagctcgtatttctttctttttctttctttccttttttttttttttaagagacagggtctcactctgttaccaaggctggagcaccctggcttgatgatcatagctcgctgtagcctccaactcctaggcaaaagtgatcctcccatctcagcctccccaggtagccaggactataggtacacactaccacacccagctaattcttttattttttaagtagatatgtccagtgtccaagcaaatgagtttattgagtttatctatgttccaaaagtcccatctccattgatgtgttcacatttagttatttccttttctatcaaggtgtaggactagggcaataatttttttaaactttgttattataaaaaattaaaaacatacataaaaataaagagactagcataataagtcccgatgtccccattgtctaatttcaacaatgatcagtacagagtcaattttgtttcattggtaccctcacccactttccacactactaaattattttgaagcaaatctaagacattgcattattcccagttgtaaatacaacaagatgcatctctacaatacaggaactcctcttttaaaaagcataactgcaatatcatcacacaaaattaacaataatttctgaatatcaacaagtatccaagtatccagtcaatgtccccctttcccaattgtctttttttttttttttttggcctaaaagggtaggatatcttttttttttttttaatactgttaagttctagggtacatatgcacaatgtgcaggtttgttacatatgtatacatgtgccatgttggtgtgctgcaaccattaacttgtcatttacattaggttatttctcctaatgctttccctcccccttcccccaccccatgacaggccccggtatgtgatgttccacttcctgtgtccarctgttctcattgtacaattcctacctatgagtgagaacatgcggtgtttggttttttgtccttgcaatagtttgctgagaatgatggtttccagtttcatccatgtccctacaaaggacatgaactcgtccttttttatggctgcatagtattccgtggtgtatatgtgccacattttcttaatccagtctatcattgatggacatttgggttggttccaagtctttgctattgtgaatagtgccgcaataaacatacgtgtgcatgtgtctttatagcagcatgatttataatcctttgggtatatacccagtaatgggattgctgggtcaaatggtatttctagttctagatccctcaggaatcgccacactgtcttccacaatggttgaactagtttacagtcccactaacagggtgaaagtgttcctatttctccacatcctctccagcacctgttgtttcctgactttttaatgattgccattctaactggtgtgagatggtatctcattgtggttttgatttgcatttctctgatggccagtgatgatgagcatttttttcatgtgtctgttggctgcataaatgtcttcttttgagaagtacatgttgatatccttcgcctactttttgatggggttgtttgattttttcttgtaaatttgtttaagttctttgtagattctggatattagccctttgtcagatgggtagattgcaaaaattttctcccattctgtaggttgcctgttcactctgatggtagtttcttttgctgtgcagaagctctttagtttaattagataccatttgtctattttggcttttgttgccattgcttttggtgttttagtcatgaagtccttgcccatgcctatgtcctgaatggtattgcctaggttttattctaggatttttatggttttaggtctaacatttaagtctttaatccatcttgaattaatttttgtataaggtgtaaggaagggatccagtttcagctttctacatatggctagccagttttcccagcgccatttgttaaatagggaatcctttccccattttttgtttttgtcaggtttgtcaaagatcagatggttgtagatgtgtggtattatttctgagggctctgttctgttccattggtctatatctctgttttggtaacagtaccatgctgttttggttactgtagccttgtagtatagtttgaagtttgaggtagcatgatgcctctagctttgttctttttgcttaggattgtcttggcaaggcaggctcttttttggtgccatatgaactttaaagtagttttttccaaatccgtgaagaaagtcmttggtagcttgatggggatggcattgaatctataaattaccttgggcagtatggccattttcacgatattgattcttcctatccatgagcatggaatattcttccatttgtttgtgtcctcttttatttccttgaacagtggtttgtagttctccttgaagaagtttttcacatcccttgtaagttggattcctaggtattttattttctttgtagcaattgtgaatgggagttcactcacgatctggctctccgtttgtctgttaatggtgtacaggaatgcttgtgatttttgcacattgattttatatcctgagactttgctgaagttgcttatcagcttaaggaggttttgggctgagacgatggggttttctaaatatacaatcatgtcatctgcaaacagggacaatttgacttcagttttcctaattgaataccctttatttctttctcctgcctaattgccctggccagaacttccaacactatgttgaataggagtggtgagagagggcatccctgtcttgtgccagttttcaaagggaatgcttccagtttttgcctattcagtatgatattggctgtgagtttgtcataaatagctcttattattttgagatatgttccatcaatacctagtttattgagagtttttagcatgaagcgctgttaaattttgtcaaaggccttttctgcatctattgagataatcatgtggtttttgtctttggttctgtttatatgctggattacgtttattgatttgcatatgttgaaccagccttgcatcccagggatgaagccaacttgatcatggtggataagctttttgatatgctgctggattcgttttgccagtattttattgaggatttttgcatcgatgttcatcagggatattggtctaaaattctcttttttkttgttgtgtctctgccaggctttggtatcaggatgatgctggccccataaaatgagttagggaggatttcctctttttatattgattggaatagtttcagcaggaatggtaccagcacctctttgtacctctgatagaatttggctgtgaatccatctggtcctggactttttttggttggtaggctcttaattattgcctcaatttcagagcctgttatggatctattcagggattcaaattcttcctggtttagtcttgggagggtgtatgtgtcaaggaatttatccatttcttctagattttctagtttattttcatagaggtgtttatagtattctctgatggtagtttgtatttctgtgggatcggtggtgatatcccctttatcatttttttagtgcgtctatttgattcttctctcttttcttctttattagtctgctagtggtctatcaattttgttgatcttttcaaaaaaccagctcctggattcattgattttttgaagggttttttgtgtctctagctccttcagttctgctctgatcttagttatttcttgccttctgctagcttttgaatgtgtttgctcttgcttctctagttcttttaattgtgatgttaggatgttgattttagatctttcctgctttctcttgtgggcattcagttctataaatttccctctacacactgctttaaatgtgtcccagagattctggtatgttgtgtctttgttctcattggtttcaaagaacatctttattaatgacttcatttcgttaggtacccagtagtcattcaggagcacgttgtccagtttccatgtagttgtgtggttttgagtaagtttcttaatactgagttctaatttgattacactgtggtctgagagacagtttgctataatttctgttcttttacatttgctgaggagtgctttacttccaactatgtggtcagttttggaataagtgcgatgtggtgctgagaagaatgtatattctgttgatttgggatggagagttctgcagatgtctattaggtccacttggtgcagagctgagttcaagtcctggatatccttgttaactttctgtctcattgatcygtctaatgttgacagtgggttgttaaagcctcccattattattgtgtgggagtctaagtctctttgtaggtctctaaggacttgctttatgaatctgggtgctcctgtattgggtgcatatatatttaggatagttagctcttcttgttgaattgatccctttaccattatataatggccttctttgtctcttttgatcttttggtttaaagtctgttttatcagagactaggattgcaaaacctgcttttttttgttttccatttgcttggtagatcttcctccatccctttattttgagcctgtgtgtatctctgcatgtgagatgagtctcctgaatacagcacactgatgggtcttgattctatccaatttgccagtctgtgtcttttaattggggcatttagtccgtttacatttaaggttaatattattatgtgtgaatttgatcctgtcattatgatgtcagctggttattttgctcattagttgatgcagtttattcctaacatcaatggtctttacaatttggtatgtttttgcagtggctggtaccggttgttcctttccatgtttagtgcttccttcaggagctcttgtaaggtaggcctggtggtgacaaaatctctcagcatttgcttgtctgtaaaggattttatttctccttcacttatggagcttagtttggctggatatgaaattctgggtagaaaattcttttctttaagaatgttgaatatttgcccccactctcttctggtttgtagagtttctcctgagagatccgctgttagtctgatggggttccctttgtgggtaactggacctttctggctgcccttaacatttttttccttcatttcacccttggtgaatctgacaattatatgtcttggagttgctcttcttgaggagtacctttgtggggttctctgtatttcctgaattgaatggtggcctgccttgctaggttggggaagttctcctggataatatcctgtagagtgttttccaasttggttccattctccccgtcactttcaggtacaccaatcaaacgtagatttggtcttttcacatagtcccatatttcttggaggctttgttcatttctttttactcttttttctctaaacttctcttctggcttcatttcattcatttgatcttcagtcacctttcttccmcttgatccaatcagctactgaagcttgtgcatgcgtcacatagttctcttgccatggttttcagctccatcaggtcatttaaggtcttctctatgctgtttattctacttagccattctaatcttttttcaaggtttttagcttctttgcgatgtgttcgagcatcctcctttagctcagagaagtttgttattaccgatcttctgaagcctacttctgtcaacttgtcaaagtcattctctgttcagccttgttccattgctggcgaagagctgcattcctttggaagagaagaggtgctctgatttttagaattttcagcttttctgctctggtttctccccatctttgtggttttatctaattttggtctttgatgatggtgacctacagatgaggttttggtgtggatgtcctttttgttgatgttgatgctattcctttctgttcgttagttttccttctaacattcaggaccctcagctgcaggtctgttggagtttgctggaggtccactccagaccctgtttgcctgggtatcaccagcggaggctgcagaacagcaaatattgtagaacggcaaatgttgctgcctgatccttcctctggaagctttgtctcagagggccacccggctgtatraggtgtcagtcggcccctactgggaggtatctcctagttaggttactcgggggtcagggacccacttgaggaggcagtctgtcggttctcagatctcaaactctgtgctgggagaaccactactctcttcaaagctgtcagacagggaagtttaagtctgcagaagtttctgctgccttttgttcagctatgccctgtccccagatgtggagtctacagaggcaggcaggccttgttgagctgaggtgggctccacgcagtttgagcttcccagctgctttgtttacctactcaagcctcagcagtggcggatgcccctcccccarccttgctgcagccttgcagttcgatctgggactgctgtgctagcagtgagcgaggctccgtgggcgtgggaccctctgagccaggcatgggatataatctcctggtgtgctgtttgctaagactgttggaaaagggcagtactagggtgggagtggcctgattttccaggtaccgtctgtcacggcatcccttggctaggaaagggaattccccgaccccttgtgcttactgggtgaggagatgccctgccctgctttgkctcacactccatgggctgcacctagtttccagcaagttccagtgagatgaacctggtacctcagttggaaatgcagaaatcacctgtcttctgcattgctcaygctgggagctgtagactggagctgttcctattcggttatcttggaccccaaattcagggcaataatttttaaaacttttttggggggaattggatggaaactccctttaagcaacttctataactgaagtccccattttgttaattttttattttgaaatagtcaaaatttattttaaaaatgcaagtggtatgcaaaattttttttttctgaactgtttgagagctaatctgatatcgtgttacccctgaatactttggtgtatatttcctataaacaaggacatcattctctataaccataataataatcatcaaaatcagatgaacattgaagtttatgttaaccaccatttaaccctcaggccctatgcaagttttatcaattgtcctttatagctgtattagtccgttctcatgctgctatgaagaaatatccaagactgagtaatttataaagaaaagaggtttaattgactcacagttctgcatggcttgggaggcctcaggaaacttaaaatcatggtgaaaggcatttcatcacagggcggcaggaaagtgagtaaagggggtgagagtgagtaaagggggaaatgcctcttaaaaaaccatcagatcttgtgagaactcccttaatatcacargaacagcatggggataactgcctctatgtctcaattacctcccacccagaccctcccatggggattatgggaactacatttcaagatgagatttgggtagggacacagccaaaccatatcaatagcaaagagtcacttgttttcttcagccatcatgtctcattagtctcctggtgacttctagaatagtcttttcttcactttcatgaccttgacacttgaakattacaggccagttattttgtagcatgttcctcaattttggtttgtctgatgtttcttcactaattaaattcctgttaggcatctttggaggaatggtagagaagtaatgctaacttcccaatgcatgctatgaagtggcacgcaattttcatttatccaataactgataatgttcactgtaatcacttaattaaggttgtagctaccagtcatctgtactgtaaagttattcttttctccattataattaataaatgtcttgtgggggaagagctttgaaattatgtaaatatactgtttctaatcagttttcctatatacttagttatgtcagtatggactcattgctgctgattttagtcagtgtatttagatccattacagtcatttattttgatgctcaaattgtccccagtttggccagcaggagtcccttgaagctggcttcagtttgcttttaacatgttcccctccctgtgtccatgtgttcttgttgttcaactccctcttatgagtgagaacatgcagtgtttggttttctgttcctgtgttagtttatctctttttctttagtgagaatcttggttcctagtgaatttacattattgctctttttttttttttcttttggagacatagtcttgctctgtctgccaggctggagtgcagtggcgtgatctcggctcactgcaacctctgcctcctgagttcaagcaattctcctgcctcagcctcccgagtagctgggattacaggtgcctgccaccacacccgactaattttttgtatttttagtagagatggggtttcgtcatgttggccaggctggtcttgactcctgacctcaagtgatctgccttcctcggcctcccaaagtgctggggttacaggcgtgagccactgcgcccgaatttacattattgcttgtttgctcattctgtttatctatttatctatcatagtttcaaaataaaaatactattatcaacaatatgattattgaaagcagcttaaaatttatccttattactttttgtacttagaatataggctataaataagggacgtagagagaactctggcttccacaccgttccctccctgcctctataggttatgatttttattagttttcagtttatccttctgatgtatgtgtgcacacacctgtgtgtgtgtgttcatattctcttctactctttcagctgaggggctgatactttacacactgttctgtacctttctttgttttacctgacagcctacattggagatgattctgtagcagcatatagagatcttcctcctttcttttgacttctctggggtacttcattttatggagttccacagtgtaatcaactaatttcctgttgattaacattgagttgtttccaatcttttgctattacagattgtgttacagagaatagtcttgtgcatatgttatttggtaatgccactgtatctctgggacagattcctagaagtatgggatcactgggacaaagtaaataaattcatattttcactagacactgccaaacacccctccataggatttctagttccaacgttgtacaaacgctgcagcaacacttgagaggacttatttctccacagccatggtcaccagacttcttgtctttgccagtctttcagatgggaaatggtgtctcactgtagttttaattgaatttcccttgccgtgagcaaatgtaacatatttacatgtttacaaggacatttttatttccttttctgtgatccacctgtcttcttccttatttctttaggtttgtcaatcttctctagttttaggaaccttctatgtagtgtggctgtcaacccttcgtgatatacatatgctgttttttcagtttgtcaactgtcttttgactccaactgctcagaagctaatagcatatctattatggtttatctaggaaattagaaaattgttgaaaaaccacttttttgacatttcctgtatttatttctaacaagcaagattctagaaacctttaataactaaatgcttgctctgatttttaaaaatatgttaatccatagtctgctttgtttaaaaattggaaatgtttcttttactatggacttttggggcagtggggatgcagaaacataacagaacatccattagagatctgtcttctccagtttcattcatctgtcagcacatttcttctctcccatattattccttttttgagagactcctttctgctttttagcttaaattactcttctatatatatattacatcattgcagaaatccaacagattgacattcatttaaagtattcccaataccttcataaaaatgacaggaggcccgttaactttactgaagtctcagttgtggtttttactttgaccaattattttgttttacactggggttgaatagctgtggcctaaccttgggctttttgagaaatgaatgctgtcattcatttgggtgacttgggcaaccttggaaatacatctgagcacctgttggctcatgtgggctgtgggtcaggaatgtgatcttcttgctgagggtcttatgaggccaagtaaaatgtctcaagaccccctggcccttcctgtcttgtagggttttttgtgttatagttgtactttcctctacttctccccttccaagaaccagaaccctcattttcccccttccgagtcactatattttgtcgctcacctttcaggagataaaggtttctagtcactctcataatccctaaagtcccttagtttgtgaattgcattctctgaaaaaaggtttcctcttggaattattttcctaggttgatttggggcatttttttttcctaccagtggaatttttttttaaaggcagtagttgtgttatgcaggagaaagttttttattggtgttgtacaagatgagatcaatataatctatttgtggtttgttgctagtaccactactagaagtgcattgtttaacattttgctatataaggagctatacaatgattcattttctttttacctatgtagcactatttttttttttttgagatgttgtctcactatgttgcccaggctagttttgaacacctggtctcaagccaccttcctgcctcagcctcccaaagcactaggattgcaggtgtacaaccactatgcctcacctttagtactacttttagaaaagggaagtaatccaagaaagactctatgcttacagaagccttatttatactaatgaataataggaaacaacttcaggattaaatacttaaagaataagttgacaagctatgacatataaatatagtggaatgtgattaaaatgtctttagacacgtgaatacaaactcacttgaaaaagcagttcccaagatggaatagacattaattcattatatataatatttattatgtataatattcatgtatataatatttacttayatgtaatgaatatgttgtttgtaaaaccttaggatgcatgctaatcaactgtgatagagtccatwtaacactgagtgttgtggcaagtcgttctgtcactaatccatgttattaaagacttaattccttcacgccagtttcttcatctgtaaaatggcaatgacgatatctgtcccatcaacaccctagagttgtcaggggaggcagttgcaagaatttgtgaaagcattttggaatgtgtaaatctcctcagagtaaacttggagtagatcttaggtctatctgtcttcagaaaagcaacgttggatgagctacagactgggtttcaggaaaacctgagttctgatctcaattctgctcctacctgttttcttaacctgtctagtatctatttttttcatatattaagtgaaggaaatggacaggattgcttccaaggtcatttctagttttaagagtttgcaggagtttaaattcagaaggagtttctgccacaagttctaacatttcagctctttttctttgcctttgtagatggtgtccctgtggtacttgtctgctgaaataattccagctttgtttcaagaatctgaaatttattcatacaagtacctgtgttatatgggatttaaaaaataaatagttctgttttccatggaaggctctaggttttgtcagtattgtgctgtattaatattacagacyctacttgggtatgtcctaaggtggaagatgatgaactgtcagtctttcytattttctcttaagttttgtttgtttatttaattgtaaaccagaagaagtttgtaaacacgaaatggacagcttgaccaaaagcttaaaaacattctgctttaggccttatgtgcctgtgggccacacacagaagagctgattccacggcccttattcaccttttgcttactctccagcctctactattgcttgcctaggrcaagcctcctaatctccttgtgcttcactttttcccatctgtaacttgtctgtcccacaaagggcttggccagggctgcactgggaatgagtgaatagaaggcgaggtgccatgtttttgcaatttcattattctttcatttttcttttctttgtttttgagatggagtctcactctatcacccaggctggagtgcagtggtgagatctcagcttactgcaacctccccctcccgagttcaagcaattctcttgtcttagcctcctgagtagctgggactacaggcgcccaccgtcacgcctggctaattttttttgtattttttagtagagatggggtttcaccgtgttagccaggatggtctcgatctcctgacctcatgatccacctgccttggcctcccaaagtgctgggattacaggcatgagctactgtgcccggccccagctaatttttttgtatttttagtagagatggggtttcaccatgttggccaggatggtctcgatctcctgacctcgtgatcttcccgcgttggcccccaaagtgctgggattacaggcgtgagccaccgtgcccggcctcctttttcttttacatgccctacttgtcacctgaaatcttactctgaaactaaaacagctatcaaaattacatgtttaaagttatgtttgcactaagttagctaaaggtctcaattgaataagttaactaattgtgaaatttggatacaatctcatatagtcgacatttccattctttccttaattagccctaccacagtctctttttaattatttcactgtacttgtggaggaagtaataaattattccttttggtttgagaaataatccccttaaagatttttgtcaggtgaaagactgggtaaagaaccatttgttggcccaagaaggcagagtgatttcttttatttttgaagttgttattctaaatatattctatacatattgaagaaatgtgaaaattttgggggaaaatgatatgggtgtcagacaaatataggatgatggcattatttaagaacagaagttttcaaaacagactgacagtgagggtactttttaacctagaggtaaaaatcctttggttttacacagtttgagagtgatttaaagttacaattagctgggtcatcttgaagctcttccaacattcctgacctcctttaggttttaaaatatgagtgtgcatgtgtgcatgagagacacatagttaagattagrctttaaaatagatctcaacgtttcccgagcattttctatttaatcatttcgtatttgccctaattaactaaatgtttcataagaaatgttaaaaagtaaaaatcacaggaataaatgataaatgataaatttctctacacaaattaagactgggaaattttggagttacgattctaaatatttagtcacaaggagattgtggtaattgttaaaagatggttgtttattgaagacattgctccatcacttagaggactaggtagtgtgggttttgctgatttcttttgaagcataaggtcctacaggatmctgtcyggatttgtaatagtataccctgccctgtgttgatggaatgttgctgcgtcatgggctccctgagttccatgctgtggggttaagtaggtaccagttccctcacatccagttgccttcactttaagagttaatggtgtctgcaggtgtgttgggattagcactgtaaagttgtgtgagggggttttctttcttttgatcttcagaaagggatgaaagatggtcattaaactcaagggattaggtcccctctctttacagactttaggtaccataaatatttcacttcaaatgcaaggtgaagaattgtatacatcaggggaaaataggtgttttatattaccagttggaaattattcagtctccacttacaaattaaatggtctttgcagagacattttctcccaactgagtgtactaggatctgaaaaaatgtttgtgtgttttatatctcaataatgatttttttcctcctcatattcctaaacctttttctttccttttataagctctaatgtcttacctacattgtaccgttttcccccttgagttctctccccttgttgtagtccatcggtgccctcaaaaaactgctggttctaaaacttcgagaacagccacctttaagaatgacaccatgctcacgtgggataagtgtgtgtttcattttatagcctctatatgctgtctcttcctttaaatcaacattgtttagaaaaggaaggtgatgttgatgagctggcagcagagtcctacaattcctgttactgcattctcagaaaactagtgggaaaccaggaggaagttcctcctctgtaggaaattatggttccagtctcattccacactttgccttgtcacccaccctgtcaatttcaccccagtatggaacactggagatgttttattccccttttctgggaggagaagggcttgggtagatgccagcccccgaatcagcctgtgaaatgattattcctcccttcactccatagtacataattactcacttagaacatatttacagtacattcagttggcccagtggcttacaatatctatataattttgtatttttttagttcatccctgaagttggagacttatgtatagttaaaactcatgatgatagtttctgttgtttgctatgacatatgtgacataaggacattccttttccagtgttccctgcccccccctttatattttgttcttatctctttattgcagaaattttgggtggttaagtatcagattgcaagcagtacaatatgtgggttcgagcctcacatcatgtattagtaatgtaaaaaaaaaaggaaaaataaaattgtatgagtagatgactttttacagatgggctaaataaaataccaaatgattgagtcgaatatagccagtggcagggggatgaagatcaggaattaagaccctgattaagaaggtgcttgataacaccttctgatgttttcagattagggggtctgctcagttacctccttaagcttctacttctgatgctccctaaaattataggaatgactctacgtgtaaagcttatccaaactttgggcctataatatttctctttaaaaaaaaaaaaaaagatgaggcaaaaagaaactgtgaaaagtgtttagcaatgagcaagagagggagcttacaaactctttgatggtcaattagccagaaaatgtgctaaagcctgggtgctgtgctggattacaggcccaggaattacccccaaggtcctcagagtggtcctgccgtctgagcacagagacaattacagacctctaggagatgctacaaaggctttaattaagggacttactaacaccccactaagttttggaaattgaattcttttttgtgcttacctgatgtttcttttgtccagactttcacatgtatttcaacagagaacactatttcccccacatctgttttatgttggaagccgtttactgtgatagcagcaaagctgagagtttaaccagtataaggaagtaggtagaaaagcgggctcggaggctttttgctggggagcattttgggcttagattgaaaattgtaatactacacatcttgaaacatcagtaagagaaaactaatgtactttatagaatttgaattttagaattcccatttcacaaagcaatgtcattttctttgaaatggcaactttatgtttctagacacagcatgctgctctttctctaaaaatatgtttttgtttgttgatgctataaggttagcctttggctaccacccaggtctgatttttcacaagcctagactcatattttgttccatttcgatgtgactgtttttatttctggaaatactctgctttacggcrcattagtcctagctagagcactatgatcacattaatctaccggagttattgtgctcaactaccccctttctgccaacagtggagagagatgctctcatctttgaactctagggcctaatggttgcccaggtcagctatatctcccttgttttcttagtgaagtagttattctctcttctatcctttgaagcaattcccttctgcctgcaaagtttggtttgaaccttaaaggttttcaaaagcactaagaaatacttctgttttagtaacgttatattttccttcagtatttctagtttacatgtaatatctgtcaagtggcacattttttaggttctctctgttgtaccaatagacaacttgaaggagcttttatgtgcgtaccacttaatttgtgtatgaggaggacagaaccttaaccttgctgaaaagaggagtcgataagaaaatcacaagaagtgtttaacctgtgatgacaattttaacttgccattttttcatttttcacaaggtcagatataaagtgtgcagtttcagcaaagtcgagtttatacaggaatcttatgactgggcttcatttttacatgtgggttggtagggaaggataatttgtattggatgatagggcagcatgcttcctttttacgtgtgagttggtaggggaggatgattagtattggacaagagggcagcaggctcctgtatgtgctgtcagctccattggaccgctgtgaaggccttctgaccccagagcagtttgagatgctgcagtggcctggatgggtctatgtgtccaggtgacaggtgagagcttttgatatttatgttatgtagaatactcatatgcttggatatgttttaaataaagcatagtatgaattttagttcttttttgcttttctttggaaagagggaaaattatacttagtgacacaaatattttttgtctgatcaagtacctaactgattaatgagctaaagcaaagtttgatcccaacttctggagagaggtagatctggcaactgaagaagaatataactgaattttgctaaaaaaaaaagtgctgattcgaaaagttgttttatgaagtaaaaattctaagctcttatctcttaggctttattttgctaacattgttagaactagcacatctggcttagattccaaaatagtttggttttatgcttgtaaaaatgaaaccaatcaaattggaattgaagatagatgaaaggatggattttggtacaatgaggattcttaaacacagtaaagttatcagggaagatcctgaacattgcctttctgagtgtcccttaaaaatagactggtgtcaaacatcagcatcacacaatatacccaggtaacaaacttgaacacgtacccgttgaatctattaataagataaaagttcataaaaaccacagcaagctggtgtcttttttcaggtagtgtggttgtattcaagtctagctctgtataggggtgctggggtgctgggataaataattcccagcagtccttccagttctgcagttcttgattatattgcttaccatcaacaccttatataatcttcacttacatgtcatttgaagatttttcttctcctttggggagtcgaggggaggagagttttgtcttttaagttagacatttattttgatagaattaaaatgtgccatctttatcagatttagtaatattcatatgaatgtgaatattcatattaatatgaaactaaggctctataatattagttgggtttggtttctgcattgttttatttggtttccctccctatccctcaccccaagtgtggattagtgtgcagagccagatagttaaatgcagtcactgaaattcttgctttaaaagacagtgaggcagaattgtttagtttggagagatgtgaaaaagaggccaccttaatatttcacctctgttgctttgggtttacttaagaatgacaatttasaatattttccagctctttccccagaaatataaacaaagatccttctctgctggtcaagaaatatatgtaattgtcctttgtctctgtggtactaacttgacagtagccggttcccctcccctccaacctgattctgtatttcctaagcatgctgaccttggaaccattagtagagactcagcagtttactctttcatcaataatgcactcactctgaagtggcaggctggacactgtggcccagctctgcatgggtgtttatagtttatgccagtaaatgtttctgttgaatctgtcaggagctgcaggcctgatcccttttcaagttggtggtgagagcagtgagtcagcatatttgtaaacttcagaagagtacagaacactgataatttactgtggcactggtaatttcatgaatatggagtgggcccatatgttcatttttagctctgtaaatctcaagaactgttactgccttggtaagctgtatcagtgcattggcacccagataaagagaactttctgcctgtcttgaagtaaatgaggcatcaacccagacttgtgttaggctggcctttgctgtggttttacagtagatgctccagaactgcttagaaagctcttttcagatgggaatgtgggttgccttctggtagcatggcctgtcatcagaggtgtggttcccccagtagccggcctatgacacggcggctccagtttctttatgtaataaggtgagaaagagtgaggaagagttgtacagagcaaatgaattcagtgtcgatgtcttatccagtgagcgttgctatggaaaaacctgtttgaaaacaggttcttcccattaagttcatcagttttatgtttcatttttttccttttggcctttttaggaccagttccaagtgcaggcagagttcccctaggacttctgactgtggaccttcagcagcctccatgatttcatccttcctgctcgggtccctgttaccaaaaatacagggcccttattttcatatttgccccrgattttttccttgcaagagtttcttgatagcaaatccttcttktaaatactagaaagtatgaggaagcgttctcttttcayagccagtgatttaaagaatagttatttttaaagtagactagtgggcttttagtgttaaatgtctattgatgttttgccagaagaaacattgatttttctcttactttctctttttcagggcctgctttcttccccgggcratgtgcagagatctttgccaggggtcaaagcgtcgggaagcttggggtccttcatcctgacgttatcaccaaatttgagctgaccatgccctgctcctccctagaaatcaatrttggaccctttttgtgaagaytggtctctgtggtgtgattctcttcccaggtgtccctttctcctcccctagtgtccttaagtcctcctccacagggaacatctatttgggctttgatgtttaataaagtagaaagcactgtctggctgtgtgggtagagaccatcctttccctgcatrttaggccagcttgtgccatataccartgtggtgtctgtgtgtgaagctgcattgttgggtaaaagccccrtggagtgctggagaaatgcactagcagagtgcaggatctgttctgaaaggcagacgtgctcctcagacatcagaacatcacattggaacggattactcctgcataacaagatcccatttctttccttattgataaaacaagataatcgatgagaattcatgttgcatgagttcgagataactgaggggtttagctttgattttctacatttgacatgtattcatcattgagaaacactaaaataacaatatttttagaaaacgtttaagaatcaattatggtccaacaattatagcttctgaggtcagtttaaagtgaaagaaaaatctgtaatacaaggattcaaaatatgtgagggtgcataggtattttttactctatctgtgatactctaagatagagtacatgcaacaaagatctgttctgctgtaagagttaaaatggacaagtattgatatcaatgcagtatgaacattaggaaacaatgagaagcttatttttgccataggccatacatgttactgtaatcagtcagttataaaatcatggttttaaatacttaattgagctactagtttctctattgtcccagggagatattagacctctctttttctgaagctaagcttcagccaatcctccttgttttatatcctaatttcctttcttacttcaatctagaattctccagtaggtaccatctctggaaaaaagctgggtctcatgtttgagacaagttcccaggtactattgaagtaataagaaatatgataaaatataatactttaaagtcccagtagaaatagctaacaaaggctgggtgcgctgtggctcatgcctgtaatcctagcactttgggaggctgaggtgggcagatcacttgaggccaatagttcgagatcagcctgaccaacatgatgaaatgccatctccactaaaaatataaaaattagccaggcatggtggtgtgggcctgcagtcccagctacctgggaggctgagtcaggaaaatctcttgaaccaggaggtggacgttgcagtgatcccagattgtgccactgccctccagcctgggtgacagagtgagattctgtctacaaaaaaaaaaaagaagaagtagctaacaaagatagtgaaataagaattatgtttatggatcttttgctgagtctactactaggagaaaacctgaccatattacaaccttgaattggggcagcagtgtctaactctgtaagatttgtgaacacacacacttccagctgacccttcacagctctgttataagcagatccttacaacattttaaaaatgaaatatgccctctaaaaataatgcatgccaaaaggacttgtatccagcatgcataaagatttcttaaaacttaataataaaacttaatagtaaaaataaaacaactgttttttaaaaatgtgcaagagttgagcaaacatttcccaaaagatgacatatgaatgagcacttgaaaagatcctcaacatcgttagtcatcagggaaatgcaactaaaattcacaatgacaaactgcatacccattaaaatggctaaaatttaagattcataaatcaaatactgctgagactggagcaagtggaactttcatgcactgctggtgagtcacaatgtaaaatgttacattgtgactttagaaaacagcttggcagtctcttgaaacatacacctaccatctagccattctattcctaggtttacccatatggccaaagatttttatgcaagtgttcacagtgttacttatagtagttacaaattgcagtatatccatactatgaaatacttctcagcaataagaaggaatgaactactgatcctcaaaacaacatgaatgaatttcaaaacagtatgctaagtgaaagcaagagacacaaaagactctatttaattctatttacctgagagtctaaaaaagtcaaaagcaggtggtcggcaggacctcaggaaagagaactgactgcagtgggttaagagaaaactttttggggtgatggaaattttatcttaattgaggtggtaggtgtacttcaggtgtaggttatacctttgtaaagctgggagaaaaagaatgtaatgtaacatgtagtattttactgattttaactacataacaccagttgataaatgcctagagaaatagcctgaactgtagaattggcagttgtgctcaaggtggctcactggtccacagctattaatgatatattctcccttagtttcaggttcgctctagttaaaatcatggcttatggatcatcatatgatagcccttgttgaagtaggtggaaccatttgttctgtcagcagctacccacctggatatttttgggggtggccaaaattacttgtaatgaaaaacccactaatgcctaattgtatatcccagcatgaaaggggaaagatcaactccatgcatcatgtagatgtttctgccctcggaagcaggaaatggtaggcagaaaaacagtgtcggctgcattggaagaagcgaatccagctcatgagtcgaggctctgcagccagatcatcttacacttgtccctggtgaagcatttgaactggagccagggcagtctgtgagtactgccaaaagcctttattacagaagatgcacaccttcttagtaaaaactgggagctctagtattaaagtgaaaattaaatggaattgatttttgttctagcttagaaaaaacttaaattctaccactacagcctcacagtcctgcagtgctcttctagttttgtttgttttttgtttttttagacggagtctcgctctgtcacccaggctggagtgcaatggcacaatcttggctcactgcaacctccacctcctgggttcaagcaattctcctgcctcagcttcccgagtagctgggactacaggtgtgtgccaccatgcctggataatttttgtatttttagtagagacggggtttcaccacgttagctaggctggtctcgaacttctgacctcaggcgatctgtccacctctgcctcccaaagtgctgggattacaggcgcccagcctgctcttctgtttttaaattatttttgaattgatcttttttcacattttaatttttttggtttaataacggtatgagagtaggaattctccctgatgtgtagggtgaaaacagttgagtttcagagagatcaataacttactcagaagtcacatagccaataaatgagtttgagacactataaaagagtgacttggagtccacagaccactcactgatttgcattatttacttatttatgcgaaagtaaataatgggactttctacactttttaaaaatataaaaataatgggagacaaaaagttaaaaattgttaagtccgatactttaaaaaaactctgcaaactgtggccttactgagttaatctacctttcttcctcctgattccctgaagtaactaactgctgttaacaatttagcctgtattgttccttagtttggacattttccttgatttgtacagtcagccacacacacctgctcacatttttgggggtcatgctctacttactggtttgcaacaagttttgttttttattttacatatatctcatgacatttcacttaatatgccccattttttcaggtcagtgcctatagacctatctcattcttttaaatgaggtaatattctattgtacagatgtccgtaattgttcaattattcccttgttggtggacattcagttgtttccaactgtttgcaattataaacactgctccaatgaaccccctatcctgctaaatagcactggcttaggaccccaaggaaaaccagtcctaatgggtgcaagactgtataaatatccacatttgacagacacattcagagatgcatagagttcattagatatttctttgatgtgacgtttgtacttgaactatatattattccagtaccttacatcttagatgtagaagtcgctaggtcaaaggatgtgttttgaatttaaaacatgttgaatgactgttctcacattttaaacaggagtaatctactacaaaccagccagcctaaccactgcccctgctctcagcaatgatgggctcatcagcttggtaagagagaacattactcacaatcttgcttctcaatcttaatctatttgtgcttggtgttttatataacatcactaaccctaatacttgagtatttactttggcccttctgtccattttatccaaaagcaaacagatagccttcaagggacaccattgccttaagcagaatatgcctcctaagcattgaaagcctttgacccatctgatatccaagttctggcttattatgttattagggccttgaataactttatgtatattattatggactgaatgtatccccacaaattcatgttgaccctctgacctccagtgtgatggtctttggagatgaggcctttggcaggtgattagagctagatgaggtcatgagagggaggccctcatgaaaggctcagtggcctgataagaagaaacaccagagagcttgctctgtttctctgcctacctggcgcacacatacagaagaggtgatatgaccacacagcaacatggtggccaccagcaagctaggagagggatcagaatgaaacctattttgctggcaccttgatcttgaaattctagcctccagaactgtgagaaataaaattcttttattgaagccacccagcctatagtcttttgttgtgacagtcccagcaaactaaaacacattattgaaaacttgcattcaaaaagtagagagtggcatgcatgataaaattcaaggcagcagtacacctctgggacagtctgtagcagttccctaatctacctgtatccatgagcgcagataggagtgaagcctcctaggcttccagtctgcagcatctctgtcacatggaaacctgatgggtgccactgtgaggggggccaattatgcacagtgcacactaaacacagatcattttagccttcctaattagccactaataaaaagacactgaagtatcctgaagatcaaagagagatttccaccatgcctcaatacaaaccccagtccgggcctccgcttgacaggtgctgtgcctagtgttttgccctgaccagagtccatgtagggaacatgacctgcttagataaaagaagagctgtcaaatgactgtgcttgacaaatgggccaggcagcaagaagggcaacgcagaagcaaagcggtttgagtctccgcgatgtctacttcatgttcaggtattctctgctttggctttctagtaggcagaaaggatgagtgaatattgtagctagactgtgggttgaataagtatctccagcaaagggtctaattgaattatgtctgaccaaaccctgtaggtttttttttcttctgaagtgactaatggagtgtgctaagaatatactcaaggttcacactcaagcttttcattcttcgtctgtaaggtttggccttccttgtttctattgaagaaaggcaggaaaggcatgaatctccaggagaaaacatttgaagcctcagtgtggtggctcatgcctgtaatcccagcactttgggaggctgaggtaggcagatcaccaaagcccaggagttagtgacgagcctgggcaacatggcaaaacccatctttacaaaaaataaaaaaaataaaaataaaaaaatatatatatatatatatatacacacacacacacacatacatacatacaaaaattagctaggcgtggtgtgcgcctgtagttgccatgtgagccagrattgcaccacacagtactccagcctgggtgacacggtgagaccctgtctcaaaaaaagaaaaaaagaaaagaaaaaacattcggaagaatccatcacgttaggagcgctggcaaggctatgcaagagagctgccgcatacaccgctggaatcagaggacttgcagacatgaagtaaatctggccttctaggtgggaaggtgaagatgtggagaaagtgtgcctggttgatatcaagcctgatagcaaaagaaatgttctgatttccacatggcacagctttttgtcaggaataaaatatgcctgtccctacaataaccaactacttagggctgacaagaaaccagttgtgacacacggaataaacagtcacatttcgtgctggaaaggtcagagaaaaagccccagtggagataggtgggattagagattttttggctgtgtgtcttgggcagaacatttaaacaaggagcacttgggtgacrttggggcagatgagacaagagagccagacagagaggtgccccttaagcaaatcatgtaggtgagatgacttgtgtaaaacactaggcacaacacctgtcatgcagaggcccggactggggtttgtattgaggcatggtggaaatctctctttgatcttcaggatacttcagcgtctttttattagtggccagttaggaaggctaaaatgatctgtgtttagtgtgcactgtgcataattggccccactcacagtggcacccatcaggtttccacgtgacagagacattgcagactggaagcccaagaggcttcactcctatctgcactcatggatacaggtagattataagactcttgcaggcatgggcattaaggcaggacccacttttcaccctggctcacccctaatgatctgaggccatctttgtgtatattaaagaggcattgacatttgaacacctgcattgggcagaatctggcttgccatacagagagcaaggccagcagatgtgttgagtgcgtgtgttaaagaagcattacagtggaactcctagctacatccttacttttcttggtttttttgcatgccatatagacaggcttggaaaaagaagaattatttttggctttgtatagctccctgtctcacgtggctacagttttaagaatttagcattctcttcatggcctacatttaactctgattcttcttaatgtgcattctgtaaatatccaagtctgtactacaggtgtgtctcattttaagaaaacaatggatgcatggtgtgcacag

SEQ ID NO: 94598 - DNA, 14473 bp, Homo sapiens
atgagctgagattgcaccactgcactacagtctgggtgacagagcaagactctgtctcaaaaaaaataataattaaaagaaaaattaggcatgcctgtagtcctagctgttccagaggctgagggtgggaggatcttttgagcccaggtggtcagtgctgcagcgagctctggatccagccactgcactccagcctgggcaacagagtgagactctgtctcaaaaaaaataataaaaaataaaaataaataataataataaggctgggcacagtaactctcgcctgtaatcccagcactttgggaggccaaggcaggcagatcacttgaggtcgggggagttcaagaccaacctgaccaacatggagaaaccccgtctctactaaaaatacaaaattagccaggcatggtggcacatgcctgtaatcccagctaccgggaggctgaggcaggagaatcacttgataccaggaggcggaggttgcggtgagctgagatagtgccattgcactccagcctgggcaacgagcgaaactccgtctcaaaaaaaaaataaaataaaaaataacaaaaataaatcaacataaaaataccctagagcttaggttaaaaaaccaaaaaacaacaacaaaaaagtttgtgatatatacatacaatggaaaattatttagccagaaaaaggaatgaaattttgatacatgcttacaacataaatgaatcttgaatacattctgctaagtgaaataagccagacatttaaaatgacaaatactgtataattccacttatgagatacccaggaaaggtaaatgtatagagacagaaagtagactagaggttcccaggggctgggaggagggaaaatgaggagtcactgttcagtgctatttaatgggtacaagcaggaaaatggcttgaaccccctgagacagaggttgcagtgagccgagatggcgccattgcattccagcctgggtgacagaacgagactccatctaaaaaaaaaaaaaaaattaggcatgcctgtagtcctagttgttccagaggctgagggtgagaggatctcttttcattttgggaagatgaaaaagttctagctgggcgtggtggctcacacctgtaatcccagcactttgggaggctgaggcaggcgaatcacaaggtcaggagttcgagaccagcctggccaacatggtgaatccctgtctctactaaaaatacaaaaaatgagccgggtgtagtggcgggcacctgtaatctcagctactcaggcagccgaggcaggagaatagcttgaacctgggatgcagaggttgcagttagccgagatcactccagggcactccagcctgggtaacagagcgagactccgtttcaaaaaaaaagaaaagttctagagatagatggttgtgagtagagatagatggttgtgatggttatacaacaaagtaaatgtacttcatgccactgaattgtacacttaaaaatggctgaagtaaattttatgtatattttaccacagtttttattggttaagtaataagccagtggtgtgaaacccatatttgagagtttgagacaagtacatactgcattaggtaaaagcccccttttatagaaaaactgggttgtgctttcctggctggggctgatggtgagtgtggttgtcattctccttgaccgtggcccagagttcctcctgcttgagaacgtggtgcaccacttcaagtacccctgcgtgttggacctgaagatgggcacgcggcagcatggcgatgacgcgtcagctgagaaggcagcccggcagatgcggaaatgcgagcagagcacatcagccacgctgggcgtcagggtctgcggcatgcaggtgagttacctctgctcagagcctaggtgctgccacttgcatgatttgggttgtgctcatacctgcctgccatctatgccaagtgtgtcctcctgagcccctctgtccttacctgttgactttgatatgggcctcaggtgcaggaccactgtgagagtctgctgcctcgacattgggacaaataagactcttgcctgtcaacaagatgttccgatgttggaggagggctccaaagctgggggcagggaacccataggcctggtattgctttctcttggttctgcaatgggaaaacccagggtgaatgtggcctgcctggttccacttagataggtgagcagaaaagctcaggttggtcaaagtcccttccagacagtgtttgcccagggcactgtgagctcttcagacttccctggcactcaccctgtctgcctcctggggtttcaggtgtaccagctggacacagggcattacctctgcaggaacaagtactatggccgtgggctctccattgaaggcttccgcaatgccctctatcaatatctgcacaatggcctggacctgcgacgtgacctgtttgagcctatcctgagcaaactgcggggcctgaaagctgtgctggagcggcaggcctcttaccgcttctactccagttccctgcttgtcatctatgatggcaaggagtgccgggctgagtcctgcctggaccgccggtctgagatgcgtctcaagcacctggacatggtgctccctgaggtggcgtcatcctgtggccccagcaccagccccagcaacaccagccccgaggcgggtccctcctctcagcccaaggtggatgtccgcatgattgactttgcacacagcacattcaagggcttccgggatgaccccaccgtgcatgatgggccagacagaggctacgtgtttggcctggagaacctcatcagcatcatggaacagatgcgggacgagaaccagtaggccctgttctgggcccccagaaccccttcctctccactgcaggcagggaccattgttctgaacttgccgtgaggacacacagacttgcttttaaagggttatatttctctttggtgtaaactaaaagaaatgtttttagctgtagcctggaatccatatatataaagtgaaggagggcagaccacacgccctctcagccaggctcctcagctttgtggctctgactggtgtgtccaggctgccttaggaaggaagaggtgcccctggtgggcttggcagcagggacagggtgcccttggacattggtttctcttgtctagatctttgagatctgtggctgcagggccctgctgattgtaaggtaaagccctgggctggtgcagggcccctccacgcccactcttcccttgttccccagaagtagagggctctgggtgcccatttcttgggggctttccagtcttatgctgtgggtgtcagctagctctttaataggtgccctcagggcaccacagggctgactgcacaaagctggacccatccttcggtctgaccttagcatggggctagattaatgaagctgggctgaggccaacttatggcagagggcggcgcctgggttccccaggcacctgttggcacgtgacaggttggcacctgtcctattcctgaaacagcctctctcaccaagttcccttgcctaagaaggccactccctcccaccccactgaagtgggggatagtcggtgtcctagcaggcctcagggcctctggtggctctggcccagacagtatttgcagttcttgtgctatgggtgggagtcttcttcctcaagtttcggcagctgtgctgctgctggatgggctgctcctcccagggctcaagggctgtggtccgctcagggtctcatttccccaggccaagttcaaggcagcagccctttgtgaggcgctcttggccctgggcctggagggagaactttaagcttttttgctcacagggacgtggtatgggccctgggtgcaggtgcccacattctgctaatgagagctttgtctgatcagtcctgggtccatcagtttgtccatgtgtccggctgccagcccgtcccttgggatccttcccctggggtgtagccttgttcattagtatatactcattccttcatgctttcctcagcagaacacttccacttctgaggtgagcttttgccccatgcccttcctccacaggtgttgcctttttataaagacctgatagcagaataaattggtgtttccctgttgacccagcaccatttctgtgggcctagaatatggccctcaacccttagagtggggcagtgagggcttgaggagtgacccttcctttctcatggttttagtcattttggctgccagcccttaatggcacagatctgctgcttctaacagatggccaggaggtgacaccgatttcagccattgccaaggttagcaccctctcctttgagcctagggccacactgttcattgtcactttaggcaagtgcctgtttggctttaaaggtaagcctgccagctgtgagaagccttggtaactgatggactcatttcctggtccttaaagatgcagcctcttaagggctccttgatggatgccatctctcctagcccccagccctggtgccactggtgggcaggttcccattctttggggctgggagggacagcttgcctgtttctggtcacaaattacagtcttctctcctgtaccattctgtggcttcagccatgggggcagtagcccttcattagtgtagatagtcattccctggtagggtggagggtaagacatagggtctggaactgtttgggaccttttggggatgtcctgtgcctcccagattcctcgattctgggaggagaggctgccgcattctgctgctcctcacagcgagcaaagctgcacccacttacattcagtattttcctggcactacaaagagtgggaaggcctgggatttgctgctgctcccttagagcagggcccctcttttcagcactttggacacctggagacccagccctgttatttaatggtagtgggcaagtgtgtgtgcatactgtctgccactgctttctccctgccccatgccagagagccctgtccctgccaggcccagccttcttagccccaacttgggaacaaagtgcaacatgggatcatgggttggggtgctcaggtgagccctctctatagtgcttccctgggccaagctgacaccagcccctgagggtggggtgggacgggtggtgcttaaaagaggaaggggaccagtgtagcaacttgccagggaccccacccctccctctctgggcctgtgcagtgagcatggggattcccatcaaggggcctggcacctgtgctagttacgtagccgctgctcacgcgctcactcctgaccacatgcacgttccctagatgcagactgctttgaactttaaagctgtacaatttggttatgtttgtgctgacttaaaatatattttaatgaggaaaaaataatggagaaccctgggaaggacctggttcttttgcttctcggggaactgtaagccctcgcgttctgggaatcgctctctgctgctctttcctggaagctaagcctgtctccaccgcccgaggcctgcgccggtggctcccgccgcagttgcgtttgctttggaccttgcgtgcgggggagggggtgctcggtccgagcccgctcctttctgtacacctagcgctgcccgccccgcttgtgtctgaggtcgtgtatgtcaaaaataaagccgctagaaacggaggcgagtctgtctttgtgaaaatcccgtggcccgggagccttccctggtcaccctcggggcgaggccggggccgtggggcggggccggcggctgctggaccgcggcgaagcagggaacaaggcctcgcccttggcgccagttccgcctttggatccgccaatggccagctgacccgcgggtcccggcccgggtctccatggcagcccggcgtactcgggcgctcattggctacgtctgtcgcagcgctgcgctccaacgttccgacgccggcggccgtgccacgtacgcggcagccgattggcccgcggtggtcgcgtcactgcccgcgccgggtccggcctgagttcggggccagcagccgtctacccggtgtcgcgttctgtgttgtggcggccctggatccggcgtcagggcgaccgggcggacgaggtggagccagagtctgtcaggcgggttggtgaagggcgcggggccgggcacggcgttgggagtgcgcggcagggaccggccaggcgggctgcaggcacctcagagcccgggacaccccctcaacgtccgcaggcgcgatgaaggcactgatcttagtggggggctatgggacgcggctacggccgctgacgctgagcaccccgaagccactggtggacttctgcaataagcccatcttgctgcaccaagtggaggcgctagccgcggtaagaccctgggtcgggatcagagtcgcrttcgsatctggcgggactagggatggccagcgactaggggtcaggggctcccgtaccttctgactgagcccgcccgtcggcctgcgttctgacaggcaggcgtggaccacgtgatcctggccgtgagctacatgtcgcaggtgctggagaaggaaatgaaggcacaggagcagagggtgaggcacagactcttggcccttattctcggtccccgcccaacttcccatcctggtagaacctgactgggggggcctcttccttccagctgggaatccgaatctccatgtcccatgaagaggagcctttggggacaggtcagtagaggcagaaaggtcccttgggggagggtttaaggccaggaaaagggtaagacccagcctggagtgggcctgctgagcctgaatccagggactcagacctccagcaaggtggtgacctgtccccttcccccagctgggcccctggcgctggcccgtgacctactctctgagactgcagaccctttcttcgtcctcaacagtgacgtgatctgcgatttccccttccaagccatggtgcagttccaccggsaccatggccaggagggctccatcctggtaaggcgccaggtcttctctctcttgacactttcaccctccatgcccagcctcccatgccccctagccttcatctgccttcggatgttatggatacagagctgtgcagtatgtatctttaagcacttggggcagagtctcttgagatctggaacggcatgtgtatcaaggcttaggaacactggactaggtccgaggtccccttccttgcattcaggtgaccaaggtggaggaaccctccaagtacggtgtggtggtgtgtgaggctgacacaggccgcattcaccggttcgtggagaagccacaggtgtttgtgtccaataagatcaacgcaggcatgtacatcctgagccctgcagtgctgcrgcgcatccaggtgtgtaggagacagctgttggtgggctggggtggggcaggccatcaccgccatgaccctgctcacaagctgcccactcccacagctgcagcctacgtccattgagaaggaggtcttccccattatggccaaggaggggcagctatatgccatggagttacagggtgaggcagggaggccacagggtgggggtggtctgtggctgggctgaggcccctgatgcatccctccctacaggcttctggatggacattgggcagcccaaggacttcctcactggcatgtgcctcttcctgcagtcactgaggcagaagcagcctgagcggctgtgctcaggccctggcattgtgggcaacgtgctggtggtgaggcccttgcccagcccatcattaaccccctcagtcttgggagacaagtggcccacttgtatttttcccaccgctctcaggacccaagtgcccgcatcggccagaactgcagcattggccccaatgtgagcctgggacctggcgtggtggtcgaagatggtgtgtgtatccggcggtgcacggtgctgcgggatgcccggatccgttcccattcctggcttgagtcctgcattgtgggctggcgctgccgcgtgggtcagtgggtaagcctgtgggctgggctgggtggggagaggggcggggagtgtgcctgcctccctgacaaggcctatcctctcctggaggtacgcatggagaacgtgacagtgctgggtgaggacgtcatagttaatgatgagctctacctcaacggagccagcgtgctgccccacaagtctattggcgagtcagtgccagagcctcgtatcatcatgtgaggggatgcagtggggctggccgagccccggttttcccatcagcaaggggagtgctggcctgacacatcagaagaccctggacttgtcattatttgtctggggggcactgggtgaagctgaagctgttggacacctgccttytcatgtggacatcatctggcaggatccctgctgggcacaccccacaaaccccactccctcaagaagggccagggccagggctgtatggaataataatttaatgctcactgtggccctgactgaaagtcaagctcaggcacaattagggccatggctgggctcccaccaatgaggatacaggcaggcaaggaggttggatgtggtggtgtgggatacaggagaagggcaaagggagctcataaatagggcccagcctggctctgggttcaaaggtggaggttccaggatggcacaggctgtgagggctaggcagctgaggaggtagtactcgtattggctcccttctcccagtcctctacagacacgatggtggttttgcagaagaagcagtccttgttgttcatcaggtgctggttgatacaggctctacaacaggggaggggatgaggactgccctgcatgtacctactgctctccccaccaccaagctgtggggcccacttacttgcaggacttgtggccacagggctggaacacagcagagatggggtgggcatagcagatggggcagaggtcctcctcactggtgggctgcagggaggagagtgaagggtgggctggagttggatgcctggctatgtggatgtccgttgtgcctgtgtaggagtgcacacatattcaagtggcatggacctgtgcaccgtgttcccactcaccagggaggcagctgctgcctgggcagatgcagaggtcaggtgcgccagcatctgttccacttgggccagctcatcggcactgatataatccgcatctggggagtggtaggtagtgtcaagtcagaggtagctgaggatgtgatgcctcttgaatattcccagcctaggactttgctgttcttaaggctcctgacccgacccagccccagatttccctgacctgccccaccagcccactcacagctctgcagggagaagcgcttccggtcaggggctggcagagcagtgccaggtgctgggggctctggctgtcccaggagatagcatattgagcgtagctggaagcagggatctgccaggagcactgatgtggcttgctctctcctaggtaggggagggtgcaagggcagtcagaaggcttggggcctggctaaaagtctctcttgggattgccaatgaggagtgccatggctcgtacatgatcaccccccctgcatcctttccgtctccctgcttcccaaaccccaagtcctgtattctagtaaggtgccacacagcctgttttttttttttttttcttgagacgagtctcgctctgttgcccaggctggagtgcgatggcacgatctcggctcactgcaacctccacctcccgggttcaagtgattctcctgctttagcctcccgagtagctggaattgcagacgcccaccaccacgcccggctaattgttgtatttttagtagagacagggtttcaccaggttggccaggctggtctcgaattcctgacctcaggtgatccacctgccttggcttcccaaagtgctgggattacaggcgtgagccaccgcgcccggcctggggtaccactttaagaaggctcaggcgaaccaccttaagatagtgagagtctgcctgccccataatattatcagtccttcaaagtcacttcaaataaacactaacagcagcttggagacattcttccagactcccccttttactccccgaggaaaaacgagcggcggagagctgccagccaaaggctgacggggactttggggttggccttgctccccatctggcggtcatgcggggccattgggcacaaagggatgtagccgccccgcctcctcaaacgggaaccaataggagcccgggccccgcccctggggggagtatttaggagccgatcaggaactcgcttggagagggctagcgaagccgaagggagcgcggctaagagtgccgcaccgcctcacaacctgggaaccggagagtaggggccgtcggctggcaagaacccgccgtgcctcctcggcaagggccatccggtgccacccatgtcgcactagagcagaagagggtgagtcctggaactgcaacctgcacagagctgctctgtactgtccctggtggtcgccgccatgacctggttggtgctgctggggacactgctctgcatgctgcgcgttgggttaggcaccccggactccgagggtttcccgccccgtgcgctccacaactgcccctacaaatgtatctgcgctgccgacctgctaagctgcactggcctagggctgcaggacgtgccagccgagttacctgccgctactgcggacctcgacctgagccacaacgcgctccagcgcctgcgccccggctggttggcgcccctcttccagctgcgcgccctgcacctagaccacaacgaactagatgcgctgggtcgcggcgtcttcgtcaacgccagcggcctgaggctgctcgatctatcatctaacacgttgcgggcgcttggccgccacgacctcgacgggctgggggcgctggagaagctgcttctgttcaataaccgcttggtgcacttggacgagcatgccttccacggcctgcgcgcgctcagccatctctacctgggctgcaacgaactcgcctcgttctccttcgaccacctgcacggtctgagcgccacccacctgcttactctggacctctcctccaaccggctgggacacatctccgtacctgagctggccgcgctgccggccttcctcaagaacggcctctacttgcacaacaaccctttgccttgcgactgccgcctctaccacctgctacagcgctggcaccagcggggcctgagcgccgtgcgcgactttgcgcgcgagtacgtatgcttggccttcaaggtacccgcgtcccgcgtgcgcttcttccagcacagccgcgtctttgagaactgctcgtcggccccagctcttggcctagagcggccggaagagcacctgtacgcgctggtgggtcggtccctgaggctttactgcaacaccagcgtcccggccatgcgcattgcctgggtttcgccgcagcaggagcttctcagggcgccaggatcccgcgatggcagcatcgcggtgctggccgacggcagcttggccataggcaacgtacaggagcagcatgcgggactcttcgtgtgcctggccactgggccccgcctgcaccacaaccagacgcacgagtacaacgtgagcgtgcactttccgcgcccagagcccgaggctttcaacacaggcttcaccacactgctgggctgtgccgtgggccttgtgctcgtgctgctctacctgttcgccccaccctgccgctgctgccgccgtgcctgccgctgccgccgctggccccaaacacccagcccgctccaagagctgagcgcacagtcctcagtactcagcaccacaccgccagacgcacccagccgcaaggccagcgtccacaagcacgtagtctttctggagccaggccggaggggcctcaatggccgcgtgcagctggcagtagctgaggaattygatctctacaaccctggaggcctgcagctgaaggctggctctgagtccgccagctccataggctccgagggtcccatgacaacctagactgcccagggctcccccacccaggcccccaccctcttgctgctcgccctgctccctgcttcggtccagagaactggcagatactggtgggaagcactgtgcctggccccccagcttcctgtatgggcctcgaaacacaatgggccttctcgctcactggtagagacaggggttgtggtccccaacctgccttctgctctgcccctgcacaggacccaaaggccccaggccctgcaaggtgtgctagttcctgctttcccgcggacttcctagtgcccaaatgccctgtgaggctgagagacccaggcccctgtggctttcaacacagcacagctgtggaagtggctgtgttcttctacagcctgtggaagaacccctgtagcagagcctcccgtccaccctcaggggctgagacagctctcgaggagtggtgctcaagagctgacgcagggccacctccccttcccaagggggtgggagggagtgggcccacagggaaaagaaggcggctctgaaggaagatctcgcccacaccccaggacagaaagaggaaacaagcccgccctctggtgaaatgggactccctccatccaccaacacccaacctcctgaaagcttcacaacttcacgcagagtccggtgggcaggcaccaggcaggaaaggctcctcaagaggttcctggtggtctggcctaagccccagccagaggccctgctctctctggcctggggcatccacccgttgttctgaaggcagagcccattctgtgggctcacaagacacagtgaaggggatcatggcctgcacccctgcttttcagcagtaaaaagcccgaaaagcctggcgagcatggccgagctgggagggccgagccggaactccacgtccctcgagagcaggagcctcttaagggctggcactggtctcagcctaatggctgaggcggtaccctggcttcatatgcatctcactgctcccactgcaggggggcagggaaggggggtctgggagcccttcatgtgtgggggccgagctgggggcccccatggccatcctggacctcgctgctccagagtttaataaaggtagcacatgcttattgctagagcctttgcagacaatggcggtcctccgtgtgttcagctctcctggcggcctggccctgtccaccacaggacggcacaccctccggagtcctgcctcccatgcctggcctgaggcatggccacaagccagtggctctgtgggccagggccacctgtcctgctggggtcccagattctcctacttagagcagctccgtctgccccctatttaggccgttcacacctcaccaccttccctctgcctcaaaacctgatgctgaggtccattttccagatgaggaaactgaagtaccaggaggccctgtccagcccctcctcaccagacacacccaactcccacaggggcccacggtccccaacactcactctgaggctrggccacgcaccaggagctgcaccaggatgcccgtcactgccaccagaatgggatagtggtccacgctctctaggcctgaggggarggggaggaaagagatgagccacccacacgctcctgcttcaagggctccaggcctgcccactgccctctctacagaagggtgagccgagactgcagagcaccaagtctggctgtccgggggcagaatgtggaatcaggcctcactgttcctagcagaggaaccgaggcctgtagtgtgttggggtgcagggcatctaggtcctcaccaggcagccgtagggtgaccacacgatcaaacaggttcctctcagctgtcacccggttcagcacctggtttagcagctgtgaggggagcaggartccattggtggatggggagcgtcatcaatggggcatccccagggtcccacccttgttgcccagatggccacacctgtgcaagacgccgcagcagcatctcagaggtaggccgggtccagtcaaggaatatctcaggcaccagtgtgatagtcatctccaagacacgcagcaggctgaccgagaggtcaaagcaggtggcacataccttgagctgccggctgtccacaaagttccgctccaggcgctcagcagcctgctggatctgagccaccaacacgtgggcatgcagtggtcagcacctggctctagcccaggaccaggcctcatcccttgcaccaccctaacccacgaggccccaccacagcccacctcttggatcatgccaatgaattcagagaaggcccagttgagctgattgaggacgctgttgaggaagctgggtgccacatcaggaccctgctgtaggaggtccgccatgtgctgctgcagcagggtggaagggcagggctctgcagggggacaggaggcggcatcatcagggactccactgcagtggcctctgcctgtttgcctctgtcctcgcccatt

SEQ ID NO: 94599 - DNA, 65884 bp, Homo sapiens
gtgaatcccaggagggaatattgtcaaaaaagcacgatcaaatggctttattaagaaaattataggatgtctttttgtcattgtttctgtaacagcacaacatttaccccatcagacaaacttaaggtcatccagcagacttttgaggagatctctcagagtgtcctggcgtcactccacgaagacttcttgtggtccatggatgacttgtttcctgttttcttatatgtggtgctacgggccaggtaactgttttatgactttgttattagtgagtcgttatttttaaaagtctgctgcttgcattttctgaactgacagcaggagtacgctcttccactagaaaaaaatcgattaacccattccactgtgacattacccttttattgagctgttctttctttttcccatcaactagattcaaaaggagaatggacatgtaagtgaaaataactcagcatctttttctctctggggcaggattaggaatttaggctctgaggtacacctcattgaggatctaatggacccctatcttcagcatggggaacagggtataatgttcaccaccttgaaggtgagtatagttattatttaatactttcttatcttcatatctgtctttcatttaccatattataaatgccattaaccactttttttgtataaaagtttaatgcaaaccttaaatgcctttagagcacattttgttctacactttaaaacattatatagtatattaaagtaggataagccagttgttcctcaaaatactaaagcaaattcttcattatctaatcctccttgtaaattgatcaaactgttataaatgtttacatttatataaataattgtaactctaaaaaagaaacagaaaggattcttagtgtccaagaaagtttccaacaggagtgctattcaatggaacagggtaaaacacagaaggcagtatgtaaataatgaatttgaattccatcttctttctttgccttgtatttactgtaaccaatagattacaaatgagcttctttgatctgggtggcctggagagattgttagaagtcatttgtttcctgccttgatttttcttggaatttggaagaaacactctaaagtttattgaaaaaacagcagatagaaagtgcaaaaacacttgtgaaaaatgagaaagaatagacctactcttccagttagtaaaatttataaaattacaataatgaagataaaatagtatgtgactgtcacaggaatacacaattacctaaatagaaaggatagctcccatataaacacatcataataaaaacttcacatgaaagtggaaacaccaaaccaaaatggaaaagaggaattatttaacaaatggtaaaacaaagtattggatagcttattagcagttttggagggagggtagaatagcaaattatatagatgctttggggtttaaatatagagaaaggaagagagaaggaaagacaggtaaattaaaataagaaaaataactagaattcaatgtcaggtttctggcctaggttaactatttaaacttttcaactaaaataccattaatgcttcttttttttgagacagagtctcactctgtcgcccaggctggagtgcagtggtgcaatctcgactcactgcaacctccacttcccaggttcaagtgattctgctgcctcagcctcccaagtagttgggattacaagtgcctgccaccacacctggctaatttttgtatttttattagagatggggtttcaccaggttggccaggctggtcacgaactcctgacctcagatgatccacccgccttggcctcccaaaacgctgggattacaggcgtgagccactgcacccggcctaccattaacacttctattaaataaactgaaaagggggagaaactggggaaaatattggccacagatgacttagattattagtgtttatgttatttgaagagtatctctaaacagatcaccaaagaagaaactgaactagtaagtttacatatagaaaaatactcaacctcactgaaaatcgtagtactgcagatttaaataaggtaccattttgtgctgttaaattatcatgaatattttaaaattactgatggggttatagtgaagtcattattattcccacattgctgataatggggtaagtagccattacccttttggaaagcaattgttactaacatagatatcaacaacatcaaaaaatgtggagtttgactcaatggttctactcctggggatttatcctaagaaactaaagaatggaaaatgttacatgttatctggatgtgttattcattggggtatgagtaattcccatacctggaaactcataattcagggtgcttcttaaaaatgcattcttggaagttatgactccccaggtctgcaatgatgcttaatctgtatatttattaatcatactaggtgattctaattagagttgtaccttttaatgattggtatactctaaatgtccaatcagtaatggcaaattgtggtgtctctgcatgtgaagaatattagctagcttgtaaaaaaactttgttttagaataagacgggaaatgaaaaaattttgtctatactaattacaagtaggcaaaagacagccactagataggggaactagaagggaacagggaaaagtgaaatcaattaaatctgttgggccatcagctgaatttgttcataagggattttgtttctttagtcccatatgcattgctctctttatgtaatttctttaaaagtgaatttgaaattattttgaacttttcttccaggcatgttactaccagattcagcgtgagaagcttaactaggctgcataacagcttgaaaactggattatctactacagagtgttataacaccatctggagtcttcctgtagtggcaaaaaagaacagtgttgaaattggaaaggactttgtgttatttaggttgttagaatgagccttaccaataataagagccctgagcccagaaaaaaggactgtatagtttaaagggaggattgaaagggaggtaaaaaatcagattagaccagttcttggcctatgataagttccaaaaataccatttatctactatttgaaaaaagaagaggatatcccttcctacagtaaagggtatgtcagctacatgaagttgtaagaaaagcttccagtagagcttcttatattaaagaagttgatggatatttttgaatttctggtttgcctgaatccacctgcagttaccccgatccgtttgcaagaaccagatcgtacttgaaactatagtggccacactctgccttcctgagtcccttccagtcatgtgtgcatcatgtctctttgccaagggaggggagaaaggaacttttaaactgcagttttaactttttctaagctgtttcttgatgggagaggttctgtgcaaaactaccacattctgtccccaaaatgtggaatgcatccaaataggagtcttctgcctcttaacttaaaagaacataggaattttgtttttggtttctttatcatgctacagagagtgaatacactggaattcagacaccgactctgagctgctaggaacctcatttgtccatgtgcaaacgctgtattccaaggcctgtgaatggcagcctgaggaagttttgcatgcaggctgtgttttcgagcaggactaacaactgggaaataagcaaaaaactgcatcgatccccagcctggtgttgttcttccctatacttcacactgaactcaggatgggaagaaaaaggaaacaagctttggctttttccatctcaaaagtattgtggcacctcaacatttcagtgttttgctttttaaaaaatgccctattgtaagttgttggtttatactgtataagtaacactagtagctgttttgaataacataggtgctcttcctcatctcatctcctacaccgtggtgagcatacagagtgtcctgatttgtgttaagtgactgagaagatgttaattacttttgaaaaaggatcatggtttttgctctactttataatcaagacaagtgtttattaaaatactgttttggaatgttggctgtaatgtaacagcaattttcataataaaaggcattcatctttatgtggttgttttatgattgtagaagaaatgaacagggcagcctaaaagatgaaaggaaacccagacttagtatttctttagcccacattgtaatccatgcctctaagtattggcctcaaaagtccctctggggttttagaaatctctgtctttaaaataaacgtaaaccaatagttatagcaccctttctagcaaagagcaaattaactttctgaccccaataacccaaggacacgggtctccaaagaaatctattatttctttgaataaaaagcatattttgatagttactcgttattttttttcctcctaaacagatcgagggaagggaaggtgaggctttaaaattctgcttagaaacgttagatattaattatctcccagttgtaatgttttctcaagaggcctttccatcttgttgctgcctctaccagaatgtgcctgtcctctgttggaaggggaccaacccttaaaaatccgtttatgttaaatactttgcatttacattggagattgttttgagtttctgaacaaacacataaataaccacatttgcctggtaaagccaaatttacagaatttctgactctgggcgggggtggataatatgtggaaatggacaaacaaaaactttgagacaaattgacccattgagaagatttccaatgatgataggctgtctctgttctaagaaaagccatgttacaattcgtccttttactggagtcttgaatgaaactgttcagttactttggattcttcctactatatgcttttcagatagcatattaaagttataaattttgaagtgtattggaagaaaaaccctaaatctccaggccaatgtttgtaaatagaagtccttggcactcctgcagcagtttacaatggtcattcacatgcgtaatgaatgcttacagcagcccaaggatgcaggtgttatccccatttccccccatttttcagacaagcagtgaccaagatttgctcactgccagagctgggactccagcctagaacttccctactccctacttccctagaagtccagtgctttttgctactacagctgccagagatgtcatttcatagctggttatgtattgaaagttcttaaaagtgagttaaaaatgaaaatcttattgaaatcaagtgcttttcacaaaatatgctgtactcaaaacacaaatgtatcacattcccaacttgtgttttcatctatgatggagagataaggaaagccatgtgattaatatgggtagaagggctgaggaccctctgataattgccatttggtctctaccttttgccttgctgtcagcaataccttcctctcctttctgcaatatccccttccaaatgctctccccactgagcactccctgcagtattaagttttcagataaagaagtagctcctatctgagacagaaagcactatttgttaggttcagaacagtggcttgggaggggattgaccagaaggtactgtttttgatgggtttctattattagctgaacagtcttcagttgttttctcaccataacatgagagatttaataaggttagtaggttattggcttatttccggtcctgccacatttttttctttcattaaaaatgctatcttctgttgtggaatgtctgtcatcttgaactaatcaacaaaaatactatgtttttctgccgttaactatgtgttggcaatttgagagaaaatactagaatgtaggtttgaaaatgatacaaattagacttcaaggaatacttaagaagatttgtggcaggaaaggcttgtgagtaatttagttgttaggctgggttaggcatctgtggattacatcaaagaggatgtgcagagattttatcgggagcagtgaggtgactttggcagctaacaggccactagtatcctactaaagcttttgtctggataggagcaacatgcatgtttacagtcttgcaggtaagagaccttggcaaataatcctcagttaccagaagatgtatccataactgcctagcttgcctgtcagtttttaatagctaaagatataaatctgggtaatctaactcaaatggcttagtttcattttaactcaaatgatatggggaattttatgatcttgaaagagcaggttttgcttcgagaagccatttcttcagtatggaataatgagttgtcaggaagattgagtacaatgggcatttgccctggtcctaatcaacagcatttggacccagaggaagccagctatttttgtaagggccatttctcatcattaagtttccaagtgcttttttagggtttgtctagtaaaaagcactattttgaaaaacaagcatagtaagggtagggggttgtggcatttaatagtacgttttaaaaagctaatggaaatactgacttttaaaacaagatttaggacaaattccttaggcatcagtcacactaatgcatcttctgagtcaagaactggctatcctttctgtgtactcagtccggaattgcatgtggtgggtgcttacttatttgcagtctcaatcaagaattctcactctcaagatagcagaaatagataagcttcaactgacaaatttggtacagaagtcatggaaaggaaggtaagtcttttgccaggcatcatgccaggcatcagcatctttcaggactaaggaaacaaaagaggaaaactcgattttactacatgttaactctactgaatacctccttgaatgtcagattccttatctgtaaaacaaaggttttgcatttgattatctctaagatccgcttctgcccccagttttaaagtttgatagggaaagargtttaagtcaggataccaggccagggaggaaaggaagggagggcacaggcctctggagttcagctgcctcccccattaggattgaagtcccagctgctggctactgccttgagggaggtatcagccttttacttctggatcttggcctctccttgttctaccccttcccaacaacaactgaacataccaagtgcttgctatggcccaagcactgttgcaggtgaagctgcagcatgaacaagataagcaacatctctgctccccaggccctctgcagacatgacacctgcgggagacagacactgagcaagccagtggatacaagaactgggaaaatgagaagtgctatgagggcaagaagttgcaactgttttcttagctacctggagggagggaaaatcattttctggaagtttttttctwtgagttttgtcttagctttggctgtcataacaaagtaccatagacagtggcttaaacaacagaaatgtattttctsatacagttctggaggctggaagttgaagattgggatgccagcatggttgggttcttgcgagggttctcttcctggctttcagatggccgcgttttcactgtgccatcatctggcagggagagagagaacacatgaactctgatggctcttacccagacgctaatgacatcttgaggcctctacctcatgaccttaacccagttacctcccaaaggccccatcttcaaatgccatcaacaatggggattagggcttcaacatctgaattgggggtggggacacaacattcagtccaccataaatttgtcataggaacctgaagatgaggagccaagcacagtttttagaatttgcataagttgtagattactgtaattaytgtttttgcctctatggctgagaaactttgggtcaaaacgagccttttagaatgtatgaattagttatctaggtagccctgaagttggctctagatttattagaagctattttaaccattgcattcactcaagaaaccaccgcctatctgtgaagcacagtctatctgtaaagctccctcacaataaattcatctcagaaatatgtagtctctagtgtgtgcccccaactgctgaatgggtaggcctagctcagcacagtcattcgggcattaaatatggcagaaatgtggtccacctcatgacgtgcaaacaacagttggcttgtttaatctgcactgctttgccaaggacgtgtgatttgtgaggtgctggaggggaaccaattttaagagtcagcctgagtgtcagcctcatctgtctgctctgacttttgtctgctctctagcaggcactccatctcccttttcaattttctaccctggaagtgctcccctccagggaggaagatgagtcagatatgcagctgtgatgctaaatgattcaatagagtcaaaaacaacacagaacacagraaaacgcattgtttaatctgactcaattacaagtgggcaaggtaggtgatggagggcaagtcaaaagcataacgatgtcaagctttggtagaacctagcaaaccggaagacttcagggtgtttggaaaggaatgtgtaggggaragttgtctaaaatgctgtaacagctttctgtgttgctcttctcactgccttagaatttagagtcaaaataataatgatcttttcttcttttagatagccttcctggcttcaacccacaatcagtctagattctagacagtggttctcaaccctatcagagtcaatactccagtctttaacaactaatttgaagtgttccttttataacaaaaaccttaatgtattctttattgtcctactataacaatgttgttggtccctacccccaccgcataccccttggttgttaccattttggtgcactctgagcccactccagctgctagcccctccacttcctatccgaaggtatacatgttgcatgctggaagagtcagaaataatgctctctgggaagagctcttaacctgttggctctaacaggggccaagagagtgagggtatttatataccaaggttgccattggtgtataaaaaccctcatgttgccattggtgtgtaartactctcactcccytggcccctgttcccccgtgggattaagctctagttgcctacagtggttacttcttgatracaacctattactggctttttcaccttccctgcctcaataccctactccccattgtatattaaaccagtgcaaaagtgtcttgtgtttatatgtaaagaaaagttggcgtctrgattcagataactacaggttttattgtttttcagtgacatgatagttcagtgggacatttgaaagytatacagggcatgaggcgattcttcactgtgtagggcaacttgtggaaaactttgcttaaagagcagtaggcatattttctttgccygtgttttcttaatcccttcctccyctaccctgttggccgaaatgtagrcgtgatgactggagctgcagctgccatcttggagcaggtagacagaaccatgctacaccctagggtgacagagcagtagccggaaggaacctattccctgaggacttcrtggagcaaggctgccctattagccctggattctctctgtctctgaactttcacaygaacaagatataaactactctgctaagccaaaattattctgggtttctacttcttgaaactaaatctacctaaagcaataccaaaaataaacattaaaataagcatttcaaactagttttcaaagactggtattaaatctgatagggttaagaaaactgtctaggccaggtgcgatggctcacacctattatcccagtgcttagagaagccaaggtgggaagattgcccagaagttggagaccagcctgggcaacatagtgagaccccatctctacaagaagttaaaaattagccgagtgtggtggcacatgcctatggtcccagatactcaagaggctgaggtagcaggatgatttgaacctaagaggtcgagggtgcatgatcatgagccatgatcatgccaccacacttcagcctaagcaacagagtgagaccctgtctcaaaaaaaaaaaaaaaaaaaaaaaaagggaaaaagaaaactgtccagactctatacaaattgtaggattgagccaggaaagcactctagaaacaaaacaaaacaacagatcgttacagtgttgtctctaaattctaagagtgtgcctcagtaataacccataattcttgcaactgtgaccagaccagctagttcttctatgaagaactataaggtgcaatgagaggaaatggggcacctgagtggagctggtccacgcaagacttttctgagctctaatgatgggtaaagtcaactgggtaaagaggtggaagataaataaatatagtatttgtcrtttacttctaaaaagtgggtaggtgtggtttctaggaaatcaattcttctgaaaggctaaaaaatgtgtttaaaacatggagttagggggagcattttatgcaatagtcgttttctctttcacgccactggtgatggttaagagtaggcaccacaggggaagactgtgtttcatttgatgtgtatcccagtgtgtagcacagggcctggcttgctgaggaaatgctattgaaaatatattccagtgtgctgagagctggtggccagtgggactgagtgagctgtgtgccgtgtattgacccgcttcctagtcctgaattcctttcagaagctccrgcagggaggatgatacagtcagacaaaggagcagatccaccagacaagaaggacatgaagctttctacagccaccaatccacagaatggtatgtgtcaccaggactccttttctagaccagaaagtaatatcacctctgacatgtgatcaaatgaataggcagaaatcctgacagacttactgtgatccctatgaggatcttgtacatttttggttgcactactgccctaccagtgataactttaagaacaaatttcaagccaggaaggaaataaatggacatgatggattcaaaacctttttttcccttacctgacaatgttttatgtaaaacttagaacttcttaagttgttcacattcagaatatcactacaacactgtgaaaatactgtcaaaaaatagaatattcactaaaatctgtttagagaccctttaatcaggagaatactgagctttgcattaaatctattgggagttagaatttttcaatatcactctcaataagaattttttgagaggatgaaatgactcttatgtttgagttagagaaagaggatacagaacacaagtagataattttgggataaacgacaggctggtaagatgggggaggggaaagcaatcattttcctttcatgacatcttacatctgcacatcacgatctattattttactcagtgttaagaacaacactatgacaaagctagcaccttctcatcttgggcaaagaaactgggtttcggatagctatgtgactttgtgacgttcacaaagtaagagrtggaacagggcttgaagtcagatcttttggcctgagatccagtgtcatttccactcctggtgagaccccatggcatgccccagctatctgagttgcctttcacatttacacccgcacctgccaccccatctctgctctcttcctttcctaggcctctcccagatcctgaggcttgtgctgcaagagctgagtctgttctacrgcagagatgtgaatggagtgtgtctcttgtacgatctcctccactcgccgtggcttcaggctctgctaaaggtgagtgcttctttgctcggaagcctttgcttgctgaaggggttgtggrgagtgtgtagaaaatgacagcttcagtccattcaggctggatagtggaatagtttataaacaacagaaattgatatctcacagttctgtaggccaggaagtccaaaatccagtcggcagcagattcagtgtcttttgagggctccctctctggttcctaaatggtaacttcttgctatgtcctcacataatggaaggggctagccagctctcttggggtctcttgtataagggcattaattccatattcatgarggcagagccctgatgacctatcggctcccaaagaccttacctattttttttttttttttgagacagagtctcactctgttgcccaggctggaatgcgctggcctgatctcaactcactgcaacctccgcctcccagcttcaagcgattctcctgcctcagcctcctgagtagctgggattacaggcacccaccaccacacttggctcatttttgtagttttaatagagatggggtttcaccatgttggccaggctggtctcaaactcctgacctcaggtgatccgtccggctcagcttcccaaagtgctgggattacaggcrtgagccaccacacccagctagccttaccttttaatatcatcacatatgcattttggaagtacacattcagatcatagcaactacttacccaatggtgtcatttatcaactggtaggaaatttcaacttggaaaaagttcttagaaggcaactctcagagaagagctacacaaacttcttcgcttaggaaggaattaacttaggtggaggagaatatggtagtcccttccttttctccccacagctctttttcttccagaggccccctggaatcacaaaacagccaccacgatggtcattggcaacactttatcagctggctacaaccgtttgtccttgcagcaaccctggataaataaaagtgctttaaaaarttattcctatttgtttgttaaagttagaaagtaaaatatctacagttctgtttaggtaccctgaagtttcttattctaaagtttcttctggcccagtgtgatggttcatgcctgtaatcccaacattttgggaggccgaggctggtggatcacctgaggtcaggaggttgagaccagcctggccaacatggcaaaaccctgtctctactaaaaatacaaaaaattagccatatgcagtggcacgcacctgtaatctcagctactctggaggctgaggcacgagaattgcttaarcctgggaggcagaggttgtagtgagccaagattgagccactgcactccagcctgtgtgacagagagagactccatctcaaaataaataaataaaatagaataaataaagtttattcttttttaatttggctaaaattccatgcactatacaatagcgtctaatagatagtagaaaaatagcatctactatctagtagatgccactactataattttgttgttctgaacaagtgttattattaagagagatccttttgaagttattttttgggatgtgggtatttccttcacttaagtgtgaaatgtggtctgtcttatagtgcatgttaatattatacaataaaagtggcaacatctttggcatgaatgaagtactcctcatagcacctgttataaaacacctgatttctatcaggcattttcccacaggatcagctaagataggagttttaatttcatgatgggcattgcctttgctcaccactgctaggcccttggtgagttatccaatcagccttcatcacttccaggtaaacctgaatgcgggccctgggatagagcagggaagcagcatcatcactaatctggatagaaaagactgggggctcagccggccccttgggccttatttcttcgtctgtaagagaaactcaattcctaaaataagatcaaggggtgcattgcagagctaggcaggctttggtgtcctcagcccaaacctagatcttggtatggaaaaaaattcccaagggtatgtggagatgaagttggaattttaaaaaatgaacttgtactagagaattaggagaggaatgggaaacagccccaaagcacaaagcagagtacagagaagcgtttgtggcatgcccaccacttattcagaaccttcagtggccctgagccacacagctcacatgctgcacaggcgcccaacacaggggtcctcacaggtgtctggtcctaaagggcccctcctttaagacgctcctttatgcatcatctacaaatccccattggtttcagtcccagacaccctaccctcactctgtttaacaagattaaaagtttgaatttctttttattactgaaatgcttggagaagatcaatttcccaatggcagccaataattaagcttttgaagcatcggggccaccaaactcaagttcatttctctttggcaactagagacacaacttactaaacrccaaccacaccgtgctgtgcagccattggtgcagttgcctggggtgtttcttctctttgagagtcttaaatccaaaatggcaatagtcatattatcaatatcaattctccctcccttgtccttctgcagatttatgactgcctccaggaatttaaagaaaagaaactagttcctgccacaccacatgcacaggtgttatcctatgaggtaaggagattttattccacaggatagtagagctctgatgtggtgccattttccccacattgctagttcaaatgaattaaaggttctaaggaaaagttttattgatgactatgcatctaataaatgtttctaattgaactttaatataaggaagaacattggctgggtatctccccaaattaaaacactccccaccaccacccacgtcatttttagcgtgtgttcatttctttcttttttcctaagtctcgtactccatttgcccttcataaacagggtaatgttatagtaataattctcggatttatatctctagcctggagatttccctaaattccagtctcaaatatccaaccgcctcctctccatctcacttggatgtctaacggactcctccaagttcacatgttccaaactgagctcccgatcttccccacctgccgatcacccccacccactcttctggaagccttttctatctcagaaacgatacctgtgttcttgcagtgctcaggccagaatcttaggggtcatttcgactctctttttctgatacctcacacccaatcagatagcaaatcctctcagctctactttcaaaatatatccaggatctcaccaaaatatatccaggatctcaccaccccataccatcatcatcatctcttacatagatagttgcaaaattgcctcctatctggtctcctgtgtccactcttgctcctctacagtctactctcaacacggcaaccaaaaataccctctttgaaagcaagtcaaatcatgtcacttcctcactaacactcaaacccttcaaatgacttcccatctcagagtaaacaccaaagctctttttttgttttgcttttttgtttttgatacagagtcctggtctttcacccagactacagtgcagtggcatgatctctgctcactgcaacctctgcctcctgggttcaagcaattctcgtgcctcagcctcctgagttgctaggacaacaggaacccactacacctggctaatttctgtattttgggtagagacggggtttcaccattttggccaggctggtctcaaactcctgacactaagctatctgcccaccttggcctcccaaagtgctgggattacaggtgtgagccaccacacctggcctaaacaccaaagttcttacatagctgaacacaatcaagctgctgttacctctttgacttcacactcaatgctttctccattcactctgttccagccacattgaccccttgttattgtttaaattcatcaggctgggtgcagtagctcatggctataatcccagcactttgggagcctgaggcaggctgatcacttgagcccaggagttcaagaccagcctggccaacatagcgaaaccccatctccactaaaaatacaacaacaacaaaaattagctgggcgttgtggtgcatgcctgtaatcccagctacttgggaggcacgaaaattgcttgaacccaggaagtagaggttgcagtgagccgagatcacaccactgcactccaacctgggtgacagagtgagactatctcaaaaaacaaacaaacaaacccaaaaaacaaatcatcaggcatgcttctgcctggggccctttgcactcgccattccttatgtcagcaatgctcttgcccagatatatacctgatctgtccctcatctccttccagtctccactcaaatgccaccttctcagtgaggcttttcctggtcacctatctaaaattgtattccctcctagcacttcctagccagcttccctggtttatttttcttcttaacacttgtcaccatcaaacaaaactattttacttacacatttcatttgttgtctgtgtctcctccctagaatgtaaactccatgagaatggagatttttgtcagccactgctgtttttgcatcacctaaaacagttcctagcacacagtagtgttcaataaatatttgtcgaatgaatgaataaatataatccattttattatttattgcccatcccatattaaaagaaacagcaaaaaagaaagaaaaaacttctgctctcaattccagtaatcaacaattcaaattgttctcagttgtccacaggaaaagcacatatataatattttattcagttgaaatcccagtgaatggaggtaaacctttgtaaactgcttgttttcatttgactgtaggtaatggggctgactaaagtcttgaaaggtcttatgtcctctgaaagcaggtctacgcctaaaccacagcagagagagcagaatttttttccgcttagcactttttattgtaacaagcattaaaattgctaatcaactgatactctaaaagagaaattatgatttccattttctatttgaagaatggagcatcccatgggattaagctctttgagttccccaggtacgttcctagagaaactcatacagcttcataagcctgcaaagcattgacatcagccaacagctattatattttagaggcactagaggaaaagtgccttggttcatatgctgttaccaaattggtacatcctccatgcctatgtgccaggattgggcattgggtttagatccatctcaactcttgaattctatttgctatattaaagtagcaattttaatgaataaagaaggatggtaggctttaatggatggctttatagatgaaaaagaaggctccagtaatagctttttaaaggtcaatatcatgttagtatgtatgttatccagcctgggtgaggttaagtaggtgataaagattttttaaaatttttataatgtatccttttccatgaaccaggtagtggagttattacgtgaaacccctacttcccctgagatccaagagctgagacaaatgctccaggctccacacttcaaggcaagtgcctgctaaaatagaaaagatgtccccatctggcacatagacaaagttgggaaggagaaatatatgtgatggaaaatgttctctctgaatagatgttctattactgtacacggttactgaccaacagattgtacttaaatatgtgggactcagatgtgactagctcagtgttgtcaatcatgcagtcaagcctgctgtgtttatgaggaggcatccagaactttccatggtgctttgtttcccctacaaagctattgcccatccaaaaatcttgggtagcaaacagggaatgttctagttatagaggaatacytccatgcttcctttccaaagtgggactattttgagttttagataatgtgtgtgtatttggaatatacagtataatgatgattatccctgtgagagggtttatgaagaacatttgattgcagaacagaaacctatctcttagtacttacagatttgagaccaatttatcaataaattagaactttaagacaaygtctgtatttggagtgctgaaatttatcagtcaaaagttataattcacaacacaaccaccagtcatcaaatatcctcaacggcacrcactacttagagaattttctgagttccaactaaattgtgtctaccaatctcagtcagggtggcagagtgacagcttctccagcccgtgaaatgaagaatttaacctagtggactagtcaaagaaactctttgatcataccctatgatcataccctatgatcaaagagcttgatcatatgaactcctcattctgtaccacatgagcccttgagtgttactaacaaattaaaccagcaagatattttgattgctgcccttcgttctaccttaattggggaaaatattataaaagttgttttgtagttcaaactccacaggggcatcacagattacatgggctgccaggaaataagaatgtcgtggcataatacattttagcagaaatgaaagagtgtattgtgcattgcttaacctctctgtgccttatttccttatctgcaaattgaggacaattaatgtacctgcctcatagaattattgtgaagatcggattaattcatataaaatgcttcgcactgtgtctggcatgtctgtattggtgtttgttgttgttgctgtgtcttagatagtattgagttactatcttctagaggggtttggcccatgtgtgacatttgctcaccttttccttccctgtgcccaggccttgctcagtgcccatgacacgatagctcagaaagattttgaaccccttctccctccactgccagacaatatccctgagagtgaggaagcaatgaggattgtttgtttagtgaaaaaccaacagcccctggtaaggaaatcattttttatctttccatttagggtaagcttaggttaattgtgaaccaaattatatctagtggttacttgggcagtagccttgcctgcgatcacatatacagtgataataacggctgtcaactctgcaagttttgcctgtggtttcaaacatattacatgtcacggtgttttctctaaggaaagatttcagcttagtgtttttcttttgtgaaaagtaagatgagatttataagacatttttgtgagaaataagacatatgttttattttaatatttggctttctgacctatgcatgtatttccctcaattccattgcatttgcctatttccttatattaatgagaagctaaggaaggcattaatytgattttctaagaacagtccctctaattaggttttaattgtgggaggtttctgtatctttggatgaatctaagtattcttttatgtctgtgtggttgaaatgagaccccaggaagccaaagccgaatggcctttcctttttgatggcatgctatgactgacaggccacagggcactgtgtggtccctccgtccctggttgcctgaatagccttgwttgaaaraccagagctgcattgattgaaagaccagagctgcattgattgagggaagccacctggaaaatggtcatgtcaggtaacagagggatctcgtctattctctcttcagggagccaccatcaagcgccacgagatgacaggggacatcttggtggccaggatcatccacggtgggctggcggagagaagtggtaagctggagcagctgggattgagagttaccagaaaaacaggaaacccttgactgtttaggcttctttctagagaaatcccttttttttctttttttttttctttttttttttttgagakggagtcttgctctgtcgcccaggctggagtgcagtggcgygatctyggctcactgcaagctccacctctggggtttgccattctcctgcctcagcctcccaagtagctgggattacaggygcccgccaccacgccyggctaattttttgtatttttagtagagacggggtttcaccgtgttagccaggatggtctcratctcccgacctcgtgatccrcccacctcagcctcccaaagtgctgggactataggcgtgagccacacacccgtcctgagaaatccctctttcttaacttgggtcagggctttagtaagttccatttcttggataaagcagtaaagaaagaagaaacaaatattccagagaaatcttactcctctccttcactgagtccttcccattctaggtaccacattaaagtctctcagtttacattctcatggcaacctcaaaggtaactattatcatgccattgtatagatgaggaaactgaggctcaaagagattatgaaactaacttgctcagagttacaccgtttgagtcaggattcaagctgcttagctctatattcccaactttttctctgcactttgtccttctactttcagaaaggcatagctctttcccatcttgaaatgccttttgctcacactttcaaccagttaaccagattttcatcctttcactgctgttcttctaaaaactttttttttttttttgagacagggtcttaatctgttgctcaggctggagtgcaggggtatgatcatgactcactgtagcctcaacttcctgggctcaagcaatccttccacctcagcccccgagtagctgggtccactggtgcacactaccatgcccagccaatttttctattttatgtttagatagggtctcactatgttgcccaggctggtgtcaacctcctgggctcaagcaatcctcctgccttggcctcccagactgttgggattacaggtatgagccaccacacctggctactgttgtgcttctgaaatgagtggttctatacctgttatacatcttcactaccccgaagccctaaaacctagcacatgctttatacttcaacattctcattgtaaataccaagaatttcctagttgctaagtccattggcccttccttcctcctcagttttcttttcttttctttttttttttttgagacagagtctcactctgtcacctaggctggagtgcagtagggcaatcacagctcattgcaacctctgcctcccgagttcaagcaattctcctgcctcagcctccaaagcagctgggattacaggcatgtacctccacccccagctaattttttttgtatttttagtacagacagagtgtcatcaagttggcaaggctggtcttgaacttctggcctcaagtggtccacctaccttggcctcccaaagtgctaggattataggcattagccgccatgcctggccctcctcagttttattttcacttcttgaccacatctgatgctgttgacacctttcttgaattttttatcatgcttcgtttctgttctataacaccattccacttcttctctcaactatctgacaactccactgttttacctcacatttctcaagtcttcacttaaaccccaagtttctccacattttctcttttgaataatacctaccccatttcctttttgttgttgacttatgaccctgacatctttggatttagtgctattttcttaccagcgttctggttccattttacaacatcagactagcaaaaataaaaatatgaccataagtcaatgccaagtatttatgacgaggtagaaaaatggactgttcacacatttctgggggtgatgtaagttggaataaccagctttcttttctattattattttatattaaacatttttagagcatgcttgggttagtgagttaaatagctatcgaggtagctactgctatttttatcctacttctttgtatstttctttgttttttgttactgtctgcctagggttgctatatgctggagacaaactggtagaagtgaatggagtttcagttgagggactggaccctgaacaagtgatccatattctggtaaatcttctttttgcctttttgtwaatgacttggagaaatgccaaggctgaactgggaccatcaagcccaygtgtgtgcactgggatgtaccggggactcaagttctcttggcagctttctccctccaggctcccagaccttgtctgtcacccatgtcacttgctgacctccctcctctaccccgagaagttctggtcctggctgggaaacttcccgtcccaagcagctccttcctccttcagccacgggaagactgccagggcccccagcmcagctccctcatcacctggtttgctccattggaaactgaacctggggtggacagagtgagacttagtaggagagtctgaacccaagcaaaccactccttcccccactaacacttttctatggctgaaatgttcaacatcttcctggagggcagcctttcttatagtggatagaccagtggttctcaaactgggttcctgccaggatttcatagcagtggcttagagactgaggcgaggagtggtgctatgagacaagcacctaaatcctttgtaagccactgctgcaagattctgtgtggtatagaatgtgctgcaaaggaagcttgaagtactagaaatcacagatatgcatggcttctaccccctggtgccagctgtgatgttgccgggacagtgggattttgaaattcctgagtacaaacggggtcttaatctctagatgtttaatgcccatcacagtgtatgtaacaggggaattcttccttcccccggtctgagagctccctatttcctctattagtttggaaggttgtcagttctcccagaaaacttaggagcccctcttcttccccatcagactggggtatctggtgtagaaacaggcattcaggaaatgcttactgagtaagggaataaggagggaaagtcagatggagatcctgtctctccccagggcctgtgtgaggaagaccttgctggtggggtgtttctgtttcagtgtagggtgggggggggtccctggaagaggccacttcagtgtggcttttagcagaccagcgaccccagaaccacacagcagggcagatgcaggggtaaattgcttcctgatttccatttctggatggtgacagctgcagagcccttgtgaaaggctcttgggggattttaccatgaracctggatacattgcactgtaactctgtccaccgagccccagtaaccctgctagctccatgattgtcatcctttctcctctcttattttccaggccatgtctcgaggcacaatcatgttcaaggtggttccagtctctgaccctcctgtgaatagccagcagatggtaagaatttactgagccttcaatctcacacacagtaaatccccaagtaacagcaactaaatatgatgcgtaataatcctatcctttgtactgtgttggacctggrttcaagactgtgttggatatttttcaatactgatggcccgagaagcaaaataagtaaatgagtacagtacaaggagatgggatactaagaagtcaagaagcaacatmaaaaatcatgaacatttgagcmtaaacttctctaagctaagagattctgttcccaaagatgctttttatcatggtacttaggctcaggaggcgagttctcctttttggtgagggtggagaggaaagataggagtagcaggtggaggagtgggagaaatggttttaagtcatgatggcccatgggcaagggttcttcggatggcaccattaggcaccttctgatagcgtcattatgcacctgccatcaggtgtacgtccgtgccatgactgagtactggccccaggaggatcccgacatcccctgcatggacgctggattgcctttccagaagggggacatcctccagattgtggaccagaatgatgccctctggtggcaggcccgaaaaatctcagaccctgctacctgcgctgggcttgtcccttctaaccaccttctgaagaggtaaggaacgtcaccactcctggactcagggctgaaccatcaggaaacaaaatgtttttcttgggtttctgttacctcaagatgagataaagagggacaagcagatgaatgaacacacacacactggtttataaatccaaatgtcaacttatcgataaaccctaagcatcttaaataccaaggagacgagaataatcatatcagctagaaaacagggaaaagtcttgggaaactaaattaaacttaaaaagtgctatggcctgaatgtttgtgtcctctccaaaattcatatgttgagacctaatccccaatgcaatagtattaagaggcggggcctttagcaggtggttaggtcatgagcactctgccctcatgaatgggattagtgcccttataaaagaggcctgagggagcttattttccccttccaccatgggaggacccagctaaaaggtgccatttatgagtcacggagtgggccctcgccagacactgcatccactggctccttgatcttggacttcccagcttccagaactatgagcaaatacatctctgttgtttgtaagtgacccagtttacggtactttgttatagcagcctgcacagactaagacaaaaaaggattcatctttcaaggctgagttgagacctcaatttcaacccaccaccctcaccttatgctactgagttttgacaagctaccaagggagggcgtgcaaatagaaagaagcagcagtcccaggctcagccactgttaagagatcaagaagaaaaaatggaaccagtaaaagatattgagaaggaatgaccaacgaggcagaatgaaaatcaagactgtatggggtcctcatcagctatatcaccttctgctgggaaggctgagaattgaccactggatttagcagtatgacagtcattagtgatcttaataagagcaatttcagtggagaagtggggccgaaatcctcattagagtgggatttgaagaaatggatgacagtgagcataggaaactctttgagacattttgggaaaaagcagagcagaatgatggagaaatagccagaggggagagtggagtggtgtgagcgaaatttttagatggcataagtaatgggagtcatccaccagagggaacattttgatgataagggagaaacagaagagaattgctgttgttgatgtctttgagcaggcggtaggagatatgctttagtattcaagaagagagcttggcctgacctaggaccataaacagctcatccatagaaatggtaccacgagggaagatggagtatggggcacagctgagggtggagcatatggcaggcacttgtggaagttctctcctaactgttattttctcagtgaaatgagaaatcataagcagagagcagggtggggaagggggcattgggaaggagagagtagaaagcttgaaaagtttccatgagagttggagagcaaacagattaggtaaacrtagtgtgatcagcattaaaggccctcttaagttaaaggtcatatatttgaagtgcttctggggtgcgggtccagattagacagagggttggatttaacagcaaatcaagagggggccaagggacagattataaggatggagtgtgacatgtaagctgtttaggagggagatgaggaaatgaagcaggtgaggattggtgagaaggaagtaagatcaatggattgcaggtctttatgaggtcaacggtgtattggggctgggaagatgggaagtgttagtaggagaaagggatgctggaagttaaaattaaggagagattgctgttgtcagtactgatgaggtcttgggtatgacaatgggaggcagtggctgaggttgaatgagggaaaggttattggaaaagaggagatcaagcacccaataggccagggtgctgaaagggacatttgtatgtgtgataaaatcattgagaactgtgacagaacagtgttgagacctaggagtgagcaggagtgagctggcgatggctaccagaaaagtagtgggatgatgttcaaagctggggrctcctagggaagaggaagaataatctggaaatggcagtgagaagcaaggacacaccccccacctccaggcccagtggaaggaaagctatacacaaggatgtgctggagccatgtgacgcgagccatctcttcacacacccacgttcagtgaagacaggatggtagcttgaaatcagccaccgtgagagcatcaacactgtagaaatcagcagagcctccgagtcagggcttccatcccccagagctatttcaccagcaccccactgggcgtgggagaggaaacatccccctcttgaaggctgcaggagaagcagaccacagggagagttgggctgcagttaaagcaagaagaaagggctcaaagaagaggctgaggtctaagagagtttgctgaagatttgctgtgggttccagagggcgtgggtgggtggaaggggtcttatagggattaaagcacaggggataaggggtgacctgagcttgggrgctgaaggacatgaacagggataaaggcctaatgagattagtcctcatggtttcaggtcaraaagtggtgaggagggtctggcaggggccttgcaaggagcacacaaaacccaattatgggtttcttgggggggcacacaaacaaagaatgataggaagttctcatgctgcttttagtcattgccacrtgaaaacctaatatgaaaataagaaattaagcaatttcatttagaagcaatatgtcaatagcagagtctacacaaatgtcttgttggggacagaataatggaaggcacctcggactctcctgaatctcattcagaaaaccaggaggcacattggaggactggaggagggtgttgagactaaatccgctgccatatctgggcaagaggcctgccccgagcgcrggctgatgtggcttttgagaagtcagtatctctgagcctcaataaatgaggtctttgatatctacaaacaatttttctctcttcctacctctccaactttgctatgagtaaaaatgagctgggtattttgtaaaatacggattccccggctctgccctcccctctctgaggatctgattcaatagatatggactgagccaggaatctgcatcttcaccaagcgcctcaggtgctcagggtaagtggtatgaagagcagcattgtgcttaggaatagtgaatgagcgcataaaatattttttaaactctttataagagtgacagatttgaatgcaagtagctgggggggttttgttttggttttgcttgtttgtttttactttcaacaggtagaaaattatatctgattttagaaaactgtgaaagagtgaggaggaaggcttctccaaaaagggcatattggtggaaaataatacccatctaaaggagtttggaatgactctattgcaaattgggggagttagatgttgatggtttgtgccagagtagcaaatatttttggcaagtagacgtgactttccagtgagaggccccattcgctggagtttcccccagagggaacatgtgaagatgtacaggatagcattttgtaagaatgaaaaaccaggagctcccagaggagaaaggccagggtgaagcctagagaggaagctgatagagaatgagagacacagagacagagatagagagagatcagactaccaggtaattaaccatggagtaaccaaggaaaggtacagaaggttaaaaaacaggaaacacagatatttacagagctcatcacctaactaggaatcaagaatcttggctctggcctgcatgtgctgtgaattaaagtaccttaattatgcagagaatatttctggaagaatgcacaagaaactgagcagaaggaagggaagaagccttactttttaaatgtttttattttttgagatggagtcttgctctgtcaccaggctggagtgcagtggcatgatctcagctcactgcagccctggcctcttgggttcaagccatttccctgcctcagcctccagagtagctgggactccaggtgcgcaccaccacgtccaactaatttttgtatttttagtagagatggggtttcactgtgttggccaagctggtctcgaactcctgacctcaggtgatctgcctgcctcggcctcccaaagtgctgggattacaggcgtgagccaccacacccagcctacttttttatactgttaagatttttactctgtgtatatgttatctcttcaaataattaatgaatctgaatgccctgcatgtccatgctaattgagtttacagtaaggtctcatgtattatttagtcctcacgatgccaaatgcgctgagccccatttcaaaagtggggaactaagtttcagacattaggagatttgtccaagatcctaaggaggggaagcatgcctggaacccaggtctgttgaatcccagtccatcactttgtagattatagcatagatgcctcctgctgctaactgttcaacctccaccacattgcttgacttccctggatcagtttcctcatttctaaagtgaggaaggtggactaaattggcccttcttcaactctcttgtgaattagaatcacatggagagtttgatttaaacatgtagatgccctggccttatctccagggaattggaggcaggmgctctgggaggcccagattatttgcattttaacaaacacctcagatgtattccaaagtttgagagattaaattagagcttgttgcctttaacatacatatgacttacctgggctcttattaaaatggagattctaatttggaaggcttggggtggagactgagattctgcagtcctcacaagctcccaggtaaaggtgatgctgcagttctgggaatacaaagaacagagtgtcttcgaaatcttctcttgctccaaacttcacagtgttgaataaagaaggaagagcaactttgcttagaaagttgctttgaagtaggcaaggcaaggaaaacctgcccaaagaaattgctgggggactcaagggaagaggaacaagtcaacagaggtttcaggtgccaagaaaaggtgaagccttgccctggagcccaggggtgatgctagagatcaagaaaggagcagagtcatctatagaaactgtagagagcctctaatagcctgagagggaaacctgaacatgtcatgagaattcgaaggagactgcaaagacaggctaacatgcctgagaggcagcttaccacgggtcatttactgaaactccatgtgcaaacttgtgatcatgtgcgagattgtcactgtaagtctttgttgttctgaaaagatcccgtgaggcagaagaagacatgagagagcctatatgtttggaaaatttatttgacaatgtatttggagaagcaatcacccttttcacttgagtgaaggcagcagaattctaagaaacattctgtttgtcgttgctctgggtctgtttcatctaggttaacaaagagtggtttttgtttgttttttgtcgcatggttttttcccccccataggaagcaacgggaattctggtggtctcagccgtaccagcctcacacctgcctcaagtcaaccctatgtgagtattgcaactgcccgacaggttcttcctgtttgcaataaagaccatggcattgcagtaaataaagagtctaattgatgtgaggctggccatgccwcatgggagatggagttgttatttaaatcaatctccttgaagggccctagattaggggtttttcaaaggtagtttggggagggcgtgggggtggtggctattcagtgggcacttgctactgattggttggatcagagacgaaatcatagggagttgaagctgtcctcttgtactgagttgcttctgggtggagccacaggagccattggttggtgggtccagatggagccacaggtgtcagacatgcaaaaaacctaaaaagatgtcacaaaaggccaatcttaggttctacaatagtaatgttatttgcaggaattattggggaaattgcatatcttatgacagtctacaccttagcagaattcaggctcctctccttccactaacttgatggtctctcattagctttataaaggcggctgagttttaggggaaggactgttatcatttaaactataaataaaatgtctctcaaagcgaaccctggaatgaaggcagcttgaaagctaaaagcaagaggagcttgggctagatcggatctcccccactaccataattttctcactgatgtaatttttacaaaggcaatttcagtatgtgtctacctcagacccagcatgtgcatcctgggagagcctgcttcctccctccagggctggcttcctgcctaggagatctctaaatgtccccactgcccccaaataatctccctggcagccagccatctgaagtcctaccgttgacattccttctttggatttagaagggttttcagtttatgaaaatgcatatgttcttatcttggtgacacctgaagacatccctccccaagttgaggccttccaagatctctgcagctcatatgtgcattatacctgactggcaagcaaggctgcataactacacatataccttcatttgggttctatcaacttagaggacttaaccttcacactgttcagaagcactgattaacaattgtgtatgcctttggtgaataaatatgggatggaattgttacttaatgaatgcagtttgattgctagacaatattattcaagcagctggggagtggtgagtaaaggctccatggtggcaaatgcttgattaaaggtgctgtggcttggcagaggccagctgagcctactgagcgaggcccttctgaaatggccctcaggtgggccctggaaagggggtaagggagggaactgggcaccagaaggacggrggggaggcaaagagaggagactggaaggacacaaaaagtatcaacatcacagatctgcccggggcaagcctcacccactttattatgtctcccttctccaagccaaaaattacttttccttttattttcttattgaaaagatgtgaggacaactataaaggcagtttttgacaaaagaaaacatgccttctcaatgacaatattttcatattaacttccagtggtgaacacatattttagatggttatagtaatagctgcaataccactttttatttttttaaacttaacatctttttttttcttttttaattatactgtaagttctgggatacatgtgcagaacgtgcaggtttgttacataggtatacatgtgccatggtggtttgctgcacctattaacccattatctacattaggtatttgtcctaatgctatccctccccttagcccccaccggccaacaggcccccagtgtgtgatgttcccctccctgtgtcgacgtgttctcatagttcaactcccatttatgagtgagaaaatgcggtgtttggttttctgttcctgtcttagtttgctgggaatgatggtttccagcttcatccattcccattcagtatgattctggctgtgcgtttgtcataaatagctcttattattttgagatacgttccatcagtacctagtttattgagagtttttagcatgagggggtgttgaattttatcaaaggccttttctgcatgtattgaggtaatcatgtggtttttgtcattggttctgtttatgtgatggattacatttattgatttgcatatgttgaaccagccttgcatcccagggatgaagccaacttgattgtggtggataagctttttgctgtgctgctggatttggtttgccagtattttattgaggattttcccatcgatgttcatcacggatattggcctgaaattttttttgtgtgtgtgtctctgccaggttgatggtatcaggatgatgctggcctcataaaatgagtgagggaggagtccctctttttccattgtttggaatagtttcagaaggaatggtaccagctccatttggtcctgggctttttttttggttggtaggctattaattactgcctcaatttcagaacttgttattggtctattcagggattcaactacttcctggtttagtcatgggagggtgcatgtgtccaggaatttatccatttctctagattttctagtttatttgcatagaggtgtttatagtattccttgatggtagtttgtatttctgtgggatcagtggtgatgttgtcccctttatcattttttattgtgtctatttgattcttctctcttttcttctttattaatctggctagtggtctatctattttcttaatcttttcaaaaatccagctcctgaattcattgatttttttgaaggtttttttgtgtctctgtctccttcagttctgctctgatcttagttatttcttgtcttctgctagatttttgaatttgtttgctcttgcttctctagttcttttaattgtgatgttagggtttcgattttggatctttcttgctttctcctgtgggcatttagtgctctaaatttccttctaaacactgctttagctgttttccagagattctggtacattgtgtctttgttctcattgctttcaaataacttatttatttctgccttaatttcattatttacccagtagtcattctggagcaggttgttctgtttccatgtagttgtacggttttgagtgagtttcttaatcctgagttctaatttgattgcactgtggtctgagagactgttatgatttccgttcttttgcatttgctgaggaatgttttacttccggttggtggtcaattttagaataagtgtgatgtggtgctgagaagaatgtatattctgttgatttggggtatagagttctgtagatgtctattaggtccacttggtccagagctgagttcaagtcctgaatatccttgttaattttctgtctcgttgatctgtctaatattgacagtgggttgttaaaggcttcccctattattgtgtgggagtctaagtctctttgtaggtctctaagaacttgctttatgaatctgggtgcttctctattcggtgcatatatatttagaatagttagctcttcttgttgtgttgatccctttaccactttgcaatgcccttctttgtcttttttgatctttgttagtttaaagtctgttttattagagactaggattggaacccctgcttttttttgctttccatttgcttggtaaatattcctccatccctttattttgaggctatgtgtgtctttgcatgtgagatgggtctcctgaatacagcacaccgatgggtcctgactctttatccaatttgcagtctgtgtcttttaattggggtatttagcccatttacatttaaggttaatattgttatgtgtgaattttatcctgtcaaagctggagtgtcccaggtcaacttcagactgctgtgctggcagcgagaatttcaagccagtggatcttagcttgctaggctccatgggggtgggatctgctgagcaaaaccacttggctccctggcttcagccccttttccaggggagcaaacggttctgtcttgctggtattccaggcgccactggggtatgaaaaaaaacaaacaaactcctccagctagctcagtgtctgcccaaacggccgcccagttttgtgcttgaaacccacggccctggtggtgtaggcacccaagggaatctcctggtctgtgggttgcgaagaacatgggaaaagggtaatatctgggctggagtgcacccttcctcactgcaaagtccctcacagctttccttggctaggggagggagttccccgacccctttcacttcccaggtgaggcaacaccccaccctgctttggtttaccctttgtgggctgcacccactatctagccagtcccagtgagatgagctgggtaccttagttggaaatgcagaaatcacctgccttctgcattgatcttgctgggagctgcagaccagagctattcctattcagccatcttgccagccacttaacatcttatcagaaacatttttcatgacacaatctttgtagtgatattttagttacttcttccacgttttgaaaattttttttttaaaacaaactttcatttatcaaaggcacatgaaaatgctaattacagtttctaatcagcatctgataattacctgtagtataacttctggttttcatttaatttgcttatgtggcctgtgtgatttatattagactttctagaagtccatgctgaaaatagttttcaatattctattattatcctcacaaatatctargtccacgagcctcaggtttggagccactgacttaaagggtcccctctcttagggaatgtttccggtagacatgattattttttaaactactagaaagatcatttattttcaactattatagatgatccttcaattaatattattttgtatgtttctgctctgyttaagtcttatcataccctcctccccccaaaaaaattaggggcaggctactgagtccaaagatatagggcaattttattaatgaaatgttattgatgttagtttgcagatgattattaaaawgttatttactgaaggtgcacttatagttgtcttccctctttctttcccttcctccctccctctctccatctctctgtcttcttcccttcctttcattgaaaatttgggttcctaaaatatgctgaagtaagcatgttaattcagaaattcatagaatgctacccttgtagaactagctgggatggaagaaggcgggatttaccagaagcaagtagatttccatttccaacaaggctcacaaatgtmtcagttttataaagtattcatttatcattttcttactaaatcttccctgaatttctagagaataaacccagaatactaattacaataatttttgcacattacatttcttattgtaaattaatctgagaaaatatagtacagatactgtgttctttttatmccccctgcttcaatcatttgcttgtactcagcaatttctatggaagaaggtaagaaatagtatttaggaaaaaactcttatctccaaagtcttttagaaatttcttgtagtttaaagaattcactttaattcagttcagctatttattaagctcttcctatatacctagtagtgtgatagtcattaataccttgatttataaaaatatgtcattcaaagatatgcatgcaaagtataattgtcctaacactgagaggaataaagaaaagagaagcaacatttatatgcagctccagagtttaacatagcgtatggcaagaactcaataaaagctgtgaaactgatgagatgttttgtttcaactgccttatacatattacctaacaataaaactatagtgaaaattattattattattcccatgttatggatgaaaagattgacactgagagaaggtaagaacagttgtcagcagttgaaaacagtgtaatctggattcaagattccctctgtctaaaaggccctgcattagggaacaaatgggaccttcagttactatcctttccccttctccatgcccaaccatctggatgactcattatgatggtgctctctctctctctctcacacacacacacacacacacacacacacacacaaagcaagatgctttctgcttccagaaagaggaaaaaagaggtgtccccttagccaccaaccacagttcatccttgaatttggaaagggaaaacagagaactgcaagatgacttttgaaggctgatctatgggaacaaggctccaatctgtgtccccccaaaacaaaaaaggtgtatgacacaggagggcaagagaagaaggtgagggagagaggggcaagtccagggtgcctgcttctggtttgtctactcagggtcatgttacaggctgcactgttaagagttgtgaagggcaacctgggcatagcccttggtgggagggaggagctgggaactgtacggtagtggtgggtgataaggccatggtcttagcttgagcttccgtaacaagataccacagactaagtggcttaaacaacagatatttattttctcacagttctggaggctggaagtctaagattaaggttccagcagggttggtttctggtaaggcctcttcctggcttgcagacagccaccttctttgctgtgtgcttatgtggtgttgcctctgtgcatccttagagggagagggagagggagagagaaagaagagagagagagagagaggaagagaagagaagagaagagaagagaaagagagagagatygattgatctgatgtgttttttcttcttataaggccaccagttctatcaaattaaggccccagcagtatgacctcatttaaccttaattacctccttaaaggccctctctctaaatacagccatactgagggcaagggcttcaacatatgaatactggggggaacacaattcagtacattatcctagctgataatgtggaatcattgatttggggagaacaaaatcagtggccctatcttagatcccagagtcaagcgtcagaaaagtcagagcttctcatgctgttactagataatcatgcctggttttttgtaccttcctctgtaaaataaaaatgaaaattgtagtctttgtttgccctaaagaaaaacaactttgttatgtactgggaactaatgaactcactgttgttatggatggctaataacaatctaattatttaactaggaaattaaattaatctaattaattaggaaaataatctctaaatgaatataagtaaacaaatgacagtgcagaaaatctcaaccatgccactcgtttatctgtgtccctacctgtatgagacagtgttatttcataaaatttttcatatttcacttaaaaacattaatgagtgatgtggtttttaaggggtggcgataacaccttatagtgttataaaggttaccttatagtgtagcttattctacagactatactttggactacayttttacagactatgtacttttggaacatgtataagcttcatttattaaatcmgtatttgttgagcacctgggatgtgctgggcactgctagaaacaagatgtaaagtgctgaaagaaaaaattcagaacctttattcaaatcaacaattttgatatttaaaagaaaactcaatttaagaaataatttatcatttgcccactatgtgcaaaatactgtactaagagtctgtaaaaactagtgaggcagtccctgtcttcaagaagctgtctaggagaacaaagaaggcaaacccccgaatggttatagatgtagaatagatgtgcagtagcagacagttcaaggtagtaggaagaaaatgctctgcaagggggtattcattctgatcagtgtttgggatggacctagaagcatgacaggcacagggaacagtgtaagcaaaggctgtgatgtccactctaatggtagcgtaagatgcgtgaaggagagaagcagatgacaaccttccaagctgggtttagatcatgctgtagagagttttgagaattaggataagtagtttttaaagttatgttcctttattctcttatatatacttcagctaaaggtaaagataattcacatttattgagtacttaccatatgcctgagcttttcgtgcattttctcaatcctagcctatatggtaggtactgttactctccccattttcacatggagaacagaggcttagaggtcaactaatttgtgcagcattcaaaagcctatggtttttaatttttaaccattttatgttatatagcctcccacatcatacattttcatttaatataggagagccctttttatctctccaagtaagcaatagttgtaaatttatcataaggtggactgagttttattgacatacctaattttatttgtattttgtgagttttattgacatacatagggaattttttttatttttatttatttttatttatttttatttttatttttagatggagtttcgctcttgttgcccaggctggagtgcaatggcactatctcgactcactgcaacctctgcctcccgggttcaaacgattctcctgcctcagcctcccacgtagctgggattatataggcatgtgctaccacacccgactaatttttgttttttttggtagagacatggtttcaccatgtcggtcaagttggtctcgaactcttgatctcaggtgatccgcccgcctcggcctcccagagtgctgggatcacaggcatgagccaccatgcctggccgggaattttctttttaatgcagacacattttaaattctgtttctccctttctatactcttttatagaagatgacatgaagattgatgagaaatgtgtggaagcaggtaacattttctcttgattgctttgctgttagaagaaatatgaagcatgtcaattatagattatctgaagcagaggtgtccaaaggggccatgggcctttcctctagaaatgtgtaaaatgaccctccacccccatctatcttctgtagttctggcacttggaaggagaagctgtggtaatgtctccaggttcccactgatctactagaaaatgttctagaaagcagtgctttgtaaatgatctcaagaacacttagtaactctcagcatatccgatggtagaacacttggaaacctctgctctttgtgaaataccataaaatattgcagtatcaaatttttaaagagcaatatatatattttattattaagtttgatgccatcttctggtggattctagtatagataaayagtagtaggttccaaaatgatgagacatgcatgaaagttttttacatttctactctttaatttttttgtaaattgggaaaagatttttcaaatttagtggcagaactaagattggcttaagaatcactaggattttgttaggagaccagttggagaaccttagtctgacaggtgaatctgtctttgctttacaggctagtctagtttttagaagtgagagaacaatgtaaaattttaaaacagtgggcatttcaatgattcacatatattttccagagcaacagcagaatactgctgacattatgtttattttaccaagtatacatttttttaaacttgcagtaatattcatttcttttctacaatttccattatatttttattaggtaacaattcacatagttcaaaatttaataactacaaaggtatattcagtaagaagttcctctctttccatgttctcctactcatttttctttcttggggcaataaattttaatagtttcttcagtatcaccccagacatattctgtgcacataaaagcaatgatgtggccgggcgtggtggctcatgcctgtaatcccagcactttgggaggccgaggtgggcggatcacgaggtcagcagatgcagaccatcctgcctaacacagtgaaaccctgcctctactaaaaaaatagaaaaaaaaattagccaggcgtggtggcgggcgcctgtaatcccrgctactcaggaggctgaggcaggagaatggcgtgaacccgggaggcagagcttgcagtgagccgakattgcgccactgcactccagcctgggcgacagagcgagactccgtctcaaaaaaaaaaaaaaaaaaaagcaatgatgtatgtatttctccttcccccttcatcacccccatctttttttccaaatccaaatgcacatactctttgatagcaagatatgcacactgttctgttcctggcttttccaacttaacattctgtatcttggaggtgactctatcttagcacataaagagccttgttttatttttttaacagcttattggttattgtatacttatacaatcatttatttgtaggcattgtgttatgtccatttgtttctattataaacagtgctacaatgaattgccttataactatatcattttacatgcatgagaataccttagatgcagcattgcctgatccaaggacgcatgcattggtaatgttgccatgtatttcaaattaccctccatgtatgtttcttaatccttaatctctctttaaaatgctaacaagagttgttttaactaatgcggaagttggtttatctcacatccttctcagccacctgatcaagcctacgtaatcaagtcattcatatgctcactctcctcgtcatcacccccgtttgtgggtccgcaactcttcaggcagggtgcacccctcctacatcggcaagccctctgcagcaaagccgagcagtatccaacagtctctagggatttccctgacattccactttccccttccctctgagctgctttttacattttattttattcaccttctattattttatttattttgagctcctgctgcacccctgactgtcatcatggctcaactgccgaataccatgtgtttcatgtaaagctgatatatgccatagagacaccatcgattcgaccttgatttaggaaaaaaactttacaaaggtggtgtatgggcagaagtaggggccagagaattagacttaaaatatagactcagtgtagatggtcatgtaataacatttttgatttttgcctccatgaaaaatcatagatgaagaaacatttgaatctggtaagtaaaaaatgagtatttggtactgatttttaaatgtatattctaaattttgatgcaatttatacacatatttataataactgtttaaatatatcaacattaaaaaattaaaaagtaactgcgtgtatcccacatcatgttgtcaacctcaaatatacattataaaatttatttttaattttaatttttaatttttttgagacaaggtctctctgtcactcaggctggagtgcagtggtgtgatcatggctcattgcagcctcgaattcctgagctcaagtgatcctcccacctcagccttccaaacagctggaactacaggcatatgccattacacctggctaatttatttatttattttgagacaaggtctcagtctgttgcccaaggtgaggtgcaagtggtatgatcatagctcactgcagccttgacttccttggctcaggtgatcctcccactttagcctcccaagtagctgggactacagtcccatgccaccatgcgtggctaatttttcaattttttgtagatacagggtctcactgtgttgctcaggcttgtctccaactccaggcctcgagtggttctcccaccttgacctcccaaagtgagccaccacacctggtcccagtaaaatgtattttaaaaaatacagcaacagtgcagttgtgagatgtagattttaccttagccagtacttctcacagggctagtactgtccctgatgtagcattttggaactttttgggagcatttttttattgtcacattgattgcggatactcctggcctttaactggtgtctcttgacccacgtatcttctgaatgtcctgctggacaaaactcgttacaaatataaaagcgtcatttttcaacacacaaaaagttttcataagatttagcatgagaagcacagtggtttagaagacagtcattacagagagagacattcaaacagaatgcaggcattgccttgcaattattgaatgatttattccacgtatcctgtttattcgatattgctagtaaataaactggaaagtatatctatactgaattaattttctttttctttaatatattatttgttattattgatgacatatggtatcaagtgtctgtccctcaaaataatgttgacatcattaaaaacaaaataggccccacagaattttatttttaaactgcaaacctgctggggcatgttaacatgacttatccaattccaagtatattatttttcctcattttctcccatttcattggtctctaattgctttggcatattatctttaccccaattaaggcaattttcttctttctcttatcacayacaaataaatctagccttttattacttaccaaaacactttttattctagtgtccacctgtttcttttctatttttctgtacttcatataaggaatattttctgattttcttacttctcttgaatccatgcttcrttataagtaaatattaatataagcatctagtagtttcttaggtcttccaaatatgttatgcccaaggatttatattttgatatatatacttttttttttttttttttttgagacagagtctcactctgtcacccaggctggagtgcagtggtgtgatctgggctcactgcaatctccatcccccaggctcaagtgattcttgtgcctcagcctcctgagtagctgggattacaggtgtgcaccacaacacccagctaatttttgtatttttagtagagacgggtttccatgttgctcaggctagtctcgaactcctgatctcaagtgatccgtctgccttgtatatatatacttttaaaatatatatatattttaaaatataaattacttcttttaaaatgttttttaatgttacagctggagcattgtattgatttttaaaattacatgtgtggtagattatgccatctattaatttcctttcataaaagtagagagatggctacaaatattagttataaaaaaagaaagcattgagacagatgagttgtgaaccacttttctaaattatttacatttatgttgtttcaaaatttcctattttccgttagatggttggcctgttagaaataatttaattgattatttatacttgcccatttggcttagtttttaattcccctagcttattctcatccttctttgttctgtcccactggaaaacactccacatgtgaaggctgwggttgaggccggggagtgtttgcgggtctgtggaaggagaagcagtgggtgagaccaccgactccagccagattggccagtttgaaccctgggttcattactcactaactgcgggttctctggctcttaacctctctgcccttcaggttcctcacctctaaaatggcaacaataatttatatgaataaagtgcttagaacagtgcctggtacacaggaagtgctacacaagtgttagcgggcattattattgtgaaatcttgttccttgggggagtcagcagccagttcttttgagaacagcactgcagagggaggtgcctactgtaaaacgccccttgtggactcctctcagctggaaaagtgagaactctcaagcatcgatacgttctgaacccagctctctgaggagctcaattaaggaacagttagcacccagctggcatattttctaagcatagaacccttggcattcattccatgatgcttaattctgttacttagactgcttagtgagcagttaaggttcttcagtttcggtctgtagtctgaataaagtatagtatgacttccttgaatttccccaggaggtgacgaggtgattgtatggtttatttaatcagaagcgtcattaaaaaaaaaaaaaaggctggatatggtggctcacgcctctaatcccagcactttgggaggccgaggcaggcagatcacttgaggtcaggagttcgagaccagcctggccaacatgatgaaaccccgtctctactaaaaatacaaaaattagccaggcgtggtggctcatgcctataatcccagctactcaggaggttgaggcaagagaattgcttgaacttgggagacagagattgcagtgagccaagatagcaccattgcactccagcctgggtgacagaggggactgcatctcaaaacaaaccaaaaaacagaatayggctattttgtgatatctagaaaacaaagaaaacagtttgctttgtatttggtttcctctgtcttcatggggcagctggggatggaagtgtgtgagacccaggaaggggaaggaatgaggaccctcgcttgggccagaggctgctgcagcacccagcagcagcaccatttctaccacttcctccccttcacagagctgctgcaatactgcctcggggagagaggagggagaaggctcaaacctgttgctttcctttaacttctccctttgaagccctattttgtgccaaccaagtagagtcttcctgagttaaaaagccttcagggagrgtcttgataggcaactttcagaaaaagttactgtcccaagcagcrgagtcagggcaaaccagtttctcagtcccaatcatgtggtgatcatttgccttgccaggccttacccgagttaccttttgctagtggtgacgtgcacgtcttgcttatgtcatttgccttgatttgatggctaacatgatcttcttaaaggcttaactttttcatgtctgtttctgcacttacccaaatatccagaggaactttcagaaggtaattgtttttatttcctagatayaccaaatagaactatgtttaagatctttcagtgcctcaaaaatgaatacttgactggataatgtttaagatgaagatacggaatttgttgttgtttatggttttcccctcatatttacattttttcccgaggaaacacacttccaaactaagtttgtgaggttctccaaggatatgacattttgtgggtgaaatcaatgattaaatattcagtttcatagacaacatttaaaagaacaataaaaataattaagctttatgaatgtatccccaagaaaacatttccttttaaacttactgacatatctaagtgagaaaatatacttacttaccagaagatggaattgatattggtgtgttttctttctatgtattttaaaacacttaaaaaaaaaaggttaagaraaaaggttgcatatgtcagttcattctattaacaaatgctctttatattttatatatatgtttatatttgagacgaagtctctctctgttgcccagactggagtgcagtggtatgatctcagcttactgcaacctccatctcccaagttcaagtgattctcctgcctcagcctcccaagtagctgggactacaggcacaagccaccacacctggctaattttttgtatttttagtaaaggcggggtttcaccatgttgggtaggctggtctcgaactcctgacctcaagtgatctgccaccctcggcctcccaaagtgctaggattacaggcatgagccactgcacctggctatatattatttcaatgatcagagcagagctgtatatttgagaaggaacttaagtaaaaagtaatttgaaaataattttcttaataactttttttctggagttttttcctgagatctcaatgaaaggagaaacaggagtttgaactatctctagatgcttcagaggcagtgggcacagttttcctcattttgtctctcagagtcctggccagtcagaaacatttggcagccacagagcaaatcttatcttatatagaatgaacccttttaagagggagaaaataaaaacccatatctagcaaagagattaattacaggacttgcagaaaaaaaaattataaacacagtatggtcaagaacaaggccgggcgtaatccctgtaatcccagcagtttgggaggctgaggtgggtggatcacctgaggtcaggagttcaagaccagcctgaccaacatggtgaaactccatctctactaaaaatacaaaaattagccgggcatggtggtgcgtgcctggaatcccagcaactcgggaggctgaggcaggagaatcacttgaacccaggaggtggaggttgcagtggccgagatcgygccrttgcactccagagtgagcaacaacagcaggggggtaggcagggagggagaagaacaaaaagctactttawgcttatttaaagttatatgatactgaatcatagtaaaaacataagaactgggtatgtatytttaaacatatcctaaggaaacttatcttaaaaaattaataaactcgttttggctttaaccatactagacagaatacattcagtgtaacgctcaaattctgtgaagtgcgtccctatagtttgttgtgtgtgaataataggatgaaaaatgcttagaacattcggtgagccactcaaggataaattcaactctgctgccrtctactaaggtggtcacttgaaaagttgaaaatgatttcatgaatttattctgaataaacttctcgctctcacatattctgctccatctgttctttgtgtttcagacaaggaggagtttgttggctacggtcagaagttctttataggtaggtgataaattaacaagaggtgggtctctgtcacttgttaaattatgtttccaaacctgacactgttttgaaagtttcttttgctaatgaacatttccagacctgttcctcattctagtttccttttctttctgtcctttkttcttgtcaatattctgatccattaattattcattgttattcatctaatttccactgggttatctattaattactcatcaaacacaaatctttttgttttcttccagactgtttcgtaacctatttatcttatgctaaagagacaaagtctctgacttttaaacttacttyttatggccacatttctatcatctgtcacctgggcagagctttgtgaaggaccaggtaccactcatgtaaaaccgctytgggcttccttytatagggaggcaggggaaaactagcagagccgcagggtytagaaggttggttcccaagctggatgcattttggaatcatcaggggagcgtgaaaamaaamaaacaaamaaaaaaaaaacaaggggccacctttctgtattgctttcagaatcattcagcctaaaagctattaggtagagctgagcagagtaggcagctacacaaaggtggagagtaaggagcatgascagggtgaaraaggcatctgtgcaggggacaatggtagcctggtgccaattgtcagaggcagagtaaaatcaagagggcagctgccatcacttggcctctgatacccaacaggctttacaaagatgcccgcctcatctagcttgggctctgacactttgtgcgaggctatcaacactgtctgtcccctatcttgcacatttaagtgctcttgattgatacaataagcaaaaaaaaamaaaaaaacaaaaaaaaaacaagggccagggttctcactgttagagaagggagttacaaacatggaaaggggaagtctagaatgaatcctgtagtgttggattgacattgtatgtactggtgtgaactcatggttttcaatatatagacatacaaatatagatcgaaatgtgcatgtgtatttatatgtacacatagagttgctaactctgtctactgagagcacctggaaacagctctgaagataccagaaagccctatgattcgaaaggcagattaagcaggaatctaggagcttagaaatcatgacccatgtgtccaactttgcactgatcacacagtcctaagcaaccacctaacctgtctgtgtcttagtgaaaccacctgaaaaatgtgaaaaatgagcctgctccactctttctaccctggcccaagccaccctcatctcccacccagaccactgcagtagcttcctaactgctctctcctgaggccacacttgctctccckacggtttacaccaaccagaggagtctttcagaaacatgaatcaaatcatgtcactaccaacagcttcccatcacacttccacaacaatccaacactttcagaggccctgtgtgatctggctccagccacttccctgaccctatttccatactccctgttgcttaccgccctgcagctatacaggcttccttgctgttccycaaatgctccaagcacagttcgtttctctgcaccactgcacttgctgttcccttggcctggcttgcccgtctctgcagaggcttcctgatgtggctccctgccttcctccagatgtctgctcaacgccaacctttcagagatactccaaccttactgcctatctaaaaaagcacccccatcactctctatctacctcrtcttcttatgagtacttattttttgttgttttttatgtttgtctctcttcttctacaaaatgtagatttcatgagaaagtggccttggattagttgagccatctatcgccagcacccaagacaatgcctggcccagagcaggtgctagatgggctagcacagggggcattttcatatttttccctcatattacttcccatcttctaacttcagacagacctgactatattaatgaacactttaggatcatggttgctacatatttcatcaggtgtgaagctacaagtgatctctcctgcctggttcttacgttctgtgcacttcccctccctagctggcttccgccgcagcatgcgcctttgtcgcaggaagtctcacctcagcccgctgcatgccagtgtgtgctgcaccggcagctgctacagtgcagtgggtgccccttacgaggaggtggtgaggtaccagcgacgcccttcagacaagtaccgcctcatagtgctcatgggtatgtcccagcatgyactgtctctcctcctccttgagaagtcttccttctagattcaggtgtcttgcattgggaataatggtgaaagtagaactctttatggacccccatacaaataccttttttaaaaaacaaagccattgtacatgtgtgtttataagtaacattttattgtatcaagctttttaaaaaatctacaagtgaatgtgttatgacatggtgtccatgaactatataaccagtattacgatgtcattatgactgagattttttttttgcctgcttagaattgttctgtaaacatagatgagtgtttccccagacagatcattaacctgtatcctgaaaataaattcttaaggtccatttccctgagaaatatgttaaattcttaaagtccattcccctaagaaatttgtaactacttcctttagaaaagtatctaacatcttctggactgtatctttggtgctttataaagatcatggcaaagatagtgcaggagtgacctgcttttgtgaccatgacttttgcaaagttggtccctgtagcagtagcaacttgtatcctactgccttcgtgtctgcctgtttagcttcatgagcaaggcaggtccctgtagagcagaacgatgtgccttacagctgggaccagcaatatcatttgcaggccccattgtaaaatgcaaatgcaagggccccttgttaaaaaattatcaaagatttcaagatgcaatagtagagaattcatccaagcacagtatccttctaagcatgtgccctgtgtaactgcacaggttctatacccatgaagtcggccctgcctccggccggacatgggggtgctgatcgatcatctgtcaggaatgtgcccctgaattctgtaagtcacagaacctataattgttgatgctggtttctggctgtcacttgataaaaacctcatttgaagaagaaaggcagagctctctgattctctaaaatgagaccagctaattctcatggcattcaacattagatgaagtttgctgggggtcaggttcctgtgattccttayctcattcctgaatgttgaaacaatgtggattactccatgggtcactagaaaaattcccaagagttttctggggttcttccaatttatgagaaaggaagttacataatttccctaaaaatatttgctctcaagtttcttcagtagaaggactaaaatgataattccatcacataattatatttatccacatctgatgatttctgtgtgtgactttttgtgtttaggaccctctggtgttggagtaaatgagctcagaagacaacttattgaatttaatcccagccattttcaaagtgctgtgccacgtatgtttagttctgctttcataatggtttgtgttttggtaaaactttctttgctgatctcatttaactatgtcattccatctttgttgtawaagtatacaacaccagggatagttcttaagtatttctaaccatatttattttaataaggaaaactgacttattggaatgtaggcagctggcttttaaaagggcttttttctttttttaattattattatattttaagttttagggtacatgtgcacaacgtgcaggtttgttacatatgtatacatatgccatgttggtgtgctgcaccgattaactcgtcatttagcattaggtatatctcctaatgctatccctccccactccccctaccccacaacagtctaaaatggcttttttctatttcttaacattatagggatggcctttcaggcaaactaatagttagcaataatagttaacatacacccagtgcttactatctaaaaattgatatatgcctatacaactttatataaatttatgagtatgattataaaatacacagctttttaaaaaatggtgttttctggctgggcacggtggctcactcctgtaatcccagcattttgggaggctgaagtgggtggatcatctgaggtcaggagttcaagaccagcttggccaacatggtgaaaccccgtctctacttaaaatacaaaaattagctgggtgtggtgctgcrtgcctgtaatcccagctactcaggaggctgagacagataatcgcttaaacctgggaggcggaggttgcagtgagccgagattscaccattgcactccagtctgggcgagaaagtgagattctgactcgaaaaaaaaaaaagtgttttcttatttccttttactcgtaactcctttatttctcctaagctccccctttactactaccagctccaaagcaactcctaaaacgtaatcttccagacttttctctatatagagttgtgtgagttttttacccatttagagttgttatatgaagtttttttttaagctttaacatttgagagctacaattctaaaaatagaaggaattatttgtttcatactgagattcatcgttcaaaaaaaacctttaaaatcactctaagacaacctgttttattgtaaaaatagaaaagatcaagacttgagatagaattcctgatttcaacaaaatagaaagttcataataatgcatgtttataataatgtataataatgcatcgtttctaatatgtgtaaaagaaagttaaaattttgactgaggcactaagatgcacatctgtaacgaggaatgtgaaaacaagttaaactcttcacacacctcgagggtataaaaggcttggggagggagattcatggggctttttggggaggcttttattggagagagcggtgctgggtgttcccgacccactgagtgtgggaagagtgtgtgggtgtgcttgcttccccctcccctcaaggcaagacagaggaacctaggggaaccacttggagagcttcctatgtgtcttctgcactttgggggacacagaagaatggtgtccgaattacacctgaaaaatccaaaggagaagagcttacaggaagtggccaatggctataatttgggaagtagctgtccttgtagggtccatcacagctagacttgtgatgttccccaaggaccagatctgggcaggtaatgtataagacagtcagcccagggttatatgattcctgcccaggaggaagcctgaggagaaaaaggccaaaagtggattcccaaatatatcaggctttggaaggaatcacagatgacaaactggaataggaatggacttgagaggccttgtgttggtgagatagggtttgcaaaataacccaatatatcatttaggagagaaagagccggatttaaggatctgccaaatctaaagaaagccaatagcagccagaatcagtatttgccaaaccagaaccttccttcctgctttcctctccctccctgcactctagccttagagagttctaaaccagtggaagtgagatctatcgggggcagagagaagcaggagcagtagaaatatggtgaaaggaaagagaagtgactcatactctcgtctggctctcgtctggcttctctgagcgcaggcttccctggtgcagcaaatttgagccagatgtgtggagaagcagcctaaaatctaagtgaagtttataattttgatgattatgtgagaatggaattttaattagtcagttgagactggatgatgaaaatgaaattgtggcatgagtgatgatagacttttaaaattaaacctgagtgaaagagtcatggaaaccgctagtgttttttgttttgttttgttttgttttaagacggagtcttgctctgtcgcccaggctggagtgcagtggtgtgatcttggctcactggaacctctgccccatgagttcaagtgattctcctgcctcagcctcccgagtagctgagattacaggcacccaccaccatgcccagctaatttttgtagttttagtagagatggggtttcaccatgttggtctgtctgttctccaactcctgaactcaagtgatctgcccacctcagcctcccaaagtgctggaattataggcatgagccaccacrcccggccaggaaactgctagaattttgtgcaggggctggggaagatcttgcctcacakaagggctgtgggagaccaagaagttgctttatgatcgcatgctataggctgtgctttctgaagtactgctttcatgtacaggaatgtgcattaatctgaaaagcaaaaactaccaaagaaatcaacattttccttttctttctttttttttttctgtttgttttgttttgtttgagatggagtctcactgcattgcccaggctggagtgccgtggtgttatctcggctcactacaacctcacctcctgggttcaagcaattctcctgcctcagcctcctgagtagttgggattacaggtgtacgtcaccatgcctagctaatttttgtatttttagtagagatggggtttcaccatgttggctaggctggtcttgtactcctgaccccaggtgatccacccgccttggcctcccaaagtgctgggattacaggcgtgagccactgtgcccggccaaaatcaccatttttcgatagtctgaataaaaataaaatgcccacagaatatagaagaattttaagaatatcaacgtagatttttaatcattcaaagtgagaaaatactgctcatattttgctttttaaattgaggttttaagcttaaaatggatacctcgagttatacatcaattcacagactttaacctaccatataaatattagtccagtggaagcaaaggaggagtcatcttgggtttagattgacataattcactatcacctgagagctataaggttttactagaattttgttttaagtaggaagctatgggagatgtgatgtaactgtaggaactctaaggatctgatgagaggcttgaataaggaaaaaacaaaaatgaccccaagatgacatttgcttttagacccccttgaaggttggtaactcctttgataatttaaggccggtttctagcttctacttgatcatttccatgtattgatatcatcagatgttgatctatttcatccttaaactttgtcagatgcaaatacacaaattctgtatgaataaggggaactaatggtaatatagattaagggactagctttacagtatataggatgcagagttgaaactgtcttactcatctttgtgttttcagaacctaacatgatacctggaacatagtaggcactcagtacacactagttgaataaatgaatgagcagacaacaaataacttttagatatttgatgaactcctatattctatacaacctggcactatttaagttgaagagtctgtaatcaaagtggccatatcaaagaatcagactgaatctagactcagctaatctttccctcctagagatccctaaaacgaatcaccactcggttgggtattaatgcatctggtcaagattgcagaatgtcatgggctttctccatttcaaatttgagaatctattgttgtaaaaaacactcatctagaggagtcagaacacgtaggttctaatttcaacttcgcttttcatcagtcttatgaatgtgagcaagtttctccaaaagcttttcttatgagtaaaatatagatattaacagtttacctaaggtaagagtgtggaagatgaaatgagatcatgggaaatgcactatccaaatgtaagatattattggtattgctacctgggagctttcaggcatctaaaggttcacacataattcactagcacttattttgaagtaataacaggtgttcccttaggtctttcttatgctggcttaatacctagtgcattctttttcataccataagcactcagtaaaggtttatagactaactgattttgatacgagaacttatcaccaattcaggcttcttctttttagttctagcattttatctccttgattatatattcatttatttattttgattagatatctttattcaaatgcatattggtaatcaaagaattctgaagacactgaaacctttcattccctttttctgatagacactactcgtactaaaaagagttacgaaatgaatgggcgtgagtatcactatgtgtccaaggaaacatttgaaaacctcatatatagtcacaggtaaagtagaggttcagaagctgattcttacctcttgttgttttacatttgaaatarattccctatttttatgtattttccaaatctcctgggtaattccttttgtttctgaggagttaagcaagaaatgtacatcgatatacagcacaccaactcactgggtttagaaagggagcagaatggagtctgcaaaccttggagaacttgaggaaatacataaactctagatatgctcattttgttcacctcttgaatatctattcattctttctgtgttaataaagtccacatatttatattcaactctagtgcagtttatcctcatgttactactaataatattttccttgtagaaagtgttctgttttgtttggcctgctcttgcaggatgctggagtatggtgagtacaaaggccacctgtatggcactagtgtggatgctgttcaaacagtccttgtcgaaggaaagatctgtgtcatggacctagagcctcaggtgggtccatggtggaatatttatgtccccaaacaatgaatgcgtatcatccattttttgtgcacatgctgtaggttatagttgagacatttattctrttagccttttaagaataaggccatttcccatatataagatcttacttracgtgtcaattgacaacattttacttttagttgggaaagaagtcttgcttctcagacagaaaagcagaactgattgagtggtcacaaagagaagcaagaatctttcttgctttaaccttgatcacaaaggcatcagagtaacttcttgtggagtgaataagatgttgctttgtacaaggaggtgaggtttctatgttgtcatatctgtggctaccttcctgagaccacatgtagaatggagcaggggtgagcaagttaaggtaagataarcagcatgcaatccgtaggcccaatttttatgaactttgtattttcttcgtgtgtgtgtgtgtgtctgtgtgtgtgtctgtgtttgttttgttttttgagacaaggccctgctctgtcatccagactagagcgcagtggcatgatctccgctcactgcaacctccgcttcccgggttcaagcaattctcgtgcctcagcctcccgagtagctaggactacaagcacaagccaccatgcctggttaatttttgtatttttagtagagacrgggtttmgccatgtttgccaggctggtctggcaatggaactcctgggctcaagtgatccacctgcctcagcctcccaaagtgctgggattataggcatgagctactgcgcccagccatgttttcttagtcatttagaaatatactttgtgtgctagagaatcagaggaaaacagatggtagtagtatccaatgtgagataatagcaagaggaaagggaagtgaaggtgaaacagagctgatccaccttgagagtctgtctttgtctttgtcatatgagatcatgtatagaatcctactctcagtaaatgagattctctcatgtatagactcttactcwgctagtaagatttcaattgctagtcatagctaataagagtcaggatctgaccttaattttgattctaaaactacatcttcaaatttttaaaatgttcatttgttttttagaattgaggagttgagggtacatgagactatactctaaaaataattgctaatttctggtcttagaaattttgagaagcttcatgttcactctagaaagctaggacttctgtttttaaatgtgcatttagatcaggtgcagtggctcatgcctataatcccttggaaagccgagatgggaggatttcttgaggccaggtgtttgagaccagtctgggcaacatagtgaaaccccatctctactaaaaatacaaaaattagctgggtgtggtggcacacgcctataatcccagctactagagaggctgaggcacaagaattgcttgaactgggaaggcggtagttgcagtgagcagagatcccacccctgcgctccagcctgggcaacagaatgagactcaaaaacaaaataaaacaaaacaaaatagctgggcatggtggcacatgcctgtggtcccagctacttgggaggctgagatgggtggatcgtttgagcctgggaagctgaggctacagtgaactgtgattgcaccacagcactccagcctgggtgacagagcaagaccatgtctcaaaacaaaacaaacaaaaaataaatgtgcatttaaattttctgtgtaggatattcaaggggttcgaacccatgaactgaagccctatgtcatatttataaagccatcgaatatgaggtgtatgaaacaatctcggaaaaatgccaagrttattactgactactatgtggacatgaagttcaaggtaagagcaagtcaaaaactactgtattgctttcagtggcttctgcgtgggagagatctgggttgggctgggccaaggatctctgatctcattgtcctcctcctcctttttgaccccctctccaaaaggccctcaataaaatggtttactatggttttatttaaaaaaaaaattaaaactgtattgtttctacaggatctgtgttagagaatgtaatttttgtttctaatggataatgcccttacgatttatccttttggatggacatcacttacagatataaagtttaataaatgttatgatgctacccttattttttactttcttatttttttgggtctagcttaaaaaaaaatccttgagccgtagtttgcaaagccaaacagaaattgggcatgtatgagcctggtgtttgtattttaaacagaatatcttttacttaaaagcttactttaaaaatgctcagtgagtatatctcatctgtaaaatgatgatggtaataatagagggggcaagccaagtgaaattaatcagtgatctcatcctagaacaggtgattttttttccggttgcgtacatatattttacattaaatatgctttaaatattgtgtcataacatacattcagtaaggtgtacagagtgtacagtttaatgaatttttatgtgtgtatgcacccagataaccatcacccacatcaagatattacagccacttgtgtgtgtgtgtatatgtgtggtaaaaatacataaaactcaccatattaaccgttttaagtgtacagttcagtgttagtatttagtgttaagtatattcacattgtgtgaaacagagctctagaatttatttacctggcaaaattgaaactaaaaatatgaatgattcactaaatatttgtatgtcatgcttgtacaagggccatgctaatctctgcattgtttcagttttagtctgtgtgctaccaaagcaagcacaggtatctttaaattatcctttctcttattatttttattttcatattttttgcaatgactatggaggtctgattttccagtttgccttgtgaacagtggagtccatgaatgtatttgctgagtcttatgggcatttaaaattgttctcatttttatggcagtctaaacaaattaacaaaattgtttctggatcatatgtatggtcactttgtaaagccacaagattttggtgcctgcatttgtgtttcagattgtattggtgacaagttgtactattttcatgaactaataagaaaataacagcaatgaatttaatgcattagtgccaagtgaatgccaaattaccttcattaaatgaacatttcacaatagtagaaacataatataactggcttataccatcctcatgttgaaagtggccattttgtatctttaatgttatccctatcagattaatgttcacttgaaatttatgtttaaattttatttaaactggtacattttctttrgttttatgttgtatatggttaaaaagtttcaagtgtttaggtaagagtaagataagttcacacgggaagttgaggggagtaatctgtctgcaaactatgactaaattttgcaaaacatgacgagacattaagactaaagattaaaacataagttttgtagtttagaagacatttattggacctcattttttaaaataaaaacttcagtcttttattatttaaaaaaacttccaaattaaaatttctttatctcagtaatacatttctaagaaataaaggatgacatactgtggatagtgatatacttttcccagctttgcttatgcttcacattaatttagaaggatatgtttatacctgttataataattatattttctctacaaaaattagctgggcatgatggcatgtgcctatagtcccagctacttgggaggcctaggtgggaggatcacttgagcctgggaggcagaggctgcagtgagctgagatgatcctactgcatgccagcctgggacagagtgggaccctgtctaaaaaaaaaaaaaattattttatctatacttagccacattatttcaataacagagggcaaaaaaattactattttctagtttgctggttttgtagaattttgaaaaaatatttttgaaactttattgaaaatcatctgtgcaaaattttcggaccttactgtttttatacatagtttcacaactgaatgtgacagcataacaaactgtattttttccatttgtccaattragtctgtactatccatatttttctatttctcctaaaggatgaagacctacaagagatggaaaatttagcccaaagaatggaaactcagtttggccaattttttgatcatgtgattgtgaatgacagcttgcacgatgcatgtgcccagttgttgtctgccatacagaaggctcaggaggagcctcagtgggtaccagcaacatggatttcctcagatactgagtctcaatgagacttcttgtttaatgctggagttttaacactgtacccttgatacagcgatccatagttgcaatctaaaacaacagtatttgacccattttaatgtgtacaactttaaaagtgcagcartttattaattaatcttatttgaaaaaaatttttattgtatggttatgtggttacctatyttaacttaattttttttcctttacctcatatgcagctgtggtagaaatatgaataatgttaagtcactgagtatgagaacctttcgcagatttcacatgatctttttaagatttaaataaagagctttcctaaataaaataagcaatakttaactttagaaactgtactctatgaaacgtgttttatgaaaacatcttttacaaaaagtgcttacttractaactcagcaagaaaggtttaatgtacacatttcacatctaaaatcaaaacctacaagaaactgcactgccttcactatttacaaatcggcctacaaggaaaaaattattctcatgagaggtgtgacaaacactaattttccttaacagccaatatctacatgcaggcctaaattagaaaaaggcaatggattaatcccagagacctatatatagaaaatcacaagagtgaaaccgtgtctcagagttaaagaaaccagggactaacagaaattcttgagcatgcaggacggcagataaaaaacaacttgctaaataaaacgcctaaacttcttccattgtgagattaaaaaacaaaacaaaacaaaacaaagcaaactggctgaaagtggttagtactaacacggatggctacctggagtctgtacaaaatgagcttgctggcgtcacagcttgaatctttccccatgtttcacactgactccctccaaaatttgcacatgcgacccatgaagggacatgaagaggtaactgcgaacgccagaggattttccagatggcttctttccttccaccaatcacctactaatcccagaatccaccccctaaacgttttctaataaaaatactgtcttaaagccaacacagggagacagattagagctatactcctgtctccttgttagctgactcacaatgaaaacttttctcaaaaaatcagcgccataatattggcttctgtgcgtatagggcaacaagccccgtttgtttggtaacaagattaggatgccattacaaagtgctgtttctctttctttccccagatttgagatttccaggcgctttccctgtccctgtatctgttcatcttctgcatcattctcttctccatatccacaccattcttccatctttcccatttctttcttaactgtaaaacagaatgcatgattcaaaatatttgtagttctctgttacttaaagtgaaagttatctttaaaaaaaaacaaacccaaccaaaccaaacgatgcaaatcaggtagtttgtagtgatatttatgtgaggttggatttgattttaaggttgagaaaaagtttttccaaatttgatttacacagttgtgggatgaagggtaagcaatcggagaaaatgtgagaattgcctatattaatacacatccacacacccaggcctgcacagactcgttggtcctggagagtaaacgcattcctcccaaacccagcagcgcctggcaggacagaggcgggcggggacctggctcagggggcggctgcctcgccaggcgccacgaagccccggcgtcccacaggtcccggaggccgctgcgtcgcggggagctgggctcgggccgccggcggttgcgccggggcagccccgcggggagagcaccatgaggactgactcgggggctcggctggaggagggccacctggtgagcggcgaggggcgcgtcggcctcgagaggtggcgggtaaacagctacacttggcagtgggggtgggtgtgtgtgggggggcgccaacgagctgggaatcactaagggagggccttgctcgtggggtgcgcgcatccgcccctccagtgttcacaggaatgggacggagacgcaggcgaggccgggaccgaactcccggagtgggagagagaggcctggcatgaagtttgcggggacctgagcccgcgttgccacgacgacgcctcactcatctgaggcccggggcccggcgggtgccggggcttccagccaggcctctcctagactcctccgaggagaggtctgtagctgcccagaagagatctgttcgcctgcggagtcctttaattaaggtcttccgtcacgccccgcttcccgcaaacaaatcaccgccaccacttaggaaaccacgggaaagctgtgattgcagcgccacggtcgccagatttctgctcctgggcacattacccccaactccgaggccccctttttggcagggctagtctggactggccaatccaggtccctgcacgcctctcaccgcaacatccccgcagggcgctgcgcgcggggtactagccaggcggcgcggcccgatgacgcattgcgcctgcgcgcgcgaccgagccgggaggggtggggcgccaggtgcttgggggccggcggccgccgaggccggctaaacgcagaatggggaagaatcctgtggtaagcgagccttagctacttttaattgttaggatttttgtcttcagttgagccgtcctacttttgaggattagaggttgggtctctgggtgggtggaacgtcatttttgcgggacttttgaaatcagttacgtgaacagagccctgggatcgatcgcgcgcgcttcgtagcatctttagaacaatagcgcgttcctgtgactgtcattcttctccaattgtaattttgactactggatggtattacggcagcttgcctcgtcctaatcttgtagtacttgcattaatctactgttcgaacgaatggattgctaaatgggacaaactacaagagtgtctaaaatttaacccttttgaataaatgtcttatgcaagcagcatgagatacttggaacattaaattggcttctaggcatttctgttactatatgattctaaaatacttctcaactgtaatgctgtctgaactacaaacacttttcttattcatgtaaatgagggtttagaagggttccccccacctttctttctgccctaaaacgcattcttcccagtgtatgcaactggcctttttaaaaattgtgttagtatgtggtttaaaacctccatttgtttcccattgaattaaaacaaaatccaaacttcccttggtctgcaaggccctaactaatctggctcctgcctacctctccttggtaattgtgcggcagccttgctgtccttttacctgaaacattccaagcccaatttaacctaaaaatatttgcatttgttccggttgctgctttctcattcaggtctcagctcaaactcagagaaactttccctaacaaaagtagcactcagtctccttcattcattacgttttgtgtgtgtgtatcttgtgtatatatatatatatgcacacacgatatgtatacaagatatgtcttaaatatagcatataaatatattttatcgtacatgctgcatataatatatagtatatattatcatatatatatttttaacattgtttctaatactcaaccactagaatgtaagtttcataagagcagagttctctccattgtgttcattagtgtattcctaatgcttagaaaagggcctggcctagagatggaaaggaatgtaggaaggaaggaattttatatgaaatttaggatgggagaacaaattttaaattgcccatgtttctcatcagtacctcccaggtttcactgatgaacaagattatcaagagatttgaagatcctagtctgatccattatatttttctgtcatgtctgaacaacagacttttgaaagaattgctttggccgggcgtagtggctcactcctataatcccaccactttcagaggccaaggtgggcggatttcctgaggtcaggagttcaagaccagcctggccaacatggtgaaaccccgtctctactaaaaatacaaaaattagccgggcatggtggtgggtgcctgtaatcccagctacttgggaggctgaggcaggggaattgcttgaacccaggagatggaagctgcagtgagccaagatcgtgccgttgcactccagcctgggccacacagcaatactccatctcaaaaaaaaaaaaatagcgtgatggtatttgaagtaaagatgctctaggcttttacttacaagcaaatttattttttccgccacagcgtcctccacgagctcttccacctgtgccaaggtaaaaataatttacagtaatttcattattgagctttaaaaatggaaaatgaagacagtggaaaaattgactagtatcattgcaaaattacaatgattcaggaaactcttctgaaaaatttagggattttctgaaattttaaaggtgaaaaatccttgaattttaagaataacagttataatggaatgttatatttaaaagcctgaatatcaacatggtaggataatggatccattccctttctaactgttttggtgtctttttttttttaaatcagaattctggtcttttgtgagaatagtttcctcagagtttaagctgattttaatcagtcacaagtaagagttcttaatctgcttaatccattttattaatagacagtagggaatatgtatatgtaggttcagaaaatattgacattattttattagcagtgttattaaaccacttaattataaacagtaaactagtttgtaaactagctattatgtgaaagctaattttattttaaatttgtaatgatttaagtcaattttcactgtgaatattaacaggtttctaattaattgtttcttttttgtctttgtcctgctgattaaatttgtttggtgttatatgacgtgttagtcaaggtgagttagtttaatgtaaatataatatttggtgttcaaaaattagtttgattccttggtttgtttctcttaaaactgagtctgaatggtgtaatttgtaattctacaatatgtttttgtgaaataatctcccatgactaccatttaaaaattgtcattgatacatagcactagatgacctttccattataaaagcacttcatccctgaatggggtcacccagcacataactgttggctaatttgtagctctataatgaggactgcaccttcctttgtctcatttagtcagggtagacaaggttatactatactaaaacccccaaatctcagtgacttagtgtcacacagggttatttctaattaatacaaagtctgctatggcaaaaatgggggaccattacctttcactacctttttactattgatatagcaatctaggctacttttttttttcttttgttttgagacagagtctcactctgttgcccaggctggagtgcagtggtgtgatctcggctcactgcaatctctgcctcctgggttcaagtcattctcctgcctcagcctcctgagtagttgggattacaggcgtgtgccaccatgcccagctactttttgtattttcagtagagacagggttttgccatgttggccaggctggtgtcgaactcctgagctcaagtgatctgcctgtcttggcctcccaaagtgttgggattacaggtgtgagccactgcgcctggtctgcaatctaggctacttctgtgctgtggtcccaccatcttaacatgaggcttcctcagtcaccacaacaagggaagagaaagctggaagattactcactggctctttcaacgtttggctctgaaatgacacagatcacttctgctcacagcctataggccagaaccagtcatagactacacctatgtgcaaggaggctgggaaatataggggatcagatgaatatttgttgaacccactttctgtgtcatggtttctaacattactgacatgcagtgtgctactggtaccacactgtgggctctctctgatcttctcaatttcttgccttcttcccctaatctataaacgtttgccaggcccagggaagagagggagaattcttccctgtttaaaagttctcttctgactgttctctgcattgaattttaggcacccttttctgttgacgttttttcttgctttatagatgatattccacttagtcgtcctaagaaaaagaagcccagaacaaaaaacacaccaggtaagacgttattctttgttgtgtgggatcacaagttttcccaggacctcaggcgtagtaaacatcacagataagggagaattaaggccccagcagccccgaatctccacttcattgaggatagaattaaggccagtttgaagcagtggaattcctggtggtggtgaggtacagggcagtgggcagcctgaggagtatctggacgcattcatggaatagaaggtggtgccatctaagctcctatttccatgatattcctggactctttaaggtctt

SEQ ID NO: 94600 - DNA, 73012 bp, Homo sapiens
  misc_feature (1)...(73012): n = A,T,C or G
ttgaatgtcacagtttagggaattggctttcactggattttaaagttgcatcttcttcataaactccacttgttagggaaatgatttttcttccattgtaagcactctccaagttgttgatgtctgggtaggtacagcattgtgtgttaaacaacacatctcccagacacagaaacacactcactgggaaactactgcaaagtgaatagttcctgaaatgcttagctccttgtaagtctccaggagctactgttttaagaaaaccatttgtgcacttcttagcatgtgcttgttatcattacccatcagcaggctaggaggtgctttcgagaactgatagtgaccttgccttggtttgcctacgtatatactgttctaaaggtaaattcctccttactttggagaaatctcttgtatttctgtgtgccgtgagaattaatttgtgtttgaacagacttaggcttattcatattacctatgggatgaatccaaaatagtaaacattgcaggcttttcatctttatagttagaccaagtttattgctgaacaacttgggacgataattgctaatgtattttgcattttgatactaactctggtttcacttttattttatatattttattttattttattggagacagagtctcgctctgtcaccagtctggagtgcagtggcactatctcagctcactgcagcctccacctcccgggttcaagcaattctcctgcctcagcttcctgagtagctaggattacaggcgtgtgccaccatgcccagctaatttttgtatttatagtagagatggggttttgccatgtcggtcaagctagtctcaaaacgccctcaggtgattcacccacctcggcctcctagagtattgggattataggcatgagccaccgcgcctggcctagtttcacttttaaatatttatggtattccatagacttttaatatttagattattgaagatgtttgtaaatttgtgatgtggacagttaagaattacgcacccaaattctcaatccattcagagtgacgtttcttcttccttctgtcctaactagaagcaaagtacttttccaagtaaattatttttagacttccctgagtcactttttaaaaacgctgtttgttttcgtaaacacatggcaggaattattataagtgtgttgcaaacagaagctgacagtccttataacacagccagacaacccatatgcagcctgggagctccatctttagtgattgccggggaggacgcgcgtggagccctcagccgcagcctggggtagacagccccactctgcctgtcttcagccggatgcagttctgaggtctatcgaccaaatatactgcatgcattttacattcataatattcagtaggttcttaattttccatgatagaaggacagtaaatacaatgataaatgaaaagcaaacttcagcaaacacttttgaccctttaccctctgaagcaatcctctgaatgttatcaatagcaaaatttatacatttgaatcttgctgcttatttctcccttactacttaggaaatgagaagagattatttttccatcagcagggaaccctgttatatcaagaatataagcccctgatggcagagaccctgcctgctgcttatgtggcttcagtgcacagaacggggcttgttcttccatgtgtgagatttttaagttctttggctgttgcttgttttccccccaaagcagccatgcatggattgtcccagatttacatgtcccccccattcagaggagctttgcagtgtggctaccagtgtttctaatggccagatagagtatcagcctttgtctccaggaataagactgtgtttcatgggactccctgaatctcactgaggatgtaatagaaacaattgaggctgggcatggggatgcccaactgtaatctcagcactttgggaggccaaagctcaagttcacctgagcccaggaggtcaaggctgcaatgagctatgatcgtgcccccagcctgggcgacagagtgagaccctgttgcaaaaaaaaaaaaaaaaaaggaaacagttgaaagttgagtgacttttattttatttcacatccacccctctttagcctttccagaacattctgggaccttccagtgcagctgttctcaacctgaggcttgttaggagagggctgctgggccccaccccagggtttcaggttctgactcggtaggcctgggacgatcttcctgactagtgtgatggttcctgactggctccaggtgctgctgacggcactggtggggccacctcagggacccctgctctagaggtctctcggggagtgttgctgaggctgccrggcgcagctcagtgggtctggatggggcctgaggtcccgcatgcgccaatgggaggcccttgccgctactcctggagccatgtgttcgtcccccaaagataagcccacatctgttcacatggacctgggctgacttaatcatctgaatataagcaaacctccgtgtatgccatctcctctgaaaatgagatctgctgagcaaacaagtgggtttcacgtctgcctcttgccccccgccctgcccacttgccttcgtgtccgcatcatttctgatcatcgtatctttacaggcccttaggatcggaaaacctgctgcttagaggagctacactgaagaacactgagaaaatctttggtaaatatttaattaattatwaaccattgcccctaacattaaggatgcatgaagcaaaagttaaaacccgcagcggaacccgagagcgtttcttggcaccttgaggtgctggaggctttctggccgcgcaagttctgccccactgagatttgatcagtgaataagtgcaatcctgaagcagcagcatcagagaatacggcttacggattaaggcctctagttttggattcagaaacagaacattgcatccgtgaaggaatttgtgaagtttagttgtgcaggaaatgtttttcatgtctgcgtttcttgactaggatctcccatttcttgtgggttattgtctgttttaattgaggtaacctttagaagtatacaagtgtgccccactgtcagaaaatgctgtgcaggtgttcctcagtgtccttgggggactggttccaggatgcctgcagatgccaaaatccacggatgcccaaggccctatttgcatgtagcctacgcatgtctgcccctgtagttcacatcatcttagattacttctgatacctagcacgatgtaaataccctgtactgtttttatcgtctgtattttgtatcattgtattgttatttttattggggatttttttcaaatattttccatccccagttggtagaacctgcagattaagaactcgtggacatggtgggcccagtgtatattaagatatgaactcttaaaaaatgaagcatagattgcttcctatgcatgaagaagggtctttatcctaaggaatcaagtgctagtgttatgtggctatggacactagcttatgaaattaaaaataggattcgctttacccaagaattgattttccccgcagctgtgtgtaactcaccataaggcaagacacacttgcgccctggtcatcacccttgctcttcctctctgtaggtgtggctatttacacgggaatggaaaccaagatggcattaaattatcaatcaaaatctcagaagcgatctgccgtggaaaagtaaggctggatgcgcgtgagaacctgcaacttaaaagtgtcattacccactgtagaaatggaagtagcttcctcttggccttattggcagttcctttgccactgtacagcatcttagtaactgcagagctgaccattcagatggtctttcttattttgtggtgaggtggatggccacacccctccttcctgctctttctaacgcctgataccaggttcacagcgctgcctcttacggacgccctgacgttccggttctgaaatcagttcagtatccaacagctcctctcaccatttcatgaaaaactccaaatgggcttacttttaactctgggatttggtcaaaaccacgtattctctgctatggttttacaaaggaaagcgttagcagagagaacagaatcatcttttcattaaacagtaaagtcctgatgataaatatgtcaggatggtagctgaatttgtgctggaaaagaaaggcttcttcctgagatctgctaagaccttagttaaggatctgtgcttttcctgtactgaggacacttcctttcagagttatttacttttctccccctcctttcctccctccctctcttccttcctctcctttccttccttcctctacagtggtgggtagtcactaagttttgaactaatttgttgatgcttaatggtagaaattgatttctggatgtacttttcaatgacggaagtccaggcagtgcagaagcatggtccgcagtgtggctgtgagcagccctctctctcctgcttgtggcactttaccccgtcttggttcttacctttgrcctctagaagtacgtgccagggaccatggcatggacgcaagtgcagaggacccaccgtggtgcgttgagggcgaacacatcactgtgcccttcctattctgtttcttcacgaggtgtcatcttgatatctgtgagaaggaagtgcagagctcatttcctcagggaccagtgatcacctctgtccttttgttttagatcgatgaatgcgttcctcattgtgtatctctgcattctgatcagcaaagccctgataaacactgtgctgaaatacatgtggcagagtgagccctttcgggatgagccgtggtataatcagaaaacggagtcggaaaggcagaggaatctggtatggagaatcactgcccttgtatgatccgaggtgacctgtgggccattattacgaaaatgtggtgcaagaaaaagatgacggtgaatttactgtaggcaaaaagcagcttgattgattcagtctctgtgatagatgcattcactgaaatttaaagtctcagtggacaccagctgctcctgccatctttggatctggaaaggtacaggttcccacagtgaaatcatcaggacaataccttaaatacttgcactgtgtcctttgtttagagagtgctgagaaaatgcttgttaatgattatgagataaatggcacatatttgtggtaaatacttggaaaaaagggtctgctcccagtccagagcagggccatgtgcaaaccgagacctgtgtccactgagcctagagcaggactgtgtgcaaacccagacctgtgtccactgaccctagagcagggccatgaacaaacccagacccatatccactgagcctatagcagggccgtgtgcaaacccagacctgtgtccccactgtccagagcagggccgtgtgcaaacccagacccatatccactgagcctggagcagggccgtgtgcaaacccagacctgtgtcccctccgtccagagcggggctatctctgcatcatctgtccttcccacaaaactaacatggccccacagatcaggataaaagtatactgaaaagtcatttcaccaggcttagtttttacatctgtaggttgttaccaagtatgttttgttataagagacacaaagagatcccatgaatatgcagaagtaaaattgccgctggtgtctggttggcgtgtctcctgtcatcggcacatgcttgtcttaactcgtgatttaatctccacttgctggcaggacagccccacagctcagcccctggacccggcaggtcctggctcagagaccaggtgacccagtggctgccttccgcccatagtccttgtctttggactctgaaatcttgtatttagtagtagcgctcgtataacttatgcctaagcctgaggtgttagagcagcatgttggaggcctgctgtccctcctggtggaggtgctgacccgcaccttctgctcttgcagttcctcaaggcattcacggacttcctggccttcatggtcctctttaactacatcatccctgtgtccatgtacgtcacggtcgagatgcagaagttcctcggctcttacttcatcacctgggacgaagacatgtttgacgaggagactggcgaggggcctctggtgaacacgtcggacctcaatgaagagctgggacaggttggtgtctcctgagtcatctgctgtgatttattaacrtctgggtgagtctgcttcacgttcctcaggtcctgtgcctgtcatccgagcgtggctgtacctgtagctggcgtaagacagcagcagggttgttttgaaccctatttatgaaacagtcagccgtgctgttacatttacaacagatgcagaattacctgcacttgctgactcctggaaactcattggagcttcctgggcagaactctttctgtgtgcaggtgtgaatcaaggctggtgggtaaaagtggctttgccagccttgcactctgcttctgcacctgatattcaagtctcatggcgagctgggtattttcactttaaagatgaacaaaccagattttcagtgacttggtggattgcaaagagttcagacgcctccattcagatcctgctgctgcatgatggctgcgggagctcgggcttcaccgccacacctcgagtgtctcagtctgtgaaatggagatgataacagatgctggccttacaggattgggttgcagattaaatgagataatggacacaaggtgcacagcacagagtctggtgtgaccaccgccctgccaccgcaccaccgggaggcacacaccagacctgctggcttgaagggagctagggaaagacccattccctgggtttccccagcctagagcggtgaccttccctaccttcccagccttaacgttgcagagtgcagggttgccggagcaggtaccagtaaacggtaattggatttttcggaagaaatagcgattttgaaggatattttagcaaacaaggccactttagacaggtagctgaaatctccatctcgctcccagatgacagcctgtaaatagacttagactctggcagatacagaggcctctctctgcctcctgtgaggaaggccaacaaacggaaggatcatgttccacatttgatgagtttgacttttgaatgtgttcctccagcatgtcccatactcctcacagtgctttattgtttgagtcagcaatgcgcaaactataatttagttgttcaatagtcaggtatttttatctaggaatattctatctcctttgcaacaatagatggtacattttgtgagcttctgataaattctttgggaaagaacttttttctgtaacaaggaaagtgcccagcagcgttgagtgtgggggaaagcgcccagcagcgttgagtggggggaarcgcccagcagygttgagtrsgggggaaagcgcccagcagcgttgagtggggggaaagcgcccagcagcattgagtgcgggggaaagcgcccagcagygttgagtgcaggggaaagcacctagcagtatggagtgggaggaaagcacccagcagtgttgagtaggggggaaagtacccagaagtgttgagtagrggggaaagcacccagcagtgttgagtggggggaaagcacccagcagtgttaagtaggagggaaagtgcccagtggtgttgagtaggggggaaagcgcccagcggtgttgagtggggggaaagtgcccagcagtgttgagtaggtgggaaagcgcccagaagtgttgagtatggaggaaagtgcccagcggtgttgagtgtggggaaagcgcccagcagtgttgagtaggggggaaagcgccaagaagtgttgagtgcgggggaaagtgcccagcggtgttgagtgcaagggaaagcgcccagcagcattgagcacggcagatttcttctctgccctcttcagtccatctccttggagttctgcaaaacagaatttaatttctgttgttctgtcctgaccaaaaccaggctccagcttggaggctgacctcctcgtacacaaagaagtgtgtactgttgctcacgggggacacactgaggtcaagacgggtggacaagcccaaaaggcaggttcatctgaccgcagctctgtgggtaaacgcctgtgcccactgtcgctgtgcagtacgataacacgacttcttttgtatgtgaaatagattcacccaccagtcaagcgtctgtgtccacaacagaaacaaccatctgccatggagatcctgtgccagaagcacttcgtgcaccttctctgtgtcctgtgcacactttatgcaccttctctgtatcctgtgtgctcagtgctattgcgccgtttctcaaatgagaaactgagtcaggagcaggcagtgccccgttctgcgatgcagtgctgcctcccgagcacgagtgccttggaacacaaatcttgcttcaggccaagttagcaggcaggcgtgcgttgtagtgagggccatcttttgttcctrgagctgagggtgatggcagcattraccagcactgggcttagggttgactgtcccaccaccagaaaagaaaattgcaggccaggacccctgatgaacaaagttgcaaaaatcctcaacaaaatactagcaaaccaattcagcagcatacaaaaggatcataccccacctgtgggatgccagggtggctcaatgtgtgcaaatcagtaagtgtagtgcattacgtctgcaaaatgaaggacaaaaccatatgattatctgtgatgcagaaaaggcattggacaaaattcagcatcctttcataacatctctcaacaaattttaggtatagaggaatgtacctcaacacaataaaggccataaatgagaaacccacagctggcaatggagaaaaggtgaaagcttttcctctgagatcagaaagaagacaaggctgcacacattcaccccttctatttagcatagcactggaagctctagccagagcagtgaggcaagaaaaagaaaaggcattcgtataggaaaggaagaagtgaaattgtttgctgatgacacaatcttatatatagaaaagcctaaagactccaccaaaaagcttttagaactaatcaacaaattcactaaatttgcaggatacaaaatcaacacccaaaatcagtagtgattctatataccagacaagaaactatttgaaaaagaaatcaaagactttaataaacttgcttaatagtaacaaagcaaacaatcttatctctgcgtcccgagctaacagaactgactggatttgtgtccagaggttttaagcttttgtttccacgttcttaaaactgggataataacacagttgatgtgttaataacagttgaagattaaatgaggctctgcccagtggctggcacaccctgagtgctcagtaaaggtcttttataattaattttttttattgttcactttcatggtcatgtttcctagaaatatgccacctatttagttatagctaaacaggatgataaaccaaacctcttaacatttgttatctcattcttatccattttacccttttaaaaatgcttttagggccaggcacagtggctcatgcctgtaatcccarcactttgggaggctgaggtgggtggatcgcctgaggtcaggatttcaagaccagcctggccaacatggcgaaactcccatctctactaaaaatacaaaaattagccagacgtggtggcaggtgcctgtaatcccagctactctggtggctgaggcatgagaattgcttgaacctgggagayggaggttgcagtgagccgagatcataccactgcactgcagtctgggtgacagggtgagactccgtctcaaaaaaaataaataaaaataaaaatgcttttgggattgaaaagcgtttattctaagttacttcaaagtcctgtataagaagggtacacaggttgaatatcccttattcaaaatgcttgggaagaagtgtccctgtggacgcgcccaagctcagtctcaagatgctgccgtgcgttccagaactcctaccttcagttattcacgataaacgtgtgacccatgagcttatctaaaatcagagtttaagacgggttgtatctttaacacatatcacagttttctctgagatttgttttgtccttatttgcttgaattttaccttctcaaccttacatggtattgtaggttttgacctccragactgtatagagtaagttcgtcctctctgtagccttggttttttattgttgttgttaagattcgggacaacccacttayactctgtcttcccaaacaaatggagccctggccccacccatgtctctgtcccggggaatgggactatgagaccatactctgttttgctcccaacccagagaaggtatcccgaggcctccccacccatcctcctgaattgcacctgccaggactgcagggtcctgttgsacgctgggaaggaggatgaggcaggagcatggctcagcccagtgagggggtctgtctgggggaaagcctttagaaatccaccgcctattcaagtcacagtgggagctggggaggaaacacggctgctgtgtgtctgagtcggggacgtgcgggmctccctcagagcgccctgacttgctgtgccctgcccgcaggtggagtacatcttcacagacaagaccggcaccctcacggaaaacaacatggagttcaaggagtgctgcatcgaaggccatgtctacgtgccccacgtcatctgcaacgggcaggtcctcccagagtcgtcaggaatcgacatgattgactcgtcccccagygtcaacgggagggtaggtggcagcccccacgccgtccaagtgtgtgagtgagtgggcggctgtgcatgctgagtccaccccttttcactcgagtgtccaggaaaatccaggccctctctacggacttcagtgggagggatggtcagaaggtgcgatgtgtgtggtgtcccgttaggacacatctgctcagtgatacccgtgttagaattggttatgaaaaccatagaagcagggcaaacacacatgcatgcacccagacaccatgtgcacayggacacacatgcacacacgctcacatgcaaacacatgcactcacacacgcccagatactgtgtgcacacacacacatgcagacacacgcactcacacatgcccagacactgtgtgcacacacagrcacacatgcacacatgcagacacacacacwcacacatgcccagacaccgtgtgcayacacagacacacatgcacacacgctcacatgcagacacactctcacacactccctgacactgtgtgcacacatgctcacatgcagacacacacgtactctcacacacgcccagttaccgtgtgcacgcacagacacatgctcacacgcagacacacacatgcactctcacacacgccccaaatgccgtggctccagatctcagcatctctgggcagggctgragtcccaggctgatgctgttcctgaatttccccgcacacagggcagcctcggggatcaggtcccagccggctgtggccctgagcacatcacttcaccttcctaaacgctgattctgcagctgcaggcgcaggataatagctccaacttcttaaggggtttcagggtgaatgtgacaatgtgagtcaacagcaggagcgccacaggtcacgcctagtctaacacacgctttggttaggagaacgtccccatcgcacaggcaccagggcagaggcacagccagggtccagggtgtttgtgaatgtctgtgttcgtggcaccgtgtgactcagtctcccttcctggacgctagcggtcacttgccatttctgagcgcaygtgaagcctctgtggtttctagaagtgtcggtgctgaacgcacgcccgtttagccttcctcacccgtcagtctcaattacaaaacagagtgcttgagaacgatggaaagctgtaattccatcccactgtataacccctcacngcccacaagctgccttcgtggccgcggggaccccccccaccccgcttcttgttatctctctgcgcctgtttccctctatcttcagtggacncaccgtgatttgggggttctgggaactgcttttttataggagcgcgaggagctgtttttccgggccctctgtctctgccacaccgtccaggtgaaagacgatgacagcgtagacggccccaggaaatcgccggacggggggaaatcctgtgtgtacatctcatcctcgcccgacgaggtggcgctggtcgaaggtgtccagaggtacgtcgcgggccaagggtctgcctgggtttcctgatgtgactcagcccctccccagccccagtcagggatttgcacctagaggcgtcctcagccccaccctgtgccctccacactgagctgtgctgcctttgcacccagcttctctggacccccgtccctgtatgagcccctcccaccgtgataagcagcgtctggtccccggcgcgtgagtcttcatctctgactttgcgtgggtggcttytcctcctgaggtctgcagtaagttagaggtcattccaaataaccacaggcttcaaaatacggaaacaatcattcttttaacacaaatctccctcctgcatctcagaaaactgaagcccagaggcccagcggccttcccagagccacagcctgggccggacagagcagagctggtgcgggacctctcaccgcccaccctttaagcaaacgcttggaaaaatactttaaacattccagatacatggcataatttcaactcaggggmgccattttcaaatccatccagctcatgacttctgtattactgaacctcccctccccaaaagtgccttcagggactgagtatggtgagaatcatgttcgcgcttctcacctcattacagccatgtttttgtcgctgctaaactaatgtgttttctccatgcaacttgagtagcagcacagatacgtcaacagtatcaccggggcccttcgttccatgcgtaaacccacacatgcgtaggtgaggcttcttggagctgggtttctctcttcttgraacacaagtgcccaggaatgccactgccttcatcacaggtgttagaagtcagggcaggctaccccgcccacctttgagactcctccctgccctgaagcttttcctccagccgctgctcccacctgggctggccagaggcctccactgccatccccctggtgccgcgaagcacgtctgtctcccgggtcctctgctggcctctcgcatcccaaagccatgctctgtctctgccgtcccagtggctcccacaaggccctgaaggtcgctgacccccaggcgtgcaggaggaggcattgtatagatgggtgcacccacgtgctggctgaaggcctgcgctggaccttcgttccccgtcagtgactcaagggccttggtgtgggggtaacagcctctcagggtccctctccctctggcatcgtgttctccgctcaacaacaacaaagtccacgaatcaatgagcaaaagtgtcatcgaagcaaggattgcaggccatgtgcctgccatgctcttctggagaacaatactgacaagaatgtgcctcactgctgtgtgcyaaggagggttgggttgggtagaaattctcttgctcttggaagattttttgagatggtgaataagttcattatgataatttcctaactttataatgcagtttataatctcngtttaactgaaagtatttcttttttgaaaagaacgctttaccaaaatataaagcaaatactctatgaaagaggaacatcagaatctcagattcaccccgaggtttcccttctcattgcagacttggctttacctacctaaggctgaaggacaattacatggagatattaaacagggagaaccacatcgaaaggtatgtgcagacctcaccctcagatgygaaaggactaacgaataaagagtgttctttataaggttctgcgtttgagggaaaagacaagttctctatgttctcccacaattcgcttcctctccttcccagtgacaccccaggaatgtcaccagaatgttctggagaagtgctggacacttagagaagggcttgggtgcagccacagcgctgcttcccctggatggtttttcttggagatgtaaattggagttcagtgaacaaaagttcactgtcaawtatgttttgggttaagccacctgaagtcaggttttgctgcaggccgcgttctgacctctccaggcccctttgcctccacgaggggagtgagcagctgcccccggtgtggccatgagtcccgcagggaggaaccctggctcacgtgctgggagcacagcgtcgtgtcgaaaacagtttgcacrgttacgcttttcagtcaccagtttgatgttggattgttttacttttcatatctttaaaactcttcccattttttagggactgtctctgtcccaaattgcttgtccctgagataagtgacccatcttgagatctgactcaggagagggggtggtggcttatcaacaagcacgaatgtgcggtcatggttccggcaaagacacaagatctggtggtgatggcctcaaaacacgtggattttaaaatttcattcttagggaaaataaactccccagtggaagagaaaggacaaatcccttgattcggcggggctcctgggccctccgctggcaccagctgcaccctctccacagcaccctgggcttcccgggggccgcaactcactgccgttgaggctccgggtttgcagccgtggaggtagtgaggtcgtggcctagatgagagcccccatcagggctctgccragggacccctggctctgagctgggctggcactgcggccagagcccctccgcagcttcccactgagtccaaggccctgaggaggctgaggggcagcagcgggggctgccaaacacttccgatgctccagacgccacacaggttttctgagtcttccggtaacaggacagcaccagccaaaacgctttttcctttggttttgatctcttagggtaacgccagttcattgacaaggatccaatctctgacacaactttgagtctctgttcakcggtgtttagggagggagtcggtgcgtagggaacgcagcctgcttggcagaatctgagcctatgccctgggtaggatggggacgtagtgaggagccggtgccacagggcccagactctgccccactgggtacacctgctgcgtccttcaaatccaggcctctcagggcatccatgggaggacacccctcacccagcagccctctgtgtgtcccctgaggaagggccagggctgccccagccattctgctgtggagagctccacagttaccagatggaatcacgtgagcacccgtgtggacggtgtgaccttctgcatttctctttcaggtttgaattgctggaaattttgagttttgactcagtcagaaggagaatgagtgtaattgtaaaatctgctacaggtaaaatttctttttcttttgatttattaagttatacgtggtggttgtgttttattctgatgactaaattctacaggagctttaaggatttagggtttaagaatgatttattctttttttaaaaactatagacaaatcctctcaaaatactaattttttatttttaaaaagtgcaacatttctggaatgctgaggaaggagtcctgggctaaacatccggcacccttgctctgtccatcttttagtgtcgagttggggccactttactgttgaaaattgcttaattccatttgtgaaagttcctctgcccatccctatcccccacccgcttttctccatgcagagctaaatgacataaaatgtttttaaataaccattttcaaggaaaaggtaatgtgggtttgcaaatgtatctataataatgttcaaagttgcaaagtgagctttgttgattggcagttgcsgtaacagtgtgtctgtgagaacagcacactcggttcgtgctccggaatgctgggatgagcagtggcggggcacagtcagagccctgtggccgccatgatgttttggtgacccacacggktgggcactctcctgatcctcccactctgacctgtggctgcccctgtccctgacgattgcctctgcagtccaggtggatgcatctgtggtcccctgacctccctgcgaggagctctcccaggcactttgcatcccccawgcacaggtggacgacctcgtctccccccaccctcagcaggtcacgacacatgccacaggtcactcaacaccgcagcccctcaggctcccgcccacagtgctgaggcttgaacgtgcaggcgcccctggctgtttgccctggacaggcagggcccgtgggctccgtctgcagaggccacccctttgcatggccatcacttcctaagagctcccaccgccccctctgaggctctcactcaccttcatcaccaggttgtcctcaagtgtccccagagggcactgcccacagcccccacagtggccttgttccccgcttcctgccgtgggctttcccataggaagggcctttcacccatctgtcctttccacggacggctcaggaagcctctcccggacctcagccccatagcagcgtgcaggacattgctctatggtggagctgtctgtccgtctgcagccactggctgcctgcacgcatcccgaacgcagaaccgatgctcttctcagcaacacgctgacgtcacgccaccctccgccgagtgctcccaaatcctgtgccgttcagagccctccacgcagcgtcagagcagggcttcattaagagctgtgggatctcactcttcattgtttcctaaaaccagacactcccaggctgcatttagctctttggaaagatgcctggcaaacaaccaaacagccactccccggaaccagacaggctggagagcttcatgccagcattttcctaagatgtgccgagtttaattttaacacagtagacagagcagggccatcatcagtgccgtcgggcacccttcggatcaggaccatggtgcctcacttcctaagaccccgaaggagctgtagggggaggcagtgtgactctcggtgacgccctgtgagtcatagcggctctggggtgggcagcagcctcaggagggaggagggtgccatggctgctctggggggctgccgcctgccttcgctggttccttagacacagtcccactgtgtcacacagcatcacctctgagacacgccatcaaatgtgggatgaatccaggctccacagtgagatgtctactgatggtcataggatgaggaacaatctgtgtgtgaatgttgccaggactcccacgaagagcttttgccagccagaccgtgggatcagcaggacagggtctgagaacaggttcagatgcgcgagacttctgtgtgtcagaacccttccccccggctcggatgaggcgcagtcctgagagtctcagccactcggagttatctgggataaacgcatcctgggtgggaagttcctggtccatcccgtcacgtggttttccccgtagcagtcgaatctagctgttgagccatggctggaacatgctgcccgtgacctgcggggctgactcacgtggttttccccgtagcagtcgaatctagctgttgagccgtggctggaacatgctgcccgtgacctgcggggctgaccacggtgcccaagaaggcaagcatcagccaccccggagccgcccctgccgcgcactcaccccggagctggccctgccacacgctcacaaggggtttttgctgcatcctgaatgcccaagacctcagggcattgtgggctatgccgtggaatctttgtaaataacttctgttactatcaaaaggctgaagagccgctggatcactcgaagaatccgggttggaggcatttgtgccatgagaatatccctatccgcactgggacgcctgtggacctcctagggcctctccaaggaactgagagcttgcaggagagacggccctgccatctgaagccagccactcatcagttacttttaagagaagtttgaatatgtaattaagcaaggtgttctgtaagtagtagtcatccccggagaggttcactaattgcactggagttctccctgctgggcggggagaccctgcagccagctcacagctcgtgtttcctcctgggctcagccctgtagggggttgcggctgtcagagccggatctcactgttktggggctgagcagccccaacaggggcctcccatgatgtccgcaggacccttttttatatgtctgtacctcagtcatgtgtgctttcctgggattctccacggtggaattttgaggaaggacttcggaagtcacaggccactcggctgcatcaggccttccctttcaaaggcagatgtgaaatctctctttygggggatcctgcggatgcttactgcacccaaggtattatgtacgcagtacacagaagaccgactcgaaagaagaaaaggagagtacataagcatattcatctatgaaaaagaaaagcaagcagaaaagaygaaagagaaggaaagtcctaacagtgcaccctcctggagctcctccaggagctgcttccttgatgccctttttccagccatttcggggacatttgctgtcacgcctggctttccatgtccttgagctggtctgtgagacacagtgaaagaccccccaccatgggctcaaactgtggttctatagccctttctcttctccaaatggcagtaagcccttcttggtcccagaggggacagccaccaaccacggctgcacctgcgacacaacccagctgtcttggggacaggatcctgtgtgttcggttatgtcacctgtgtgtgcacggtcttcagttgctcattgtagattaacttttgctctgtcctctgggtttttttattccaaggctgttcctcaccaagtcttcaggctgaaggtgtcctgtgtcttacagtggaattcacaagctgagacagtgggaaagttaagccattcacatgctcttggcatgagttgtgagccatgaaacatgaattttctagtaaaaaatgtgctgttgttcaagaatgcatcattatgtcatttggaccacagttctcattctgaactgtatctgatgaaacaacagcgttggctggaaaccatgggagtcgggaaacggctctgacatcgattgggtagtttaacccccgggccctgcttttctatgctaagcaactgagactctgtggtcacacctctgcagttctgcagagatcctccagggtccaactcccagcctcagcctgctcactcccgtgccctccagcctcagcctccccactctcccgtgccctccagcctcagcctccccactctcccatcccccccagcctcagcctccccactctcccgtgccgtccagcctcagcctccccactctcccgtgccctccagcctcagcctccccactctcccgtgccctccagcctcagcctccccactctcccgtgccctccagcctcagcctccccactctcccgtgccctccagactcagcctccccactctcccatgccttccagcctcagcctccccattctctcatcccccctgcctcagcctccttactctcctgtcccctccagcctcagcctccccattctctcatccccccccagcctcagcctccctactctcctgtcccctccagcctcagcctccccactttctcatccccccccagcctcagcctccctactctcctgtcccctccagcctcagcctccgtcctcccccatgccctccagcctttgctcggcactggtttgctgcatgtattggcaacacctgtgtcaccaggtgccatcctctctggctgcaggttggcagccacctcagccacatgagcgtcaagtgtagccatgttcccacagcttccctgttggtgtctcaggagttagtgcttcctggcatccaggaaggaaggcaaggcggacccctgttcctactcctgagtcctcgtccaagctccaggccttggatccgggtcgtcagcccgagagcgtcccctccccatgtccctcccaccaccaccctggggaccactgcctgcccactctggggccctctggatttggtccccagtagacttcccgagggccctcagtgtctgggggtctcagggctctgccccgccaggagctgggcatggagcttcctacgcgtgccgctcaggctgctgtggtgtttctcccaccctgccgtcaccgcgccgtagcacggcgtttccctgcacccaggcacaaaccagccgcctggcagagtgccacgtggcttcgcggaccagggatgcttcaggtgcagagggagctctgtgtgtcgggagcacctgcgcccaggcacaaaccagccgcctggcagagtgccacgtggcttcgcggaccacggatgcttcaggtgcagagggggctctgtgtgtcgggagcacctgcgcccaggcacaaaccagccgcctggcagagtgccacgtggcttcgcggaccagggatgcttcaggtgtagagggggctctgtgtgtcgggagcacctgcgcccaggcacaaaccagccgcctggcagagtgccacgtggcttcgccgtccagggatgcttcaggtgcagagggggctctgtgtgtcgggagcacctgcgcccaggcacaaaccagccgcctggcagagtgccacgtggcttggtggaccagggatacttcaggtgcagagggggctctgtgtgtcgggagcacctgcgcccaggcacaaactagccacctggcagagtgccacgtggcttcgccgtccagggatgcttcaggtgcagagggggctctgtgtgtcaggagcaggtgacatcacagcagaacygtcgtggcctttgctgtatgctgcagtgcctggaagagaaactcgctttatctgaggcctgagaagcccacgttcacagcacaagtatgtccacagcgatcacagtgttactggacgtgtgggaaaaaatgacgcaaacgtttcccctgactcttccaagttcagaggtggcccggctgccttgctctgcatgaggacagatgactctccgaaggggayttgtgttcaccttccagcatttcagaaaccaggaccccctttgggtcaccccaacgcccgtcccgagggcattttgtcccctttcgtgtctttcccagagaaaaaacagagtcccggagccaagttcttttcctcgttcctgcctctcctgtggaatttctagggtgtaggaataaaacgaggctttggaggttatctgtgggtttattttttcctgactgtagcgtgttaactggtccattaaaatctttaaaaagctttccacactgctatccctgttttttgttttttaataatggcataattttaaaaaataatctagtcttccccatattgtgattaaastcctcatttttctcattttgtaggagaaatttatctgttttgcaaaggagcagattcttcgatattcccccgagtgatagaaggcaaagttgaccagatccgagccagagtggagcgtaacgcagtggtgagagccgggctggggagggcctcgtggcggtcagctcccctgctgtcaggaaggaattccatgttccacaagttcctggctgggaatggcgtattgtattccttggggaatgtttagaaatyagctgggccagaggcagacagacaggcagcctcagccggcaccgaccccagggggcctccgatacccagccaggcacaggctgtccagccaggcacaggccatctcctccccagccttgcacagggttttattttcgggtgggtgccaggttggttgattgatgttttggggagtcagaattagcacgtttgtggttattgtattggagcaaaaagtctttgtgttgacgtttctagtgatttgcttcaaaacaaatcagcactttcgttttctgttgtgacatcacctgtttgggtttctttccccatctgggtcttaagcttgtatgataaggtttctttccaccacttgttgtatagcaccgcccagcagcccgcacacctgagcctcccactccgtgggtccggctttctgtctttggggctgctgcggtagggggccggcctgagtgtctctcacagcagggcctcccctccccgtcagacgcgctaaagccgggcaacacgtggctggggtggacacgctccctcctgtcagacaccttaactccgggtgatgcgtggctgggtggacatgctccctcctgtgagaggtcctaacgccgagcgacgcatggttgggtggacgtgctctctcccgtcagatgtcctaacgccgagtgacgcacggctgagtgcacatgctccctcctgtgagatgccctaaagctacactgtgcgtggctggggtggacgcactccctcctgtcagacgtcctaaagctgggcgacgcatggccgggtgggcgcgttccctcccatcagatgccctaacgttgggtgatgcgtggctgggtggacgcgctccctctgctccccacgtggctgctttgtcccacggtgtctgcacccttctcccgacaccaccctggggtcttctccctcactccagcccagggcagcacctcctctcacaccgaccttatcatcttttcatgaaaaagaaacagtaactgacaggctctcctcccagaggtccaaaatgacgctggccagagtggctacgcactggaaaacaagacttccaaggctggctctgcaccaaggaaggctgaaccgagagaaccttggactagaggtcgtggtactcagcgctcccttcactgaccatttaaatgtaaagcaatgtttgtcctcgctgtcagtcgcaacacttgattactgtagatgtcagagcattaagaattcctgccgatggacaggagccctttcgctcgcgagcccgtgcgtgcagcagccagagcctgtgaacttcgtggaatgctgtcgacgtgcggatcatcatctttacgttgctattaaaacagctcctggcactacaaagtagctgcgttggagccaacaggaatccataaatcagcagcaggttaaagattgttgaacttctctgtgagggatctggaaaatacatcactgacttccaccagccacagagctgcagggtgggagccgagcgggttcctctgagcagcacaagcgtcctgcgcttcgacacacaatgagcctcagtacaggggcgtgtgggggctcctgagggggcagctccatctgcagctcgctttccaatagcgcgaggctgtgctttgctgtgacgtggtcgccgtgccatgctgagcacacgatggctacaggtcacaggtgactggtcctccatggagggtcttcatggcctgagtaccaaatatcttccacctgctggatccccactgctgctgcccaggagagtaggcgcatggattatgtgaattgtgatgattgtaaagtccacttgctgcttgtttcagaaagtcttcttgagatgtaattgccatacattgatctatacatatttaaaatgcgagagcagcaagggcattgacacacgaacacacaggtggaggctttgcctgctgggaaggggacgcatccctcaccctagagactgtctcgcgccctcatactcccatccctgccaactcccactcgctggagaccaccgctccactcgccgtcactgcagatttgtgcccaccttctggagcttcctatcagcagaatcacaaaaggcggctgttgtatccggcgtctttcactcccataactgctgagactcggccgtgtgggcccgttcatttctgtcgtgatgaacagcagcactcgttcagttgccgagcactagcggtactagttcagcggccgctagtccaagtacctctagcggtactagtccaagtgccgggcactagcagtactaaccagtccagttgccaggctagtggtactaaccagtccagttgccgggtgttagtggtactaaccagtccagttgccgggcactagcagtactaaccagtccagttgccgggtgttagtggtactaaccagtaccagttgccgggtgttagtggtactaaccagtccagttgccgggcactaacagtactaatcagtccagttgccgactgctagcggtactagtccagttactgggcactagccatactaaccagtccagttgccgggcactagcagtactagtccaagtgccaggtatcagtggtactaatcagtccagttgccagccgctagcagtactagtccagttaccgggcactagccatactaaccagtccagttactgggcactggtggtacagaccagtccagttgccagccactagcggtactagtactagtccaagtgccgggcagtagcagtactaaccagtccagttgccaggcgctagcagtactaaccagtccagtttccaggcactagtgatactaaccagtccagttgccgggcactagcagtactaaccaatccagttgccagcactagcggtactattcagtccagttgccaggcactagtggttctaaccagtccagttgccggcactatcggtactaaccagtccagttgccggcactagcggtactaaccagtccagttgccaggcactagtggttctaaccagtccagttaccaggcactagcggtactaaccagtccagttgccagcactagcggtactattcagtccagttaccaggcactagcggtactaaccagtccagttgccaggcactagtggttctaaccagtccagttaccaggcactagcggtactaaccagtccagttgccagcactagcggtactattcagtccagttaccaggcactagcggtactaaccagtccagttgctggcactagcggtactaaccagtccagttaccaggcactagcggtactaaccagtccagttgccggcactagcggtactaaccagtccagtttccaggcactagtgatactaaccagtccagttgccggcactagcagtactaaccagtccagttgccggcactagcagcactcgttcatttgccgggcactcgcagtgctagttctttctacggatggaccagtttcttgattcttccgcctgttggcagacattgggttgtttccagttggggctgttttggaagcagctgctgcgggccgcctgctgtgcgtgtctggggctgagccgatgtgtccttttctcctggggaccctcctgtcagagcgtcttcatttctctttccacagcttcccttttctggctgcttttgaggtgtttcgtgatgggatgccttggtggagtgatgctgtgtttctttgctcagccgtgttgagcatctcggatctgcggcgtttcatcaagtttaacatttttcagcaattattctacagatatttttcttccttgctccctttcagcagttccaggacccatgtactcaactgccggatgttgtctcaccgcttacaaaggcttttccctttaaggttttccacgtttctttagagacggtttctgttgccatgtcacgagtttttcccgtgcagcgtctaacctgtcagcaccccacgcaggacacccctctcctcaaacatcggagttttcatgtctagaaattccgccagcgtggttttgtatcctcatgcccctacttaacatggggcgtgtgtgataacgattgcggtgactgtttaaatcctcctcgctaacggatgggacgtgtgtgataacggtggcagtgactgtttaaatcctcctcgctaactgcacccctgctgccagctctggaccagccacagtgttgcacagtcccctcgtttggggcagggacggtgcccctgcgtgatggtggcctgtggccggatgcctgcctgtgggctttgttggatgctgggtatcgtggtcctcctggagatcttaaatcttgttctggggtgtggctgagttcctgggaacagtctgttcctttcaggccatgccttcgtgatgtccagcagacccacagcagtgcctgccccgggtggtgctccccagactgccaggccctgagcrctgtgcctggtgagtggccatgcctcctggcagcaggctgtcccaccctcctcctaatggcttgttgctggcctccaggagcttcctcacagttgcaggtgcttgaggggccgtccacagcctctggcatccactccatcctaggaactctggtgcttgttcccttgacacccaggtctgccccataactcagggaattcactggctccggctacgttcccctgcccgagcctcggcctggaagctctccgggtagtgagctgggcacttgcagggccccctcggttggcagcattttattttgaaataattacagatttaggagaagttaaaataagtagaaagacagtccagaggggcctgtgtgtccttcgagtccagttwatttctcctttcgctggctgtgcttgytgtcatatcgaagaaactgctatgaaatccaagatgatgaagatttgccaccactgtgtttttttctataagttttctagttttagctcttaaatgtaggagtgtaatccatgtttggctaatttttgcatctttcataaagtgagggtcctactttatttccctgcatgcagttatccagttttcccagcaccatttggtgaagactctcctctcccactgagtgatactgacactcttgctgaaaagcatttgattacggtacctggaggtttatttctgggctctctgttccatcccattttctctatgtctgtctttatcccagttcccgctgttttgattactgtcagtttctagcaggctttgaaaccaggatatgtgagtctttcaactttgttcttctgttataaaatggtttggctattctgaacctcttgagatttaataggaattttaggatgggctttttcatttgtgcagaaaatgccactgggggccaggtacggtggctcatacttgtaattccagcactttgggaggctgaggcataaggatcacttgagrccagaagtttgagaccagcctgggaaacatagcaagaccctgcctctacaaaacatacaaaaggaaaatcagccaggggtggaggcacacatctgtggtcctagctactaggcaggatgagatggaagggtcgcttgagcacagaagtttaaagcagtagtgagccgtgatggcaccactgcatgtttccacgggcaactgagtaagaccctgtctcaaaaaaagaaacggaggaagggcgggagggaagagccattgggatgttgataggatttcatttaatcagtagatcactttgggtagtgttgtcatcttaacaatccatgaacatgggatatctttccatttatttaggtattttataatttctttcagcaaactttggtatttttcagmcttgagtcttttacctccttggttaaatttattcataagtattttacttttgttgatgctactgaagtggaatttttttttaatttccttttcatattgttcattggtagtgtatagaaatgccactagttttcgtgtgttgactttgtaccctgtgtctttgctgaattcagttagtggggagcacattcttcatggtcttctrgatataggatcatgtcatctgcaaataggccttagaaaggcatcctttctaatgtggaaactttctttttctctttatagcctaatcctctcacttagagcatctaatactctgttgaatagaagtggcaaaagcaggcatccctgtcttgttcctgatcctacggaaaagctttcagtccttcaccatggagggtgatgttagctgtaggtttttcttttcttttttttgagacagagttttgctcttgtcgcccaggctggagtgcaatggcacgatctcggctcactgcaacctctgcctcctgggttcaagccattctcttgcctcagcctcccgagtaactgggattataggcatgcaccaccacgcctggctaatttttgtatttttagtagagatggggtttcaccacgttggccagtctggtcttgaattcctgacctcaggtgatctgcccacctcagcctcccaaagtgctgggattacaggcgtgagccatcatgccttgctggttttttcacttaagtggtttttaccacgttgaggaggtttcttctctccccagtttattaagtggttttatcaccaaaaggtgctggttttttttcagatgccttttctgcatcagttgagatgatcatgtgggatttatgtcatgtattgcattgactttcatatgttgactcacttttgcattcctggaataaaccccacttggtcgtggtgtatgatcctctatgtgccattggattcagtttgctagtattttgttgagcatatttgcatctatatttctaagggatattgttctacagttttcttgtagggtatttgtctggctttgttttatgtgctgtgtccagggttttcgtagtacttagcaggaggaatagagaaaagtatttctgttctgtgttaccacaasagaaagtccctgattgacttttaaaagcagcgacatatttatttccaaaagcttctgcttatcactcacagcaacctaagttctgggaccattttgggttattatcctgtaaaaccattttcttgttatgtaatttttctggtttcagactgaagctatatatcttgtatgttttattgcctcttaggaaaagtcagagaattcattctgcaattcgcatttatgtctccaatctgtaacttgatcaacaggtgcacaaaagatctaatttcaaccacttatttattcagcaaacgttgttgagttttggctgtgtgccagggattcagtggtgaagtcagacacagtgcccacagccagagaacccagtgcctaacaatagaggcaaacccgtgagcagaaagctgcaaggtcgtgtgctcagcaggaggtgaggctggggtggctgagcagcgtctgttcagtgctactttcctctgagacgggtccactggcttctcacttattcttgaccaggagacaatatctggaggatgggaaggaaggagttccagaatgttcctggagaacaggactcaggcacacatagaccctgtcttgtgttctgacttcttcaactccccctttcccaacttctggcttttgagagctcaagggccatgacagccgttgacccagtggcaattctgtccacacgagttaagaggtcggaactagtgataaatatgagccttccctgagagttaggagacgcttcatctcatagaacggaaaacattgtttcaactcttacaaaccagcattctgccggattttaaaatggttatttgggaggattatggttcttttactattatcagtagggctggggctgaaggagcagggaaaacggaaggggaacaccctagatgatcaggtgtgaacctctgtgacggtcgcgctcagcagccttgactgatggaatgaagaggttcatctgtaaaccgccccctgtgtggctgcttcagcctctgcccccattccttgtgtcttgctggtggcggctgcattctctctgtatggtaacatccagaatgatgatcacagtaaggaatttgtgattcttgatttcttttgttcctgtgcaaccaatgattttgataaataacctggcaggtttccttcattgtgaaagaacaacctaccttacaaacttcccacataaaacatgtttactttagaaatatcacttgatattacccataaaattacaaatgattatccttaaaaaaaaaaggttaaatttaactctgcatttgtcaaaataaaggaacaaattttatcttttgatagatgactctgatttctgttacttatttccaggctttctagtctgaaaatgctgtaatccataatgattcttggtatttaatgtagacttaaataattcacttgttgatgacttactcctttcaagatttggttggattataatctttctttctttgtttacttagtactgtaagttttgaaagggttacaattcttgggttagttagtctaatgagagaagggatactgggaaggccgtggagcgtaatatttcagcaagtgacaccttgaattcgtgctaaacgctgcattgtgttctgcaggaggggctccgaactttgtgtgttgcttataaaaggctgatccaagaagaatatgaaggcatttgtaagctgctgcaggctgccaaagtggcccttcaagatcgagagaaaaagttagcagaagcctatgagcaaatagagaaagatcttactctgcttggtgctacagctgttgaggaccggtaaagtaaacgcatgcatcccgtcctgagagacaaactgggatgcaggccgacggcccagggcgtgtgagggcgagtggacgggagggaggccatccgcacagcygacggggcgtgtttgctgctcagggagaggctaggtgtcttgctacaccctggagtcatgtcaggaaggtcatgcctgggggatattttgttgtccatgaagaagatgcctgaaagcacactttcccaggaagtagtgaaaatagctttgtcatatcatattatgaacaggcaagatagaagggctcttacaaattctttcttctttttttttaagggatggcatcttggtgtgttgcccaggctggagtgcagtggcaccatcacaactcactgcagtctaaaactcctaggctcaagctgtcctcccttctcagcctcctgagtagctagaacttcaagcacataccaccatgcctggctaattttttatattttttgtagagataggatctcactatgttgcccaggctagtctcaaattcctggcctcaagcaatcctcccacctcagcctctgaaagtgctggaattgcaggcatgagcagtcatgcctgactgtaattactctttagaatggaatcaacaactaactctgttcctaaacttgttgctagttctttccaaatactggtattacttcttagatcattacatactcaatgtgtttatcattacttgaaaaaacttaatgaagtagaaaattacaaaaactaataatcatcataactggcaaaattaccaattacagattttcaggtacctctaaggcaagagctgccagtgtgccccagctccacaatggggactgaaagttgtttgaggctgaggccactaagaaacagtcgtctggtccacatggtgccttccgagctgagtgaaaggcatggatttcagtggtttgtaggaatggaagaaaaaaaatgccccaattgatgagaatgaagcagaaacttcagaaagttcactgggagtttatctcctagaagaggttaaaggcatcaagtttgaaagtctttaagatccatttcggtccaaaactgaaatccttatcactaaccctgcattttctgagcgtgttgaacaaatgttccttgagttctcgatctgaatggagtattaggcgaagtgggaagttttggtttggtggttttgtgttttgttttgaagtcactctcccctgttcagtccagagtaagtgcacagagcaccgtgtaaagaacgcgacttgcacgtgggaaggcttcagagcgcagggccacggccgccgaaaggctttgctgctgggggctgcgtccttgctctagtggccagtcactcacctgctgtctgtccaggagaagaggggtgtccgtaggatggtgtttgcctggggagcagctgggtcgatctttagaggccttggtggaggagcgtggggatgcctccggcagagcagatgggacagagcccctggggcggggggcaggttgacttgactggaatgggaatgtagaagagtggagagttaatgcctggttggsggggggggrtctcagtggctttttcgtgatgatacttgcttataaattatttccttataatctccagtcagcaagtgcgaaacatctctgagcctcagcttccttttgaatcgaattgtagggccaggcccggtggagcacgcttgtaaacagggccaggcccggtggagcacgcttgtaatcctcgcaatttgggaggctgatgcaggaggattgattaaggccaggagtttgagcccagcctgggcaatatagtgagatcccatctcttgaatttttttttaattagtcaagcatggtagcaggcacctgttgtcctagctacttgggaggctgaggagggaggatcgcttgagcccaggagttggaggctgcggtgagctgagwtcataccactgtaccctagcctgggcaacataaggcgttctctcgttctcttgctcgctctctttctctctctctmtmtatatatatatgcacacacacatatgtacatacacacacacacayatatatatatacacatacatacacacacataaaattacaggcttttttttcatctatagaatactatgattgtctgatcttgagacttttagctaggaagttcttcccaaaacctaaccagatccttccagttagaatttaaatccattcctttcatactttctagaagcayggcacgttacttcacacgaaagtagtctgaaacttagaaaaaatggaggccccaaagtgaggcagacatggtttgaccccagatctcccaaggagagggcagtggtctgactgctgtcggaagagccgcttacccccgacaccttctgcagcgtctgcaggctttgggttttccatatgtaaataggtgtggtgctagcgtccttactcgtgacatcatggtaagcatgaaagattgcacataggaagtgtcacacaggcctggcatgtggcaagcccatggcacctgttggccatagaatcactagtgttattctcagtattttatattatttagaggtacctggaccccaagtgggttctaagtgacaaacttmgaacagtttatacaaaacaaaagacaatcaatattcctgaccaccttgagtccagatcccatctttccatggttgagacatttttggtggtggttataatttcctgaaaccctccccaggtagtgagtcccacctacacacaaaaccgccaggcttgtcagacgtcagtgacacaagacagccctttacttctcacatgtttgatccatgtttatctctctgctgttaggaagtgtttcgctgtgaaacactagttcagaccttcagaagctgcttcagtacttcgtggtgagatcatgagccacagtgtggagtgttttgattttgaggggctacgatattttgacagctttgcaagtttctgcagttccttatttggattcctgggtcagcactgacttttctctatgctgtgtttggytttgcctccctcaggctgcaggagaaagctgcrgacaccatcgaggccctgcagaaggccgggatcaaagtctgggttctcacgggagacaagatggagacggccgcggccacgtgctacgcctgcaagctcttccgcaggaayacgcagctgctggagctgaccaccaagaggatygaggagcagagcctgcacgacgtcctgttcgagctgagcaagacggtcctgcgccacagcgggagcctgaccagagacaacctstccgggtaggcagcgygtccccgcccccacccccacactcccgcaaaaggggcttcagacccagtggccttcacctgcaagtcggggagccgcattgtctctactgggaattcggttctcccctggggcattaatgccagcttcttaggggtcaggtgaacactgggaacaaaacgggctgttttttccagcaattgtgatgtgtctttttcacatatgtgtgtgtatgtgtgtatgttcagtttcacactgccggctaacagatgcaaaaagacatgatggataaaatattttgagtgggataattctcatctgtttctgagacttaggggctctgcttcaggcaccttcaagcatctgctggaggaagtggagatattaataatgcatggttgttcgtctaagacgaagcagtacatgcccaagagttgtttttttcccaagaatattcagtagtttattcagatacattttatcgatgctgtccttactggtgttagatgcattatctgagattacatgttatttgaatcatttcagtttcrttcatgtacataaagcgaaagcagctctctaatttacacaaatgttaagttattcataaatagcacagataattccctctacctgatctgcaatctgcagaactccttttagggattggagggttttttttgttgttttttgttttttgtttttgagatggagcctcaatctgtcgcccaggctggagtgcagtgatcttggctcactgtgacctccgcctcccaggttcaaacaattctcctgcctcagcttcccaagtagctgggattaaaagcgctcaccttttaatagagacagggtttcaccatgttggccaggctggttttgaactcctgacctcaggtgatccacccgccttggcctcccaaagtgctgggattacaggtgtgagccaccgcatccagccttcttgtcattttgaaacccagcaaagaggagattatgaccatgttctttccaacttaggtcatccaggcagaaacccaaggacttagctgtaaagactgtgaccaagaaggttgagagtaaagaccraccaagatcttagaccacaagatgaacgccttcctgttgtttcaaaagtacagggacttaacgagtccacaaagagagtctgcacttgctttacctaaaataggaatgtttcataaaatacactcttaaatgtcgacaaaaggtgttatgttcaatactataaaaattgtattggtaaaacaagaaacactagtttcttaatcccatggatttgtagcatctgtcgatatccaaaaacaatacagtcttctaaaatctatagatttagtgattgagcaatctttctgactcacgtactctaacagactttcagcagatatgcaggactacggtttaattatcgacggagctgcactgtctctgataatgaagcctcgagaagacgggagttccggcaactacagggagctcttcctggaaatctgccggagctgcagcgcrgtgctctgctgccgcatggcgcccttgcagaaggctcaggtgctgcccgcccgtcctcgatagctggtggtcagggcrtccaaaacactgaaaaccttccgttaggtctcaccgcctcagattgttaaacaatctagcagggtaccacctgttaaaaatagaagcaaccgtgatagagatttaaaacgcagatcttgttttgcttgtcgggccagcttctgtgattagtgggtgatgaccagtcagatgtatgacccttccagatgcagtggccaggacagctgccctggctgacttctgttaaaaaaaaaaaaaaaagctatctcaatcactcctgagaatctacactaaaggtgtaagggaagggagctgacattactgagcacctagtgtgtgcctcctacagatacgaatgcatttagtctcaaaataaccctctcagacaaatgagggcaccagctttacaaatgggaataatttgccgaaaaggctgcagatgggaaatgccacgaggattcaacttgtcttgtccatcaaactccaaacgtctcacgcggccatgttcttgtgggaaacgcacacctgaagttttttctttaaatagttttgaaagcactatggaatgtatgtgtaaacatggatgtctttctggtatcaggaagcctagaaaagttctgactttgttataccacattttagatatgataggccaatttctcttgaactgttcatgaataaatccatcattggtcagagcaaaccagtggttaaggtaaaatgcgtctcacacaaactctggaaaccaaggaggtgaaaagttgagcctttgtgcatgtgggtgcactaatctgtcaatttcactaaaaacacagaaccagggtcctcagaatgacgagcctagagcattcacagaccttccatgtgaggaagacggtttgatgtcctcctctccctcacatgcgtaactgcacataaaccttacagaattacttcccaaatggaacagcaactaaggatttgccattcgctcttcatgtattccatagtacttttttaagttctcaactggcttttgaaacatttcatacaaattaacttgtgtttcagtttcctatcttgaaacaagaaggcacccacrtttccccccatctcttcattcttacagcttgaactgttacatttaggcacatagatgggggggaaaagattataaagaaattgactaaaaacttggaaattatttttacataaaattgtcatatttgattttgcacgttacaaatttgaaaattaaaatagcattaggaatagtttatgtttagaaatagatgctttataccaaatagcttgaagtaccttggaatagtgatcttacagaatgcagggttcacatttgcccctgtatatttaaatatattttcccaggatttacacacttttccatatatttaagtagaggaatataacaataactacaagctacttcatatatctcacatctctactgccaaagtttgtctaccagccttttccagctcacgtcattttaatcatacctcatttcttttactttattttgttttgctttcaatatgaaaaaggttttatcctatatggagaaaacagacagaatgtcgtaaattasctctaagtagttaatttttttatttgcctaggctaacttttcatctttgttatttctgcctagtgaatgaataacctgttcagaagtgaaacagagaagataaattccgcatttctttcttttgcagattgttaaattaatcaaattttcaaaagagcacccaatcacgttagcaattggcgatggtgcaaatgatgtcagcatgattctggaagcgcacgtgggcataggtgagcttcgtccttgctgctggcacatcctggtggccaggtcaccccttcgctagacaaaggcccatggcagcacgcaggtgcattcaggacaccyccgtcaccaccctcgtgtgtgaccgggaaggctcatgatgatggtttcatccgttcttctccccgtccctgccctgtgtgtggtgtgcagaaagcatttcttcagctccttcacctccgtcttntaggtgtcatcggcaaggaaggccgccaggctgccaggaacagcgactatgcaatcccaaagtttaagcatttgaagaagatgctgcttgttcacgggcatttttattacattaggatctctgagctcgtgcagtacttcttctataaggtaggagggtcgccgctccccctcacggtgttagcaacaggtcacgcacagggtggcacgacccttgtctgagccacttgatgccacaagaggtcattgatctccgaggagcagcaactgtcagaaaggaaggggtgaatctgattgcagtcatctcttgcttagctgtgactttgctttttacagtttccattacctacagtcaacccatgcccaaaaatatcaaacgcaaaattgcagaaataaacagttcctcaggtttaaattgcatgccattccgagcagcgtgatgaagtctcacgccgtcctgctgtctccttcctgggatgtggcttgtccctttgtccggtgtgccgatgctgtgtgtacactacctgcccctcagtcactctgtagctgtcttggtgatgaggttgacagatcacaagaagaagggtgaatatgacacaataatatattttaagaggaggagggagagaccaaattcatgtaactttgattacggtatattattatagttattctatgttttgttgttactctttcactgcacctactttataaattaaactttatcatgggtgtgtatgtatacgaacacacatacccatctagagcatagacagggttcaggaccatccgcagactctgcatccccgcagggtctgggaatgtacccctgaggatgaggagggcctgccrtgccgcgggaggagacccccagcccttttctccccccacagaattgagtgtggaaccagtgagaacctttcaggtggaaatgtttgaggaaggattccttattcactgtgcagttcgattctttcccgtttatactgatacctgcattgccttcttgtttctcttggagctgacaaatttcctctatacgttgtctgtcctgagtggccaaaacgtggtcacatgtgcatttcagttgcccctgaaataagagaaagctttctagaacccattagtgctgttctgccgcacgctgggtgcacgtggatccctcctcccatgtggggtgggccacgtcggtaggtggcggctgcctccctctgtcccgtcaccgaastaacagttatgccttgcctttcagaacgtctgcttcatcttccctcagtttttataccagttcttctgtgggttttcacaacaggtcagtcctagggtcttcagggacaggctgtctgagccttcttttccttcccrcagtgggtggctgctgtggggaggggagacttgggaatgagcagcactccccggcaccacgagggagccagggtgcccagcagcaggcgggggtgaagggtcgggcctggggaggggggccacggagctgaggagttgccgtcctggaggccccttgttccatgtcttctgaaactgccgtggccctgagatgcgggccagtgatgatgtggtctcctcagggcccagcagtgctgggctgggcatcctgatgccactgcaagaattaactccaactcgaggtccttgtggacatgggccaccccggtgcctggcacgttaacacatgcaacgtgcccataggggaagaagacagttcccatccgggaggggtgaaggactccccgggcatctgccctagatggacacctycttctgtcacatgtgtgctcagtggttggcgggccagctgccttcatgggaagtgactgcgaccagagtcactgaagcttgaagatggcaatcagaattgcaaatgttttctgtgacttttttccttttttttttttttcttgaagtttgtgctgatagaatgggatgagtcagtgttaggctttttgccagctgtgactttcatcctgaaatcacagttgatatcacagaccctagtttatattgttaagctttsaaaagcgctctggtctttctatgcatttcagaaagaaaatatatttaatcaaaagatccaaaaagtttgtaacaatgcactgaggtgccacttcttgtgactttcctcttacagactttgtacgacaccrcgtatctgaccctctacaacatcagcttcacctccctccccatcctcctgtacagcctcatggagcagcatgttggcattgacgtgctcaagagagacccgaccctgtacaggtaccatcctccaaacagcctctcctgagagcagagagagtaactaggcagcactctggcagttccttccaatagccacctggcagacctcagttgagggccagaagcattcggcatctgctgatattcttgcttgatcaggagcttgtttaaactggaagcaacatagctcaaatggagattcttcaagtcttgctggatggtttatgctgcatttggaacatctgtgtggagccagtttgcactttcctgtgctttctgacagtcctgagggagctggggtacaagcgtcttcctcgttgtgaccctagggaatctgtggcctaagttatcctttaaaaccatgtgtgttccattcagtgagaaaaaacaaaaattaacagctctggtttcagggtgtcttttctccccgttattttttaaaaataatatggaagagatatttttctgctatttcagaaatgccccccaaggtctctggcagattcaatatgttactgttttccatggtcttttaaattgtattagtccattttcatcctgctgtgaagacatacctgagactgggtaatttatgaaggaaggaggtttaatggactcacagttccacatggctggggaggcctcacaatcatggcggaaggcatgaggagcaaaggcacgtcttacatggtggcagacaggagagcgtgtgcaggagaactttcctttataaaaccatcagatatcgtgagacttagtcactattacgagaacaacatgggaaaaaaccacccccatgactcaatcactgcccaccaggtccctcccatgatgcgtggggatcataggtgctacaattcaagaygagatttgggtgaggacacagccaaaccctatcataaattaaaattttatttttcagataattttacatccatatgcagttgtaagaaataatagattctgtgggccctgatcccatgtcccttagtggtgacacgcaagaaactgcagtccagcatcacatccagtgtactgatgttggtgccgttcacccgttcccttattcagatcacccagctttccctgcacttacgtacatgtgtgtacatgacacgtgtatgtgtgtgttcaattctgtgcagtcttctcacatgcgtgtttcctgcatccaccaccatagccaagaccactcacttccctgcctgggattctgcaggaatccgtgcatcggcctcactgccctcatcagaatatttagccattctgtgggatcttgacggcttggatccamwagtaatcactgtaggtgattaaggacgatgataaaaaggcaaacttctgagttggttgtacatctttaataaatctaaagaaaatgggaataaatctaagaaaatgggagaagatatactgttctagacatgtgtctgaaaggaatcctgcaaattctgtcttattgaacaggcatctttaataaatctaaagaaaatgggaataaatctaagaaaatgggagaagatatactgttctagacatgtgtctgaaaggaatcctgcaaattctgtcttattgaacaggcataaggtgtcacgtcaggcgtaaggtgtcacagcaggcgtaaggtgtcacagcaggcgtaaggcgtcacgtcaggcgtaaggtgtcacagcaggcgtaaggcatcacgtcaggcgtaaggcgtcacgtcaggcgtaaggtgtcacaagctcggtgaacgtcaggggtgtgccttgtgttctctgttcgttgctttcagaagcagcagcatgtggcagcatctctgtgcctatgacgatattgcagtgaatatgagagagaaaatatctgagcaaaagttagccaaggacatgagtgggtagtgaaatgctggttgtgatgaacatgccacatttgtggccagagcacaaacttgatgtttactggccgtgcacatcttatcccatgaagacaacgtccagggatggccaccccagagcctgggggaggtgccgggccctgattctcgaggacacacgctgtgcacctttctcctcaccagggacgtcgccaagaatgccctgctgcgctggcgcgtgttcatctactggacgctcctgggactgtttgacgcactggtgttcttctttggtgcttatttcgtgtttgaaaatacaactgtgacaagcaacgggcaggtcagtacagagctcgattgcgctgacttagctgcttaggaataaagcctcccaagcccatatgatgattttgccaaagcagaattcagtgcagcccatgcagcttcccagcggggtccatcaccacctgcgcagtaattcagtgcaggccacgcagcttcccagcggngtccatcaccacatgtgccgtaattcagtgcagcccgtgcagcttcccagcagggtccatcaccacmtgcgcagtaattcagtgcagcccatgcagtttcccagcggggtccatcaccacgtgcacagtaattcagtgcagcccatgcagcttcccagcggggtccatcaccacctgcgcagtaattcagtgcaggccacgcagcttcccagcgggatccatcaccaygtgcacagtaattgagtgcagcccatgcagcttcccagcggggtccatcaccacctgtgcagtagttcagtgcggcccatgcagcttcccagcagggtccatcaccacctgcacagtaattcagcgtagcacrtgcagyttcccagcggggtccatcaccacctgcacagtaattcagtgcagcccatgcagcttcccagcrgggtccatcaccacctgcacagtaattcagtgcagcccatgcagcttcccagcggggtccatcaccacctgcgcagtaattcagtgcaaaccatgcagcttcccagcggggtccatcaccacctgcgcagtaattcagtgcagcccatgcagcttcccagcggggtccatcaccacctgcrcagtaattcagtgcrgcccatgcagcttcccagcggggtccatcaccacctgcgcagtaattcagtgcaggccctgcagcttcccagcggggtccatcaccacctgcgcagtaattcagtgcagcccatgcagcttcccagcggggtccatcaccacgtgcgcaataattcagcatagcacgtgcagcttcccagcgggatccatcaccacatgggcagtaattcagtgcggcccatgcagcttctcagcggggtccatcaccacctgcacagtaattcagtgcagcccatgcagcttcccagcgggatccatcaccacctgcgcagtaattcagtgcaggcctgcgcagcttcccagcggggtccatcaccacctgcgcagtaattcagtgcagcccatgcagcttctcagcagggtccatcaccacctgcacagtaattcagtgcaggccatgcagcttctcagcggggtccatcaccacctgcgcagtaattcagtgcggcccatgcagcttcccagcggggtccatcaccacctgcgcagtaattcagtgcagcacgtgcagcttcccagcggggtccatcaccacctgcgcagtaattcagtgcggcccatgcagcttcccagcggggtccatcaccacgtgcacagtaattcagtgcagcacgtgcagcttctcagcagggtccatcaccacctgcacagtaattcagtgcaggccatgcagcttctcagcggggtccatcaccacctgcgcagtaattcagtgcagcacgtgcagcttcccagcggggtccatcaccacctgcgcagtaattcagtgcagcacgtgcagcttcccagcggggtccatcaccacatgggcagtaattcagtgcggcccatgcagcttcccagcggggtccatcaccacctgcgcagtaattcagtgcggcccatgcagcttcccagcggggtccatcaccacatgggcagtaattcagtgcaggccatgcagcttcccagcggggatcatcaccacgtgcgccataattcagcgtagcgcgtgcagcttcccagcgggatccatcaccacatgggcagtaattcagtgcagcccatgcagcttcccagcggggtccatcaccacatgcacagtaattcagtgcagcccgtgcagcttcccagcggggtccatcaccacctgcgcagtaattcagtgcggcccatgcagcttcccagcggggtccatcaccacctgcacagtaattcagtgcggcccatacagcttcccagcggggtccatcaccacatgggcagtaattcagtgcggcccatgcagcttcccagcggggtccatcaccacctgcgcagtaattcagtgcagcacgtgcagcttcccagcggggtccatcaccacctgcacagtaattcagtgcggcccatgcagcttctcagcggggtccatcaccacctgcgcagtaattcagtgcagcccatgcagcttcccagcgggatccatcaccacctgcgcagtaattcagtgcaggcctgcgcagcttcccagcggggtccatcaccacatgcgcagtaattcagtgcaggccatgcagcttcccagcggggtccatcaccacctgcgcagtaattcagtgcagcacgtgcagcttcccagcggggtccatcaccacatgtgcagtaattcagtgcaggccatgcagcttctcagcggggtccatcaccacctgcgcagtaattcagtgcagcacgtgcagcttcccagcggggtccatcaccacatgggcagtaattcagtgcggcccatgcagcttcccagcggggtccatcaccacctgcgcagtaattcagtgcagcccgtgcagcttcccagcggggtccatcaccacatgggcagtaattcagtgcggcccatgcagcttctcagcggggtccatcaccacctgcacagtaattcagtgcagcccatgcagcttcccagcggggtccatcaccacatgtgcagtaattcagtgcaggccatgcagcttctcagcggggtccatcaccacatgtgcagtaattcagtgcaggccatgcagcttctcagcggggtccatcaccacatgtgcatagctctgggtcactttaaagatcgcattacctgagtgctcagtgttgctgtaaggaaatgtcctgctgaagtttttttttgtttttttgttgttgttgttgagacggagtctcgctctgttgcccaggttggagtgcaatggcgcagtcttggctcactgcaagctccacctcctgggttcacgccattctcctgcctcagcttcccaagtagctgggactacaggcgcccrccaccacgcctggctgactttttgaatttttagtagagacggggttttaccgtgttagccrggatggtctccatctcctgacctcaggtgatctgccygccttggcctcccgaagtgctgggattacaggcgtgagccaccatgcacggccagcctgctgaggttttcagactttatctctgtaactaacagttcaccatcagtttgttacctagtggtaccattataccatttagacattgcatttttgatgtgggaatgaattccacgttgagcccgtgttagatttccccgagtaccatacttagtcgtcttcctctgtgatgagtagatttgtagttttctagcrgacattcactctctggttgtttgcctaacccctgggggtttgttttatttgtatcttgcttttttctttttgccactggcgtcccttcccaccctcagataatgactaccaacacacatatggtaagacaatcatgggtttgtcgtttctctgtgtttttggagtgcattacaaatgaaatatttctcgaaaatattttcaaacgtgaattcctgtgtgctttgtcggtagaaacgctgttagccgctgctgccccacacaccccagagctagctctgtgttagaagggtgtgtgcgcctcctgaygcacatccttgctgtgttccctcggttgccatgtcagggtggcccattgagccagggatgttttccgaattgactggattcatgggagcttccctcgattttaaattaaaggcagcacaggcatgtgtgggaggcccggtggggccctgtgcttcctgagagagccacaccaggcattcggtagatgtcagagaccatccctgcttaaatgcctcaggtatttaactagccgtacaagcagacaccagcgctgacctcggagaaagtccctcttcagcagccccttctgggtgacttctttttttttttttttttttgagacggagtctcgctctgtcrcccaggctggagtgcagtggcgggatctcggctcactgcaagctccgcctcccgggttcacgccattctcctgcctcagcctcccaagtagctgggactacaggcgcccgccactacgcccggctaattttttgtatttttagtagagacgaggtttcaccgttttagccgggatggtctcgatctcctgacctcgtgatccgcccgcctcggcctcccaaagtgctgggattacaggcgtgagccaccgcgcccggcctctgggtgacttmtaaacagaaatcggcttcgttccttgtttagcctgacctctctctccctgtgtgtttgtccctcagactgctgggttcaaacacaaaagtcctgctatgtgtcctgtgcaccattatttacctgctttagtcgttttcattcctctttactaaacactgctgttatccttcgtcatcacttaaatcagtttttaccaggtctatcttgagaaccaattcaaatattatttcactgttttaaaagctttaagttttctagaacttattctttgtcttcatttattttaattgaataattcctgaatgccaccaggccatgaacgtcatcaaacagagctacctgttgattcttttgtatcttttatgagattttcttccgagttgggcttacgtaagcatctcgcgtagcccttagagagaactaagaggtagtgtcctgagcactgagattccaggctcctggcggctgccaatggcaatagcaagtcccctttttcccacacttgattttccagttttctctcacaaacaccaccctggttcactacaaccaccctatcagctggacgttcagatcatgtgaaagctgaggaaagagaagttcggacagactagacaccctgtgcggtgtcagctyccgagaggcagggcctgggtcatacccrgacgtccggctccagacttcatggtgttgcccagtgcggcctctgggttgctctagttccaaatttcagcgtgaatgtgaasgtgcctcccaagagcccccggagatggacttcaggggcaaggacacgggcgccactgtcctaggagggcagcccggctgtgctcctgaatgaggtgctggcaacgcrgtgccaggggcttctctcagccttcctggcagggtctctgcagcgtctccgccttctcggatccctggacccctggcgtgtccgcagtcagctgcacctggtggtcagtgggcactgtggctctgctgccttcctgggatccgaggatttctactagctcctgtttcctggtctcttccggctgtaccctccagcccctggctatgtcctggaaggtaccttgagcccccacggaacccgcgtgcagccccggggtgatgccagcactcagggaacttgggggcagtcctagtggctgacagccctcttggtccttacgtagcaatttggggttggggtgctcacccctgagaatctcccttccaaccaggatactcccaacggggttacagttcagaggccctctgggattgattgttcttgggtgagagctactttgttttaaagacctaaattattctataggaatatctatagatcctgtgtaggattggaggaacaatagaattatggacatctctttcaaaagttcaccaatggagcattttctrcactgacatcgtaagccatagtaacttctcattttgatgccacaaatgagaatgcgaagacaacagttatttgttgaacagcaagacattcctaagtgaacggttaaaagctcggaacgtgctttgatagacgtaggatgcgatgagagcagctgaaacacgagcggtccgcgtatgggccaggtgggaggcagagggatctgcacagggaggggaggcagtggatgccactcatgaccgtgaccttgagaaggcgcaagttatgctggccgtggatgtttttatacatcagagttaaatgggtctrgtctgaggactttttgagcagaaagcttctataggaatacycattctcaaaggagggaggaagtggggrcatgggrcttakcctgcagtggtggagggtggccagccccagaggcagatctgctgaaggagtgaggctttcgcactggtcaggttcttggctgagatgtgcctgtcacatgaggacagggttccacagaaatcagaaacaggagcttcactggggatggcgttgatgtcacttggaagaaaagggtccctgtgaaaagccctttgaaaaaggagattggtatcccagggatgcctgccacccccagaatctgatggaaataacgaccagcaattgtagtaataaactatccgcacatgttagtccattttcacatggctytgaagagctacctgagacagggtgatttaggaagaaaagaggtttaatcgasccacrgttctgcaggctgcataggaagcatcgctggggaggcctcaggaaacttacaatcatggcggaaggcaaaggggaagcaaggcccttctttacaaggctgcaggagagagagagcaaaggggaaaatgctacacactttgaaacaaccagatctcatgagaactcactcgcccrccgtcaacgagatctgcaaggaggacgtccatgattcagtcacctcccaccaggctctccctccaacacacggggattataatttgagatgagatttgggtgaggacacaaagccaaaccacatcatggcagttcacctgggggccccacttcaggccaccaagggaataagagggctttccagagatgcgtttcaggatagctccacagtggactagcttccaaaggacgtggacacaggttagtaatgggtcagcgtttctcaggggccctgaccaaggtgcctgattctggattcacgatagctgtgctttgttcctcacctataaagcttacagctgtggcccatgtgctctgcaggaccaggcatcctgaggcctaactccttatcccagttctgccattaccccctaaacccagggagccccagctgggagcttagaaaggcagcttctcggctcacagcagggagaggggacagtgaggaggccgtgtgagttgactgcagttatcacctgtggcgctgttggtgacacacactgcttmacagggcacccttgagttcatgtcttgctgccatctaactctttcagagttctgtgttgggatggccaaggtgaggcctgggggaggaagaggagagctgggcagcgtcaggggcttttcctccaggcccagctgatgtggttgtcygggtgcaaagccgccctcagctgctgtggaggcaccacttggctgaaagcatcagcttccagttacagcacagcagcctcccgccctccagcaccttgctggccacatgtgcttgtaggctgctgccaagccacagctgttcctagaggcatgatattttcctgccccagaagttaagccacaaagagacggcactttttggtgagtgtgaaacaggcttctcacccgggctctgctgacattggggccagatgtacatcctcgtgggccactgtcgtgtgcactcagcagcccctccacccccccatccaaagctagcagaccccacgccccagaaatgtctccaccacggccaggtgtccctgggggcaaggctgccccagccgagaaccacaagcatgtgtagatctgagtgacactgtaggccaggcatttccaagccagaaggaggaggcccacttctgatcacaatgaggaagtgagggaaaaactgaaggatgtgttgatgggggcccctaagaagcggtgttcactacaaaaggtcctaacacttttttctrtaayctacaaatgagatgttatcctgttatcccactgaccatgtgggaggactgtagcccacaccctccctcagctaaatcaaggggtatggtgatgggtgtgttgttttggttgaaactgaattctgaagaacagccatttgtattccagctttttaagagacagagtctgtgctctgtcgcccacgttggagtgtagtggcgtgatctctgctcactgcaacctccgcctcccgggctcaagcaattctcctgcctcagcctccctagtggctgagattacaggcaggcgccgctacgcccggctaatgtttgtattcttagtagagacggggtttcaccatgttggccaggctggtctcaaactcttgacctcatgatccgcccacctcggcctcccaaagcgctgggattacaggcatgagccaccacacccggcccgctttttaattctttataaaataaaattccctgcgaggtgcagttcatggaatccgataaactagaaatcgtstgggccacagcgcaggagcgtcccaaaggaaagcaggttctcccgaaacaagtttccagtcgggggttttccccaaggcggggggtggtctgggcagcagccctttctggcctgtgcctcgtgcggtagagaggcrtgctgtcctcacgggtcgggcacgcggtcctcacgggtgtgtctgtgtctgtgctgcgttgccagctggcagctcgtgggtcccactgaccttccctcctccacggccacctgggcaccactgctggcggatctgtggttctggccgcacgcggggcagcctctgtccagccctgtcctgtctgccggcttgtcttctctgtcctgagggaggttccccgagggaagcccccaggcttccccctctgcatgggtgcctggggtgtttcctctgcatttactcgcagaacgttccsgccgctgttcttcaacagcaggcaggagtctgagctgagttcagaagggaacagacacagtctgtgagtttgttcctgaaacccgtggaatgtagctgggtactcaggcaactgtctyttctacgtaaaacacaaaacagaaaaaggaggtttgcgtgtacccgagtttgcattatggatatttaaatgccagctgtgagggagtttttgtgctcagtttgagaccttgggacgtctgttgtggctgagagcattgagcagggccagcgtcaggagcgggcagcaagttgcagataggcaggctctgagcccatcaccaagccacagaactggtggtgggagatgcagccgggaaatgggggcgtcctgccgtgctctggggagttgctgcatcttcttttacgggataataagaaaatatagtgcttatatctttggggtttgaagtgttggcacrcaagaaaaatgaggtgtattttctaaaactcttgattgtgaaagagaaaaaaaaatacataaaaacgagatgacttggactattttccccaaacagatatttggaaactggacgtttggaacgctggtattcaccgtgatggtgttcacagttacactaaaggtaagtggtctcgcgctcacgttcctcccccagccacagtgaacccctgcagtgtaggcctcacgcgctctgagctctctgaattataactctgtactgaggctggaagccactctccacccagccttggctggctcctggggcacccctgggcatccttgtcctgctgtttagacaagtaatgcacagccactcagcacacccggccaccccatgtgcaaaccccagagctacaccggaggtaacctcgggagcaagctgcttctttgtgaaagaattcaggctagaattgttttcagtggcaagtagccctccccccagcgccatcaaaatacactttaattgaaacaaattaatgtattttgaaaaatttcactctttaaagttcagtgaaattatatacagaatatatcattatgaaatctcaaaacctatcagactgagtcttaaaaagtgataccaaaacattcctaaggtgattttcttagatagtgatgtaaacaacacctgactctaaagtaactttctggccaggcatagtggctcacacctgtagttccaacactttgggaggccaaggtggatggatcacctgaggtcagcagttcgagaccagcctggccaacatggcaaaaccccatctttactaaaaacacaaaaagtagccgggcatggtggcacgcgcctgtaatcccagctacttgggaggctgaggcacgagaatcgcttgaacccgggaggtggaggttgcagtgagccaagatcgcaccactgcactccagcctgggcgacagagcgagactgtctcaaaaaaattttaagaagtaactttcttcagtagagacataaagaacaccttaatctgaatgactttcttcggtgacgatataaacaacaccttggtctgtggcccgcatgctgccatctgggaaatacatccatggctcccttacctaggacccagggctgtggcgtccccacattcttcctctccackcacactgtgaggtgtggctttgtcttcctgagcagtgtgaggtgtggctttgtcttcctgaaggtgtgagstgtggctttgtcttcctgaaggtgtgaggtgtggctttgtcttcctgaacggtgtgaggtgtggctttgtcttcctgagyggtgtgaggtgtggctttgtcttcctgagcggtgtgaggtgtggctttgtcttcctgagcggtgtgaggtgtggctttgtctccttaatggtgtgaggtgtggctttgtcttcctgaacggtgtgaggtgtggctttgtcttcctgaacggtgtgaggtgtggctttgtcttcctgagcggtgtgaggtgtggctttgtcttcctgagcggtgtgaggtgtggctttgatttcctgagcggtgtgaggtgtggctttgtcttcctgagtggtgtgaggtgtggctttgtctcctgagtgttgtgaggtgttgctttgtcttcctgagtggtgtgaggtgtggctttgtcttcctgaayggtgtgaggtgtggctttgtcttcctgagcggtgtgaggtgtggctttgtcttcctgagyggtgtgaggtgtggctttgtcttcctgagcggtgtgaggtgtggctttgtcttcctgagtgttgtgaggtgtggctttgtcttcctgagtggtgtgaggtgtggctttgtctccttaatggtgtgaggtgtggctttgtcttcctgagcggtgtgaggtgtggctttgtcttccctgaacagtgtgaggtgtggctttgtcttccctgagcggtgtgaggtgtggctttgtcttcctgagcggtgtgaggtgtggctttgtcttcctgagcggtgtgaggtgtggctttgtcttcctgagccgtgttttgcaggcattgagtcgtcattgctgggtcttgcgtttggtttagtttctcgtcaccccccggctctctgtcctgcccatcacgatcattctcactgctcagatgacaccgttaactgcccttttttttttccttttagcttgcattggacacacactactggacttggatcaaccattttgtcatctgggggtcgctgctgttctacgttgtcttttcrcttctctggggaggagtgatctggtaaatatctgataagtagctgataatctgataaatatcatgtggttgttatttttttatcaagggttgaagacacattttccgtgcggccctgttggttggggcaagtgtttgttgaatggctgctgtgtgctgggtgtcgtggggtcctgggatacagtcgggggcaagacaccggggggttcctgctccggtgacttgcatcttccgggggagaaagaygctaactgataacagcttgtgacgagttatacggaggaacagaccaggattccgcaccaggggacccatgtcagattgaaaggccagaggtgacttttcagaaacagtcatttgaaacctggaagaagagcgccatcatcacagcaagtcccagctggtaaccgcctcccacaacgaggcactggccaggcattcgacaggtcctgtctcactccatcctcacgccccgcagcaagatggggcccaggcatggtggggctggaccttgcccgcagcagcctgactcmtsggggagcctctggtttgggggagagcagcaggcacgcaggcccgggcgggaggaggtcctccgtgagtgggagccgtggccagcggagaggggcccggaccaggctgcagagcaggcatggtggcctcctggaccgccggccgtgaggatcctggctcgaggctgtcgtggtcagtcgaggcagagcacagcagagttgagtggctcttttaaaaaccccacggtggctgcgtgttgagctggtgagagcgacataggcagggtggtcagtctagagactgtcgctgtaagccaggaaacgacgctgagtggtatgggcccagggccaggtcccagtctcagccccagcgcagcagcctctgccacagccctctgcagacctggggtcagtagccggcctagggaaagccagcaacccactcaggatccctcagggcccctgacctgggcgggactctcagcccaggaagagtccctccggattctctcgttcagccagcggcccctggtggccccaagttgcattacacagtctcagagatgasagcccagcttggagggtgtcaggcaccctgtcagccccagagaaacctgcttagctctagagagcccagcccggctctggagagccyggccattctaacagccctgaaggcgatggctctgtaagaggaagattccatcccaaacctctctgaccagctcctgggctttgtagccaaggagccacagcccgtcagccttggtagaaccacrgcctctcacattgtttcctaaaacattgaccccacgtctytgatgtgctgggagctcaccatgtcaccaccgcttggtgatgagaccccatcctcctgcccgccaccagcaccacgtgggtgcccccagccccatcccaggtctgccagcagctscgtgtccctcccgttacccaccatgccctgcttccgtttccctcctgttgtccacacaccagtttcactgtgcttcctggagctggggccctatctctgtgtctctgccaccatccgtagtgcctgggatgtgaaaggcgatcaggaaacgttaccggaaggcacgtatagacgtggacctgtgggctcgggctggctgcgggtcactggtccctgcatccttgccagcctccctcatggaggctgacgcagacgtctttgaatcatcctctttctggggagagaagtcattgcttgctctgtactgacgaccagtgctcgggacgtccttcccatccgagacttcaagatagaaaaacatccctatttcratccctttgtgttttgttttttgtttttttttttttgcttctgtgaaactgaacttcagagacttctatgtcccatttgagatgacttcatagaattccttctcccgttcctcttaccccagcattaccgggaggttcagtgttcattttttatatgataaattcagagcaggctccgtggcttgccaagcaactctcactgacaaaagtgtaaactccctgaacagacggcctctccagtgagtagagaggccagccccagggagtacatgcctcaccagcggcttctcttccctgcccctcaggccgttcctcaactaccagaggatgtactacgtgttcatccagatgctgtccagcgggcccgcctggctggccatcgtgctgctggtgaccatcagcctccttcccgacrtcctcaagaaagtcctgtgccggcagctgtggccaacagcaacagagagagtccaggtacggagtgtccccagccggggcgggggtgyctcagggccctggccttaggattgggagatgaccrttttgaaagacagtgtgaaaggtttggatttcatgaaacgtgatcagttcaggtatcactaatgagtgtcctgacggtgcatgatgttaaacatcaggtacatttgcgatgaccgatgtctaattttatgtttcaacctaaacagtcatctgaaatgagacacaaataagagaaaaaagactgatgcaaaaggcaaattatttcatgtaaatggaaaccttttttaaaattaatcattactttaaaaggttgaattacataatttttaaggatggtaaatctggctggaaacggtagcatctgtatcaggaaatgctggtattggtggagctgcttattttacacactcccaagttttaggcacaagcagaattctgggtccagggaagacgtgacgatgccragtgtccccccaggtgcagggtttggcaggtgtgaggacttagctcycggtcccccatccttttcagcagctggcctctgccttcaagctcaaccctaaatcagaggcagtgaccacgacccacctctgctgctttactgggaagcctgcctgtcctcagagggccgctgcacctgtcayggtccctcaggactctattaacaatgcaagttttcaagtttcatccccgaaatttcyaatcactccttgaggtggagccctggactgggcagtgctgaagcccaatggggaaaygaggggtgggggcccctggcagtggctgctcctgcagggtgtgaggctccccaggtgggaggaagacggggagtgartgggggccggggccccagccctgactcactcacgtagctcagacacccgggggctggctcccagcggtgctgctgtgctgggagggaagacaggttgccctcccttggggggcacagcctcacccaccacccacctccaacaatcagaatgggaccctggcttgagagctttcttgggacattggtgccgatttgaaatgttgaaaccgatgccaccagttcccggcactccctccttcatgcctcctgccacagtttgtraaatcagagcgagcaaaactcgtggtgaagagactgcctctcaatgtagtgaaaatgtccacacacagctccactgactcgggggccacaggcaggagaaacgcagcagaaygtgccagttggctgcttataagaaggtcccactgaggggcctctgtgcaggaggggagacagtgggagcaggagccggggccctggctgagactccgcggcccccagtgcttcaggggaaactcaccggccccaagcagccactcactgcccagccctgcctgtggcccgasaagcagctgtccagtggtggttttctctaagcayggtccttggttactgagctctttagctgtgcagttccacagcgggcacacgtgttcatgacagggctctgtgcatgggacacgtgttcataaccacatcccatacatggggacgtggcagacacacatgtaacaaggacatcaggcacagaagagacagcagggctgggggtctgaccccgagagagagcaggtgcagcttgggggtgtctgctgggcccctagctgtggccacagtggtgtggcttggggtttgcacgagtctcagccccacctggcccctgggtgcatgtggctgcagaggtgcttggtcaaagatgcctgagcaggcaggagttgaactcggggggttaggagggcctctccccgcaggagtctgggctcttccatgcactgtgcacgcagcctccagagtcggggctgccgagggccacgcccccggatgtgtctgaccacaggccctctgctctgcaactcatctccaggatgggtgggcactttgggaatgccagtgaggaccctccccgtcccaccctttgtttagaagccyctgtattgctgtgggtctctgcgtcccacaagagccccgggaatgcttatgaacagctacacagcgggacctgcagaaggcataaagcagggggtgggaggggctggcgggtcacggtggggggcaccastgtccgcccagrgtgaccagaagaacttgcacgtggtggcgagcctctgactaactcagctctgtctcttgtttctctttccttcccatttccttccgycttccgaccgctttgcctaaatsctcacaccttgttcacacacccctgtgtgcgtggccgctgacctcgggactaagactaagagccagtgcctttctgtcgagcagtcaaccatctttatgctttctcagacttccagcagcctgagtttctgatggaacaaggtgatgctcctctgccttccacgcacctgggatggtagacacggggcagcagggccatgcccatcaccagagccctgagtccacgtgctctgacgcagcgtccaccaggcgctgggtacagcagcctcacgtcgggaagtcccgccaccacttacaccttctcatgcacagactgatcatgggctgtgctttccatcagtcacagttaaccagggtttctccctcagcgtccgtgcagcctcagaacccacctgtgtgagggttcagacacagctgacagcggagagctggccacatgacccctcacacaggtgtcagaggggttcctaagcaggaaggtgtgagagtttgcaattcacaggtcatccaggcyctgagctcacacacccttccctctgcagcctgtagagcgtggatcacaaggcctcctccctcacgcacccacttctgtgcccattctgcagctggaaagactgagggcagctaggataacacrgtttgctcaggacccatgcacatttcagaaaaggggagccaggctgagccacacaactggagacaaagaggggacggaagtgtttggtgtcaaatgtttgaccaaattccctttttactgttttttaaatgaaaacctcattgtttttcaaaaaagccttctattaataatttgctttaaaaatgacgaccttggcctttctgggcaatgtagaggcgttcacacgccatttttctgcggtggtgtccatgrtaagagccgagattgcaggggcctgcacgccgtcctgaagtcgcgttctgtcttttagccgtgtgctcctgcaccaaataccgccttcacgcatgcctccaaatcagtgatgctttgaaaatgcatacttggtattactgttttaccaaatgcagcttagaaaaatgcccaaagcagaaaaaggcttcttttccctttaataacatcatcttctatatattttaaacasgatttttaactgacaaaatggtccttttttaagtccaagcaattaatcagaatcaamakttttctaatttagtgtcatcagaatttgttagattaaattgcagaatttcatctcaccatttctgtacttgaagacatttaggatgaaattattaggaacattttaatgactcataagaggtccttaagaaactgattaaatcatgccaactctgagctaaaaataagcattctaacgattcatgtagtttgttgagagctgatttgcttctgagcatgtacrgaagctgagcccggctgcgtagagacagtggcacggagtttctcctgccccctgcgaggccttgggccccggcatgacccccacagacagggccggcgtccacacttgaacagaaagcgcctgcagccagcacatgcccggcgcacacgggaacacgccgtggcgcygagaccacctgcgttctgcaaaactttggaggaataaacgtgtcactagtcctcacgtggggcatatgttacttccagtggatggctttcttttaacctgttcctacggaaaagaaaagcatcacaggcctcagatgtatatgttatatatgtgcgatttgcacatatatgcccgtgctggcatctctgcgtatctgcatgcagttcacttctccgtcactgtccccaggaagggtggcagcctcatcctctgtttcctacttctcctcacctgggcgtttgcccattcagacgtgcaattgtgcaattccaagcccgcagttcttcagctcctgtgcytcccttattccttgaataaggctgggctacaagatctcagtggagttctgtgagcacgctggactcaggaaagtccgtcgcagggccctggtagagcggttmctggagctcgctgtctgccgtggaagtgggcgtgtggctgaacgtgtggcttcaggattccagcggtgcctggtagaccttccagccgagggacctcagaccctctgcctcccgcgggtgcatggcccgtccctgagcctgtcgctgtctcagttctgggctcgggcccctcatgggagcggccctgctgggacagtgttttcccaagacgccccaagccctcgccctggcagctccatgacaccccatgcagactccaacaggggcttcgagcctcttcctgctggggtcccacggatggtgcaggcagaggcccgagcactcctggtggccccgtgtggcccacgtcgctcagtatctttcctcgccttgcagaggggtgtgaagcacaaggctccagtccaggccgcacagagcagcgaygggcccctcctgaaggacctcctacggcggccaaggcgcagttagctccacgctaggtaactgtgcggctgctggacgccgcccgtgtgctgtgactgtcagacccgtttttcctccaaagttgtgctgtgctgtgctgtctttgataacaaaggttcacggtgagaaagagcagccctctttacacacacatgcatttgctgtcccaggtaagtaacacgcctgagggcaagctgaccacacatggaacatgctgtgcacacacacgtgtgcacactcaccccacacgcacggcacacagcctgaccagacccagcatcgtcagacacaggctcacgatcctggtctttcgggggacacagcttcacttaaaaggcccatcaggaaggaccgtgctttgaaatcaaacgtggttattgcatggtttgtgtggaactggggcccaggcaggtgtgagtgcaggtcttctgtgtgccagccggagcacatagcttgtcgcctctccaacagacatggaggccatgaagacatctgctcctgccagcatccgccgctgccccctggtctaaaagtgggctgacctggggacggcccctcatcagacagatgcgtgctgccggcctcctgccgctccccttgctggtcagacccacagggcccgtgcacatccggggccccagtgggctgtcagaagccatgcaggccccatccgtatggtgacaycctaggcaacatgtcaaggggatgcaagctgggcacgtccagtactaaatcaacccggtccctgtggggtggggcctgccttccctggggcagtgagttcgccttttgttyragggtctctgggtaccggtatggcgttcgagctcactgcacaggaagccagctacagggaggaagctcgtaggtttcccgtccatggcctgtatccctggggcccctgggttcttccctgggatggtgggacagggggacggtcactctgttggtactgaaaaggagaggccctcattcctagacagagacccctcgcctccatatsgcttctctggtggggtggatcccgcccggcctgccctcaggacgagggtgtgtcctgagttgagtctagcagttcctgcaggaggcgatggtagtgagtgcatcccagagtggctcaggtcaccccaggcagccccgtgggtatccctgagactgaccatgtgtctcgttctctcagcagaaygggtgcgcacagcctcgggaccgcgactcagaattcacccctcttgcctctctgcagagcccaggctaccagagcacctgtccctcggccgcctggtacagctcccactctcagcaggtgacactcgyggcctggaaggagaaggtgtccacggagcccccacccatcctcggcggttcccatcaccactgcagttccatcccaagtcacagctgccctaggtcccgtgtgggaatgctcgtgtgatggatggtcctaagcctgtggagactgtgcacgtgcctcttcctggcccccagcaggcaaggaggggggtcacaggccttgccctcgarcatggcaccctggccgcctggacccagcactgtggttgttgagccacaccagtggcctctgggcattcggctcaacgcaggagggacattctgctggcccaccctgcgcgctgtcatgcagaggccattcccccaggcctgtgtcttcacccacctgccrtcattggcctttgctgtcactgggagagaagagccgtccagggacccatggtggcccacatgtggatgccacatgctgctgtttyctgcttgcccggccaccacccatgccctccatagggtgaggtggagccatggtggtgcgtcctttactcaacaaccctccaatccggatgctgtgggaagggccgggtcactcggataccatcatccctgcggatgcaccgccgtaccctgctcatctgggagtggtttccctgcggttacgtccaagcccgcctgccctgtgtgttggggctggctgagtttcggtctcyccatcaccggccgcctcgtggagaaggcagtgccacgtgggaggacaaggccacgccggcagcttccagccctgccgcagaagtgccaggatgtccatcagccactcgccagggcacggagccgtcagtccactgttacgggagaatgttgatttcgcgggtgcgagggccgggagacagatacttggctgtgatgagcagacatcctctgtccccgtggaggggtcaacaccaaggtggtgttcgtgcaccagaacctgtctcgggctgacgggggtggcacacaggacacgggtggatcccaacaggcagcaccgcacctccgcccgcctcccgcactgcagctccgcccgccgggctctgcgtcyccacgtcccctcgtcccatccccacgtcccctcatcccgtcacctcgtccccacatccccttgccccgtcacctcgtcctcatgtccccttgtcctgtcacctcgtccccacgtcccctcgtctcatccccacrtccyctcgtccccttgtcccgtccccacataccctcgtccccatgtccccacgcagggctctccttcgtcttaggatctgtccagcgctgctctgggtgggttagcaaccccagggctgctgtgataggaagtccctgttgttctccgtactggcatttctatttctagaaataatatttgacrtagccttaatggtccttaaagaagacatttcagtgtgagattcagacttcagacrctgaaactgctgcctttcaggaaagcaccaccaacgctggaggaggagccggccctcacgcccgccccgcgccacgctgtggaacggggctccggcaagtgaaacccagagggtgtttccgaggtgctcgacagtaggtatttttggaagctcagatttcaccatttgattgtataatcttttacctataaaatatttatttgaagtagagggtaaatcagcggtaagaacagtgaacacagtggttgggataaaataaggtgacaaacatcacaccaaagatgagggtagcgagcaactggcttgagcagacagaacggggaagactccactctgtcccgaggggccagccgcaggcgtccccagggccaccctgccctgaggtccttgtgtggccgccctggcttggcagccctgcccacgctgcccccgcaaacaatggtgtgtgcgtttttacagccctttttaggaacccaatatgggcataaatgtaacacctrtagcgggggcagattctctgtatgttcagttaacaaattatttgtaatgtatttttttagaaatcttaaaattgcctttgcactgaagtattttcatagctgtttatatctcttttattcatttatttaacatactgtctaattttaaaaataggtttttaaagctttcatttttaagtttatgaaattttggccactttacatttagattctggtgagagttttgactgaatgttccaatctctgatgaatgcgaattttcagatttgattttattctctacacacacctcttcttttcttggtatttctggtggcagtgattagttgaacagcacatttaaggcacgataatttgctacactttttctttacaatttgttgcaatttcatctgctttctatgtttcattgttaattgccatccttcagccttaaaaatagaagattctcacgtgaaggtttagtaagttgggtcccagctctgcctgtgtggagatagtcaccatgtacctctgacaacaagttttagtgtgaaagtcactaaacttttacacactcccaaacgtctttttaaaaattgcttgggaaattattaaatgaatgtgcctgatgatttgaaatagacaaggggcacgagataaaaaagaaaaggatgagaagatcctcagtgaatgacgttgcagggtcttcatgcaattttccacctcgcagtagttagtatttacttgccttaaactaactttgaagcaagtaatgtcaactttgagcactttgttgagttttgaaaaatcttatttgttgctgcacaggttaataaattatcaatttgtaattcagcatgttggtcagagacacggtcactgattcacacccagtccctgccacagaccgtctcagacacgcacagtgggcctgctgcatgattcacacccagtccctgccacagaccgtctcagacacgcacagtgggcctgctgcatgattcacacgtgttacctggcttttggctccacgctcactcatagccatgtccacatgggggcttgcacacaggatcactcacatatgtacatgtacccaccacaaacgtgcaagctcctgcacacatgcatgcacacaaacgtgtacacaagtgtgagctcctacacgcatacacacacacacgtgtacatgcaccaaagcatgtgtgacctacagacatgcagaacatgcacgtgtacacataccacagacacgygtgtgcatgctcctacacaatacatatgcacatatcatgaacagcrtaagttcctacacacggacgtgtgatacatgcatgtacaggtaagcacacatgtacaagctcctacaggcttgctctcacacacgtgtatgcacagcagagagacgtatgagcttctactgcacacatgcacacacacacgcacacgtacattcactacamacgtgcagcctcctgcacacgtgcacattcatgtgtacaccacaaatgagttcccagacgtgtaaacacacgtgcacacatcgtacacatgtgagctcccacacgtacacacagatgcacatggacacaccccaaacacgcacaggctcctacacacatgcacacacgtgtacaccacaaacgagctcccagacatgtaaacacaygtctcccacacgtgagctcccacacatgtacacatgcacatgtacgcaccacaaacacatgcgcaggctcctgcaggcgtgaatacacacatgcacacacatatacacacaygtgccacaaacaagtgcacactgtcctggtgtcctgcactgcatcctgcctccttgctgaggggcccctgtgagaggcctctggatgggcatgggaagatgggctccctggcccccagcccatgcctccctgggatgaagagtccccctcctggcagaatgtctgggctttgcagagcaggccccgggggtgaagtcgcagcttcacttacaccagctgctctgtgagcaaggcttggtgccctggacaaggcccttcccctttagggaggtccagcctcgcaagctgaaacctcccctcggctcagccctataccaggcggccacagcaggactggccacacccacgccgcacctcatccgtgcacgcgtcggagcacggccagccttcygccacgagccagctgggaagggccgcggcygcctaaagccccagtcaacccagcctgtgtctgagcagacagggcgaacaagcaggccacaccgtctcgagggaggaggccagatgcggccagcgtctccaacagggtgaccatccgctcggcttgctgagcgtttaaacaaatgtttagacaggctgtggggactcccctgagttgagccttggccaggggtccggtgctgtcgcgggaaacctccagccttgttcttcaaaccactcagctcatgtgttttgcactgactagtactgaataatacaaccactcttatttaatgttagtattatttatttgacaactcagtgtctaacagcttgatatgcaggtccttgcatcctacatttctttaggaagttacccatttgtaactttaaaaacaggaaaaatatcagttggcaaatgcaatcttttttttttttaagctaaaggtgggtgaactggaatgaaaatctttctgatgttgtgtctataagcagccttgatgggatatgttagaagtgtcatgaaagtgtgattctacttttgcagaaaaatctaaagatcaatttatatagctttattttttactttatcaaagtatacagaattttaatatgcatatattgtgtctgacttaaaattataatgtctgcgtcaccatttaaaatgtctgttcattatgtaatgtaataaaagaaggtcttcaaaaatgtatttaacatgaatggtatccatagttgtcatcatcataaatactggagtttatttttaaattattaaacatagtaggtgcattaacataaatcagtctccacacagtaacatttaactgataattcattaatcagctttgaaaaattaaattgttaattaaaccaatctaacatttcagtaaagtttattttgtatgcttctgtttttaacttttatttctgtagataaactgactggataatattatattggacttttctctagattatctaagcaggagacctgaatctgcttgcaataaagaataaaagtctgcttcagtttctttataaagaaactcacacaagtggtgtgtacattttctgctctgagaaactgtgcagtcagaacacttcgcagcgtgcttctgtgcgggatggaggtggcaagcccagtgggtgatgtgggccctccctggctgttccctcggctgccaccccctgcagggataccaggtgtgccaggtgcagggccctggtgctgactgccctggatgccagtgcctgcacagaaccggaaacaccactgggtttcccaaccttctggtccatccccaccacaagctcctccctgacctctgccaagctcctgcctgccacctcgtgcttggggtctaggtgccccctttccatcccaattttccctcttgaccaaaccccaggctcctccaggcccttcagcctcctgggctctgttggctgaacccagcctttcccactctgaagtagagggcattccctgccccctgccactcccagccctggcagaattctgggtgctgccacggagcccccggaatgccccctggccttggaggccgtggccttgtcccaaccctgacctcaccctctctcgagttccacccagcccggccgtgtcatactctgcagttttgtgtcttgtctggaaacaccaacttcaaaacaccaccaggtcccaacttctgggatcccagctccattggggcacccggagaggggccttggggtggatcctagagcatccctggtggctggtgcctgagtcccgcctggctacatctcctctccctgctcagccacctgcttcccatggagtctcagctcagggccacgtgggaaacaccccgggaggggacagagggcccctggctcgcaggctggaattctaaacatgggactttttctggctcctgaacgccacaaagtcgggggtacttttcacaggcagtgctccgaaggcatctgtggggtgaatgaacctacagctgccctggattctctccgaaatgctttcctctcgttccctggattctcagcatcttcatgtgggcttacctttacctttccagctcgtaaccctgaagccatcttccgtacagctgtctcttcctcttgtagcaggaaaacagataatgctgtgattttgcgggtcatggggagaagaggggaggggcagagcaggctggtcccagggggcggcactagggtgggaaggcctggccctaatgagtgacccaaactcgcttcacctccccctgctctccagacagaagacatgaatcctgaaagcgagatgcccagtgaccctgcccactgcccaaggaggaggaagcctggccctccctgcccatcagggcctcctggggaagccagagggggatgcaagcttgccctccacactggcccatctgtcccgtgccaaagatcttttcttaactgcagatgctaggtcactgggggcctctgtgggtgtttagcaaacatcatcaaccacacaggccacccgaggcccccacagcagatgatgccgcctgtggacctgaatgggagtgtctgtgtgcctgcagcggtgaggatggaggaaggcgtggctcgtgtggcgctgcgtgccccgcgctgatgctggggctcccagagccgcccacgtggcctgtggcgcacttgctcagtggcgggtcctgaggtggacgaggactggccctgtcctgaggaggctgccggtcctttgcacgcgcagtgaacccgctcacctcgtgcagcctgtcctgacgactgctttccacaacagcatagcgtgtggcctgccagtgaacgggcccaggtgtgggagggacgcagggacagaacccacaggagccccttcccggtgtctcgagaggtgtcctcagggcgtcctcggggcatcctcaggtgtcctccgggtgtcctcaggtgtcctcagggtgttctggcatccaccagcctgcccagggcatccgctgctcccccacatcaactgagggctgttccatgccagcctcatactctcacctgggacaggattgctgggagggctcaggggacggggcaaggccagccaagcccagaagggctggagggagagcgaggccggcataaaatggttctcagctcatgtggagccacagatgctggcttggggcagcctccaggctctgacagggaggctggtttgttcaggtgtcctccagtgtcccagcaaaggggacattccagcagcacctggggccaagagagagggaggaggatggagcctggagaagaaataaaagttggaatcaaaagttgtttgctgggagaggaagagccatgtgcctatctcaaaagcgtgggtgacatgcgtgcttcctgtgagcgccctgcggaggctcgtctgtgcaccaacaccccggggtctccccaggtgtggcagcaccaccctgtcctccacctgcatctcctctgggcgctctccatgcggcgctggggtcagggcccgccccactgacctccttttagctcggtcgcctctgtaaagaccccatctccaaccaaggccacattctgaggcactgggagttagcactccgacatctctttttggaagacacaattcaacccccaacactccgttctggggggccatggaaatgcctcatccggcttcagggcagtcacacctgggagcagccgcggcctgcggggtggatccgggcctgtgcggcggtggggtggggttggaggggtgtttgaggccatggctgctccttggatgacaacctggaacacaccaggggagctcgcttgccatcggttctgagtggctcaacctgggtgactgcaatggaccgagagggtccgggtcgtccccaacccgcaaaggcatccaggaagccacccggggaccctgctcagagcaaggcagagccagacacacagcaacaggcaagccgccccgcagaggatgagccgaggcagcacgcaccaacacggggctaaagtcagcatctcactcatctcacaaggcttcctgacttcttaagacatcagtggttactctaaaagagaagagcaggccgtggcgggcaggtgacccctcaccgtcgccctgggggaaggagcgggctgtggcggccgggtgacctctcaccgtctctgtggcggcatcactgtctttctgccggccaagccatcggggcagcagaagagtctcaaacagaaacccggctcagctcttgtttctcacctccttgtttcagcaaaattctccccaaaaggtggctatatttgttgtctctgtctccgtacacaccctcatctgcctcccgatctgtggacggcttctgggccctcgtgggacggctgggtcctgtctgtctctgcttctcagcgggccccggcgcaggccaccaccccacctgccctcgtggtctgcgttctttgccttcacagcatgaatctcaccccgatttgaggctgtgtctgtgtacattaacctattttatgtatttttactgagacataagctccaagaagtgagagactttgcctcgctctgggccgagccctgtgtccagcatggggcctggggtgcaggaaggacgcagtgaccatggggctggctggacacagactcagggcccctgcccggctcagcttcccagtgaggattccaggtgctgggtgcctggttgtagccagccagaccaccctggtcagaggtttcgggacaagggctggcaggaagcccttcccatacagctggagcccatgaggccgagcccgacggcacctgggcagtgagaagccaagacctcggcactttcgttctggaggagggggtgagggagggacagtgccgctgtcttgtctaggcagggtttgtgcagatttgggggctggaggaggccagcgtagccctgccctgctccctccagccacccagaactgcagaggcgccaggcccaagtctgcctgtggcgtgtccaacacagaagggcagattccgagacaaaccagggtggctacaggtttacaagggggccctgtggtctttcctctgtaggtgggaggacactgtcgccaccttcctcggctgtgtaaggcgagcacaaaggagtctcccacctgagatacgatcactccttttctttcccgtacagacatctctgtgggagcgatgctttcacataaagcgcttaatctccaatggtaaagtttccaacactaagtcgagacgttggaacaatttggaagcagatgaaccttcctaaactgcttatgggacacagtgaccacacggagatgccctggaaggattccagcctttggggtcacaggcacgggcaccacagcttcccgggtgcctgctacctgagctcgctgtaagtgccgcacggcttacgtggaatccacagaggcagcccgtactcccccctccatgtgcagcgcccagacacgtgtgccgaggctgcaggtgtgctacagtgcggcggccaaccggctttcccctgcagcctcagctcctgcgggatctgctcactggtaggcagtgacgccctggcgggagttgtccctgaggtctctgctcctcctgctgtgctcgcaggggaacctgtttgtgacgtagtctccttgtgccccactgggcttctgaggctgtgaaagctggtggagcacaaagggcttgcccggccctaacaagcctggccccagcagggcaccgcgggcagcctctgatgcgcggctctgggcctttgtcctcggctgaattaatttcctcttgaattgcctcaactttagaatgagccctagccttttctgaagcacacacatcttggggttttgtcctctgtattttcgctgcattggctgccaatgcggaaagctttcatggagaagacgttctggcttcttgtctgtctgtcccctgagggctgcgggccagctccatgcccgtccacggtgtgcaggtggaggcatctttcagggtatcaggtgggaatccgtgcttcctggcaaagtctgttccagtgtggtgcccactgtccatgcgcctgtgggtgtgagcctgcaccctgcacgaatgtgtggagcggggtcgtggctggctggggtcactgcctgtcccctccttttccgcagccacggtgccatctgcttgcacgtcctgcaggagatcctcagggcgggttcccacgggcagcctccctttggacttttattgctcgattaaatgatatttaattcagcctgtctgacagtctgacagaatgtgctatgttaccagagggtcttatgccaacatgagaaagggggcgttggtctccaaaaagacaaacaaacaaaaaacaggtaagaaacaccatgtgggcccactctgacctttttaactgaggcacctttgagaaggaaagcctgttccactccgattctcaaagctcctgaacgcattgctagtgacaatcctgtctccgtggctaattatgtgaagaaacgttactgggttgagggagttcccttgggtttaatttcctgtccctctcaaatcatccctcctccttccctgagcccagcctccccctttcctgcccatgctggcaggttctggcccttcctggacccctctcctgtcccctgcacaggtctctgcagggtttctgcacgctggggagggcaggttccccagtggagccactccctgcgggtctgagtggggcccggggtctctgcacggtcaccgatgctgctgctgctccagggagcaggcttgcaggagcaaggatccagtccctgaacgcacgtgctccccccgggagaaattctgcagccaggcttggtccacgcaccgtcctcccggcccacacaccctcctcccggacctcagtctgtctctgtgtatcacatgcctgttcccagtgttctgacctcaggtgggcacggcgcggtggactgcacttcccgctgcttgcttggttaatgtttacctccctcctgccagagctttgttttcatttcattcaaacaggcttcctctt

SEQ ID NO: 94601 - DNA, 392506 bp, Homo sapiens
  misc_feature (1)...(392506): n = A,T,C or G
tccaaatgtccatcaactaatgaatggacgaacaaaatgtggtatatccacataaaggaatattattcagccataaaaaggaataaagcactgattcatgctataacatgatgaactttgaaaacattatgctaagtgaaaaaaacaagtcacaagggatcacatatcatatgattctatttctataaaatgtccaggataaggaaattcacagaaacagaaagtagattggtggttgtctagggctgggaggacaggagggaactaaggagtgactgctagtaattgcaggatttctttatggtgtgattgaaagtattctaaaattgtggtgatgattgcataacactgtgactatactaaaaggcactgaattgtatacttcaaaatggtgaatttcagccaggtacagtggtttatgcctgtaatcccagcactttgagaggctgaagtgggcagatcacttgagctcaggaattcgagaccagcctgggcaacgtggtgaaaccccgtctttaccaaaaaaatacaaaaactattagccagatgtagcggcatgcatctgtgatcccagctacccaagaggctgaggtgggaggatcgcttgagcctgggaggcagaagttgcagggagccgagatcacaccactgcactccagctggggtgacagagtgagaccttgactctaccaaaaaataaataaaataaaataaaataaaatggtgaattttatgttgtgtgaattatatctcaattttaaaatttcaagaaggaatccaatccaaatgtatatatgtgtatgtatgcatatctgtctatctgcctacctatctgtttatctgtccatctatctctgggcagtaaaattacacatacattctcagttgcttcttcataattaagtgtatcatctaagttatttcgaatgaatatttataatttgtgaaataaaaaagttttaaaaagtctaaaattaacatggaagatattgattcaatttctaaaagaagggatataaaatagcagcacatcctgcaactatacaacataaatatatggtactagtactggaaaatagaataaaatgaaaataagtatgcaaaagtggtaaatttatgtatgaattaaaaaattaaaaaaattttactgtaatctttatgtttacaagtagatagaaaatgaccacattggcctcaaaaatgaaatggggctttgtttatttatttaatattgaaaatgttaatggcaacattatcatgtctaggcacctttttctgaaaatgcattctataaatgcattctataaatattcatttatatttatagaatgcattctataaatattcattgcataagttttctgtttcttccttgaactttcccttttaccaatttttctgttgttctacctgagttttcttattctacttgtgttttcatggaaaattgttcacttcctttaacatttcaaactcactaaagtttaactttgaatagaatttcccaataattttaatgattatgtagttttcaaattttgtttcccttatattcttttgggtatttagttggttataccttagtattagtggtttgtaaatattgtattaattaatttttatcttagttttgctatttggcatattcttttctaatttctatgatttcatatttattactgccttttaaaatttattgcttatatatattttaaaaatttagatgtagatctttctttcttgttcttataggaatgaaagatacaaaagtacctctgatacagctttgaatatgtacctgttaccttttttggttttaaattaatgcctctatatttaacactgtcttttcaactcgattgttctatcacggagtatttcttccattcttatctggccatgtgcaaaatggtggtatattgcctttctctgtaatttattgaattgcagtctgaatcaatgtgtgaaatcttttctaataatacctgtcttcaaaattgcaattaatttttgtacaagcttcatgtacacttgagaaagctctttgtttcccaatttttcctctttggagcagttcgttcaatcacatccctttgtagaagaaaaaatggaggcctctgaggtgcagggacttgctggtgattcctcagtggagctggggcgcagcctgtgcttggggccattgaatggagtattattgagagtttatgccaacatgcttcaacagtactctcccctgctaatgctcctttctgttgaaaagctacagagcaggggctgccttaagccaatatcctgttttgggggctctccctctctgcagcctccctgcttcacaaagcatcattctgacctgttaaccttggtcctctgtttggctttgtctgaagaaggaattctttcctagcggcctggatcctcacgcaaayagacctccagcgggtcctcccactggtgttttgggcatgcctaggtatgccggactcctgggatgaacataataacttaatcagtcaagctgggactcactacacttgctttgtgcaaacatgacttatctatgctaggcttttaaattattcttttttctttaagtgtgtgtgtgttttaaaatgagatgcatgtgtggattttgtctttttaatctagtttgtaattttattttttaaataggagaattcggtccatttacatgtaatcttataattgttgtaattgtgttttctggtatttttctcagttaataaaattctctgttttctctttaacttaacataaggatttccattttaaaaattcatttaagtgttttaaaaattcatttatgtgagattgaatttaactttttttttttttttttttttcagatggagtctctctctgttgcccaggctggagtgcaatggtgaggtcttggctcactgcaacttccacctccagggagaagcaaatgattctcctgcctcagcctcccgagtagctgggactacagtcacgtgccaccacacccgactaatttttgtatttttagtagagagggggtttcactatgttggccaggctagtcttgaactcctgacctcatgatccacccgcctaggcctcccaaagtgccgggattacaagtgtgagccaccgtgcccagcccaacgtaacattttttgaacaactccatttcctcatgtttttctctcttgactgacctatccccaaacagcctgcgcttgctttctctttctttctttctctctctctctctctctctttctctttcttctttctttctttctttctttctttctttctttctttctttctttctttctttctttctttctttctctttctttctttctttctttcttttctttcttttttgatagagtcttgctctgtcacccaggctggagtgcagtgacaccatctcggctcactgcaacatctgcctcccaggttgaagtgattctcctgcctcagcctcctgagtagctggaattacaggttcccctcaccatgcctggctaatttttgtatttttagtaaagatgggatttcaccatgttggccaggctggtcttgaactcctgacctcaggtgatccgcccaccttggccacccaaagtgctggaattataggcgtgagccactgtgcccggccatttttcatatctgttgtaactcaaaaccatttttctttcttatatagagatacagaattttgggagtcatttactcatcctctctcttcttagccaggtcctcttggtttcattttgttttgtttgggtattctgaaaacttttctctccagttaaatattttattatttttccttcttttgtacaccagcaaattcagctttaaatcctgttaaatattttaaaatatgattgttacattttattacacctatatatccctgctttcagactggaatatgcatatttgtggagatatcaggctatgctacatatgactattatttctccctgcctacatgcccttcattgaaattgccacctccctccagataagtatacatacataaccccccagcccctacgacctgggcagtcataattccgctaagtaaatctgtttccttggctcaactgattggatccagtgggcccctaatccatatactccatggatggtcaatttacagtcctgtttttttgagatggagtctcgctccgtcacccaggctgaagtgcagtggcgcaatcttggctcaccacaacctctgcctccaggctcaagcgatcctcctacctcaagtgatcctcccacctcagcctctcaagtagctgggtctacaggtgtgcaccaccacgcccacttaatttttgtatttttttggtagcgacaggttttcgacatgttgtccaggctggtctcaaactcctgggctcaagcaattcacccatcttggcctcccaaagtgctggcattataggagtgagccactgtgcctggccacgtagtcatttttcactcctaagagtgacctcttcttattaaatgacaatgttagtaaatatatattcacaatgtgctcaggcactgttctaagtactttacatgcattgactcatttaaatctcatatcaacctcatgaggtgatatgactatcattatctacatttcacaggcaaggaaaacagagaggcagagaggttgagtaacttgtccaaggtcacacacagtgagtaactggtwgagttggatttgaacccagcagtttggctccctctgtcctaagtgctatgctgaattgctgctgtattggatttgcaacacaagaaatccctttttgttataccagcttcatatgaggctggtctctggcaggcagtaaggtacagaagaaagtaaaatcttgtacctccctcttcagtgaattccccaacaaaacaaaggtacaagcattctgggttttgtgaattgaatgccattctttttttctcttttaaagcgtaaaaattattagatgccacttgtagctggtgagatgtgtctgtgattaaaagagaaatttcaaaaccagaaaaaaatatgcaagatagaagacaggagaaagaaaagataaaataggatgatgacagaatataaaaattaagacagatttaaagctaaaaacgtgggaataaaaatgtagaaagaatagggcaacactgtaaatcagggaattttctaaaatccactttaatttcttattttttttttagagtcttgctctgtctcccaggctgaagtgcaatggcacaatctcagctcactgcaatctctgcctcccgggttcaagcataaaatccacttttaaagtagcatttatgaaattaaaaaagaaaataggaaagcactagaaaacaaaacaaaaaaattaaacctaaaaagttaagcataatatgttgataacatcccaataaaataaaattaacaggtaaaatatttaaaaagatgacattttaaataggaaccagaaggtaaaagagaaattaagctaagacctcagagtccaaagaaaaagaaatattctcatagaatttagattttcaaagttaaggctgggcgtggtggcttatgcctgtagtcccagtactttgggaggctgaggcaggcagatcactagatcaagagatccagactatcctggccaacatggtgaaaccctgtctctactaaaaatacaaaaattagctgtgcatggtggtgtgcacctgtagtcccagctacttgggaggctgaagcaggagaatcgcttgaacccagaagtcagaggttgcagtgagctgagatcacgccactgcactccagcctggagacagagcaagactccgtatcaaaaaaaaaaaaaaaaaattttaagagaaaaaagaatactatatatagaaaaaagaaaatgtattttttaaaaacattaagtttaaattgagagaagagcaaaaatagactttaatcagaccaaaattgtatgttggaattagtggtctggatgggtgtagtcgttgcagttgaggacgccaaaaacagtagatatgggaatggtgagacaccttttctattcaccatggcgctctcagccttggtgaaggccaggctcctggcactttaacatatccctcaacagaactggggcctcgaaaaggccagcaaatcctgcttcactttggttcttggaatgtgtttgattcttagtttttctttaccctttttaatagtcctttcattatcttttactgcctttatgataaaattatcatgtgaaaggcaactaaaatatgttgaatgaatgtattccatcttatctccttggagttttggtgtttgatttggttattacactttcacacacacacaccccacctttatcaccttgactcatctctgaggttgcaacacttgttattgaccctgagttgcttggttgtttgcttctttcactgtccttggtggcagtggaattgggtggggaggagacaatcctcagaacctgctcagggactggattgttarggtgtgggcgtggtgatgagggaaagtggagtcagggatgaccccatggtgtctgcttttgtgactgagtagatgttagtccagaaggctgggttaggggtggtggttgctaagaattcaggtcaggctgggactgagaggttctggggcaaccacagctgtgtacaagccctaaacttccagaaaggcttggacttcataacagactgttayggactaaatgtctgtgttctttcaaagttcatatgttgaaaccctaatcccagtgtgatggtatttggaggtgggggctttgggaagtacttgggtcatgagagtggagttcttactaatgggattagtgttcttctaagaagaggcctgtgagaggccagctagctagccttcttcctatcacgtcacaacaggacaagaaggccatctatgaaccaggaaatggttcgccagagatggaatctgctagtgccttgatcttggacttcacagcttttagaaccacgataaacaaatttctgttgttcataagccactcaatctatggtattgtgttatagcactcctaaaggaccaagatagcccacttgacccatattttggtgtttctaaattcttcagccatacattttgaatttattggttttctgacacagataacctgtcacatctgttatggagagatctgttgtctttcagagaatattacttctatctcttttcagggagcttattgtaatacttgtttcaataggaacatactgaagtaatggactgaacgaacatatgctagtgggataagcctcttgccgcaagtctactccagagtgtgttgtgatcttcctttagcccacgtgaggaagccagggctcacatcacttaagagggcacagtgcgctgggcgctgtggctcacgcctgtaaccccagcactttgggaggccgaggtgggcggatcacgaggccaagagatcgagaccatcctggccaacatggtgaaaccccgtctctactaaaaatgcaaaaattagctgggtgtggtgggatgtgcctcgtgagccgagattgcaccactccactccagcctggcgacagagtgagacttcatcccccgacccccacaaaaaaaaaagagggcacagtgatatgtccaccctagccctgtagcctatacaaaggcaggcagcacactttgacaaacgaccaatcaaaatgagatttgtccgttgaacttaaggaaaataatggtctcagccctacttcctctgctcttgtccttgattctctattcctacttttaattatttttggtttccttggcttcacctcctatttctagtcctgaaatctcaggttttctttttatttttttattttttgagacggagtcttgctctgtctcccaggctggagtgcagtagcccgatctaggctcactgcaacctccacctcccaggttcaagcagttctcctgcctcagcctcccgagtagctgaggctacaggcccccaccaccatgcctggctaattttttgtatttttagtagagacaggttttcaccatgttggccaggctggtctcgaactcctgacctcaagtgatcagcccgccttggcctcccaaagtgctgggattatagtcatgagccactgcatccggccacagattttatttcaatcctttgttctcttcctcttctaggtcttccccttcctgtccccactggcccctctcctatccactgaatccctggatgcctgacaccctctgcctcctgtccttgctgggtttcctctaccctctacatttcaaagacaagttttgctgaaatcacagttttcctgagggttctagaaaggtctgtgtgaacattaaaaaacaaaggttccttgggttcatttagtctttaagcaaacatcgattgaggcctgtgtgtgtggcaggtactgcagatgcaaagttttccaccttcatggagctcatagttactaagggaaaccctgaattttcttagactactgcaacgcactggccgggtgcggtgactcacacctgtaatcccagcactttgggacaagatgggcggaagagtgagaccatcctggctaacacggtgaaaccccgtctctactaaaaatacaaaaattagccgagagtggtggcacgcgcctgtagtcccagctactcgggactgaggcaggagaactgcttgaacccaggaggcggaggttgcagtgagccgagatcgcaccattgcactccagcctgggcgacagagcgatagtccgtctcaaaaaaaaaaaaaaaaaaaaaaagagaaatataggcacaatttaatgcatctcttttcctttttcaatatggagcatacggtggttcaagcatctgtccacattgtattcccgaagtttgatccctaccctgccctgccctcccgtctttccttccctctctctttttttttttctggagtgcaatggtgcgatctcggctcactgcaacctccgcctccggggttaaagcgattcaccagcctcagcctcctgagtagctgggattacaggcatgtgccaccacgtctggctaatttattatttttaatagggacggggtttctccatgttgatcaggctggtctcgaactcccgacctcaggtgatccgcccgcctcggcctcccaaagggaagtttgatttttctatggtcaccaatggacacttgatctccatagcttgagaatggcggccatcccctcactggcattctttcctcttgtgctctcccgaacgttctggctgctctttggatttccttttcctttgctcacatctacaatattggtgtttcctaggtcccgtacttaacgattgtttcctctcaacacgcttccctgggcgggctgaactgtcgggggctttctcggctgcgcttcctctctcacctgaaaccctcttcccaaccctttatactaggtcgacgtctccaacatcagctgctccccacccgtgtctgggtgggccccttgggcaggctcccctagtctcctttccttcgatcatccccacgtgcaggacgtcatctgcttgctctgccatcagcctcacatcctgagggcagggaccatgcgggggttgtccatctctgtatccccagtgccagcactgcacctcgccccaagcagttgtccaataaatgagcagtgagtaaatgaaagaatgagcaaagccttgtaacaggaaaggggccggcggcgtctgccgtgcaagacctggcccagtggagcagagcctggaggttcaggagccgggtctggaaggctccttccggtggaagaggggcccggagccagccggcgcctggcacaaggcgtctcagaggccgcccactgggagccaaccgttgcagccagttgtccccgcgagcgaggccggagaaggcgcggcggcccctggcctggccatttcgcccttgtcgcagctgaaccgccgactacgagctcctgcaccgcgcacacaccccgcgcgcttcgctctcggcctcgcccggccaccgtcgctctctagaacgccgcgcccgtgacccggaagagcattctccttagcaactgcgggactgcggcggcgccggcctccggggagaaacggtgaggccctcactcgcctgccccctgcaccgcctagtgctgcacgaccccctcgggaccgacccggggtctggcctctggggggctccgcggcgcttcgcccggcacctgtggtggcggcccgggacgagcgtcttccgcctctggcgttgctccccggcccacgcgtcttccctgtcccgcatctccctcaatgtccccagctccccactctccgctcctgaccgacccggcctcccaggccgcgcttatagcgccggggcccttgtagcctaggatggcgtgaggggagcgagaccagaattagagcctgttgctgtagagaggacgcctcccgaggctcgggtcacctgtggacgcgttctctagggtcttgatcgagatrttcaggactggcagggatggggagcctcgggaatcttgaagggcagccgcttaattataacatgtccttgacgtttgcgctttccacagtgatacactttatctcctttattgatcatagagagtttttttttttaataaacttttagatatgggggatacgcatgcaggttagtcacatgggtatattgcacccaggtattgagcatagaacccagtaggtagtttttcaacccacatcccccatctctcccctccttccagtagtctacagtgtctaccgttaccttttttttttttttttgagacggagtctcattctgtcgcccaggctggagtgcagtggcgcgattcggctcactgcaagctccgcctcctgggttcatgccattcttctgcctcagcctcccgagtagctgggactacaggcgcccgccaccccgcccggctaatttttttgtatttttagtagagacggggtttcaccatgttagtcaggatggtctcgatctcttgacctcgtgatccgcccgccttggcctcccaaagtgctaggattacaggcgtgagccaccgcacccggccgactgttcccatgtttatgtccatgtgcgctcaatgtttctactcccacttgtaagtgtgctcaatgtttagctcccacttataagtgagaacgtgtggtgtttagttttctgttcttgtgctaattcgtttaggattatggcctccagctccatctgtgctgctgtaaaggacatgatatcttccttttttgtggctgcatagtattccatcctgtacatccacattttttttttccagtccaccattgatggtcacctaggttgattccgtgtgtttgctattgtgaatagctcagccgtgaacatacaactgcatatgtctttttggtataatggtctgttttcctttggttatatacccaacagtgggattgctgggtgaaatggtggctctttaagttctttgagaaatctccaaactgctttccacagtggctgaactaatttacattcccaccaacagtagtttaaatgttccctttccaagggagcctaatgaggatctgttgttttttgactttttgataatagccattctgactggtgtgagatggtatttcattgtggttttgattggcatttctctgataattagtcatgatcatgttttccatatatttgttggctgcttgtatgtcgtggttttttctttttgtatttcttctgagaagtgttcatgtcctttggccatttttaaaaatgggcttatttgttttttgcttgttgatttaagttccatagggattctggatattggacctttgtcagatgcatagtttgtgaatattctcgcccattttgtaggttgtctgtttaatctgttgataatttcttttgctgtgcagaagctctagtttaattagttccaacttgtcaatttttgtttttgctgcagttgcttatggggacttakccaaaaatttgccaaggtcagtgtcaagaagtgtatttcctgggttttcttctaggatttttatagcttgaggtcttttattttattttgagacagggtctcactgtcacccaggctggagtgcagtagcgtgactgcagctcactgcagcctcgatttcccaggctcaagtgatcctcccacctcagcctcccgartagctgagactacaggtgcgcactaccacgttcggctaatttttgtattttttatggagatgtggtttttaccatgttgtcaggctggtctctgactcctaggctcaaaagatctgcctgcctcagttgcccaaagtgctggaattacaggcatgagctactgtgcctgactgaggtctttgcatttaaatctttaacccattatgtatatcatgaaatatatacagttttatatcttctgcatgtggctagttagttatcccagcaccatttattgaatagggagtcccttctccatttgttttttgtcagtttgttgaagatcatatggttgtaggtgtgtggctttatttctgagttttctgttctgttccattgttctataggtgtgagactcatttaattgtacatcttgaactgatccttttctggggaatttgcttcccagttgtgagtgaggtgtggttagtatattctgtagcttagatttttgtgcttacaagttttctgcagaaggaaatcttcccgggactgactaggtttgaggtttgagaaatatttcaagtgaaatttgctacattgaagaaagtaggagcaggtgttgttaatagcatggacttacacttcagaagacactatggcactggaaaacctcccctgatttgagtttgaatgagctgtactaagaaaactgtaagccttatttgaacatggttggataacgactttatttttaatctgatgatgatggagctaaaactgaggcgtgtgaaccgtttttggaaatgacattatttgggaataaaatgtgggagtttctatatcaaaattcatttaaaactataatttcattccaatttaataactttattaagcatctacagcattatacactttaaaggatataaaagaaaagtgcacacatgaaattattaggaaagcaatgaaatggacatttgtttaaatgcaaaatatgtggtacggatattaagtgctgtagtaggtcagagggtggagaaatcatttctggattaaatgggacttgatttgtctctaaagtacagatataatttgtatttgtattggagaggacaggaagtcctaattcctttccttatattcttaagagtttgggaaatagttccatgtggcatttcgaagttcttatttaatgctttcaggtcacttgatttgtgacctatttctttcaaatagtcttagtacaaatctatatgacatttttcctgtttgacatctaaaatagtgaagttactagctgagggctttgccacttagagtttctttgcttctgcatttggtrttaggtttatatgaaacaccacagtttaagtagttactgtttcattcatgctcaagagtcttgtgaaatgttgctcttttttatttgactggtatttctgaagtgcttcctatgtagcagcggtagtatcaggaattaccaaaaacaactgttacttrgcaaccagtaggtatgctttacataaggagagtgtgtgtgtttagcctatcagcctttgatgctcagcatttgccttgagacattgaaggccagagcaatttatgtagacatctgaattgactttttttttttttttgagtttaatgtttaataaggggactcagttgctttgggcatccaccaaagatacatttgtgaagatgatcaaacttttaagtcctcttaaaagatgttttgttgctttcttatagacttagtgttcatttattcacttaatcatcaaatataatatttgagtgcttacttggtaccaggcactatgcttggccttggagatgggggagagtgaatgcacatatgatctctgtcctcagcagatgatactcaaataatcacacaaatgcaaaactatggctgtgacaagtgttttagagaaatcactgaaatgacattttaactgatgtctacaagatgcacaggaagagaacagtgctctaatcaaagcagaccctctgatgccacgtccatgttgccctggctggagtgcagtggtgagatcacggcttactgtggcctcgaccttctgggctcaggcgatcctcctgcttcaacctcccgaagttctgggattatagatgtaagccaccatgcccagcctgtccttttattttatccttcaaaaagtttttgttttacagaaggagtttcatgaaatgctattgagcatgagtaaaagtaaaactgggcctggaatgagtggatagatccctctgaggtctggccatcgataccatttttgctgatgtcagggagtggagacttgaccagaattcttcttcttcttcttyttttttttttttgagacagagacttactctgttgcccaggctggagtgcagtggcacgatctcagcttactgcaacctccgccttgtgggctgaagtgattctccagcctcagcctcgtgagtagctgggactacaagctcaygccaccacgcctggctaattttttgtattttaagtagagacggggtttcaccatgttggccaggctggtctcaaactcctgacctcaagcaatccacccgccttgccctcccaaagtgctgggattacagacgtgagccactgagccactgtgcctggcctttttgagacagaatctcactctgctgcccaggctggagtgcagtagtgtgatcatagctcactgtaaccttgaactcccaggctcgagtgatcttcccacctgagcctcttgagtagctgggtctacaggcatgagccaccatgcccagctagttaaaaaacattttttttttttttttttttttttttttttttttgtggagacagggtcttgctatgttgctcaggcttgtctgaaactcttggcctcaagtgatcctcctgcctcagcctctcaaatattggagttacaggcatgaatcactgtgcccatcccagaaatcttgtctttattaaactgagagtggtggtagaatggcagaagatgctcctttttgtcatgtaacatgaagtagaaggatttgaagggtttttcgtatagaaggtattttatttggaaccatagcaagaacttgatgccttagagtagttattacgtgaccagttatgttgaggcaagacttgatgaagtttagtcaactgttagtccacctacttttgatttctttcttgccctaataacaggctgcctctgggatgtactaatgatgacagatgagacactggtcacactggtaggaagggacttcatgtggtgcaaagtaccttgaaattatctctgatgaaatcatgaggggagaagggctgatgaagtaccctgccctcagtaaagtattggtggagtgtctggtagacacggagaggttgtgtgacccaaaccggatgaggcaggaagttatrtaatgctaattgaagaattctgcattataagttcctttttggtcctcctctaatgaaattggattgtttctatttcccattargctttggtgaggagaagtttgtggtgattatctagatgctgagggattcagagagaagccccaaacatttctgtttaacttcatttttttagggaccagctttccacatgggaaatagttgcctttttctctgatgtctgccactgttagctttaatcacttttaaaaggttgaatgcaaaactctagcaacagttataccaagaaggagctattattatttttgtttaatccttttacttatggcacagtattaaacaaggtcagaaatttacatgtttctttttaattttagttaagttttgtaaatgaaaaaaagaattgttctgagatttttttgttgaaataatgcatttattttctttatgtttcactgaatttttgccagttcaaatcagtcttttataatagtttgcaagtaaggatgccttataagttttatgactgaaatatgtcttattaacaaaaaacaatttttaataaatgaattagggcccaatttgtgttgtgtaggattattattggttaagaccatatttttttgatttatttaaaaaatttatttgattgatttaagactgatttattgaggtatagttgacaggttataaactctaaagtgtacagtttgttaagttttgacatatgtgtgtacttgtaagactatcatcacaaacaggacattgatcatatctattatgcccaaagctgttttcatacccctggctccctgatccctatcccagataactgattttttttttttttttttgagacagagtcttgctctgtcacccaggctggagtgcagtggcatgatcttggctcactgcaagcttcgcctcccaggttcataccattctcctgcctcagtctccccagtagctgggactacaggcacctgccaccatgcccagctaatttttgtatttttaatagagacggggtttcattgtgttagctaggatggtcttgatctcctgacctcgtgatccgcccgcctcggtctcccaagtgctgggattacaggcgtgagccactgcgcttggcctaactgatgtttttatcactgtacattaactttcatttcctagaatttcctcttattttatataaatggaaccacacaatatgtagttatccttctttcactcagcataattgagagtcatccctgttgttaagtgtattagtagctgattcctctttattgctgagtaatattgcattgtatggatgtacctcagtttattaatacatttacctaccaatggacatgttggttgtttccaattttagttattaacaaataaggcttctataaaaattttgtttacaaggctttgtatggacatatgtttttattcctcttggttaaatacctaggagtagaatggctggatcatataataggtatatgcttaacctttaagaaaactgtcaatgtttagttatccgtaagtatttcatagtttttggtgctatttgatatggtttggttttaggtccccacccaaatttcatgttgaattgtaatccctacgtgtcgagggagggaagtaactggattatggggctggtttcccccatgctgttcttgtaatagtgaattctcacaagatctgatggtttcataaatggtagtttttcctttgttctcacatgctctctcacttgcctgccgccgccgtgtaagacatgcctatttcctctttcaccatgattatagtttcctgagtctttcccagccgtgtggaactgagtcaattaaccctctttcctttataaattacccagtcttgggtatttctatcagtgtgagaatggactaatacactattaaaattatatttttaaaatttatatttctgattgacactagtatatagaaatatgattgatttttttacattaatcttctccatcaatctggctaagctcacttagttcttattagtcctagacctttttttttttttttttttgagttggagtctcgttctattgcccaggtaggagtgcagtggcgcaatcttggctcactgcaacctctacctcccaggttcaagcaattcttctgcctcagcctcctgagtagctgggattacaggtgtgtgccaccacgcccggctaatttttgtattttcagtcgagacggggtttcaccatgttggccaggccagcgtcaaactcctgatctcaaatgatctgtccgcctcagcctcccaaagtgctgggattacaggcgtgaaccactgcgcctggcgtcctagagctttttaatagattccattggattttctatgtaaagattatgtcatctgtgaatacagttttaattcttcctttccaggcttttatttctttttcttattgcactggctgcaatccccaagtaacaatgttaaatagagatggtgagagcagattacttgtcttgtttcttctcttagggagaaagcatttagtctttcaccatttgtatatgcattttatcactggagaagttttcttctatttctagtttactgagatttttttttttttcgagagtgaacattgggttttgttaagtgctttttctgaatctactgtgatgatcatatgatttttttttttcgagacagggtcttgctctgttttccaggctggactgcagtggcatgactgtggttcacagtagccttgacctctggggctcaagcagtcctcctaccttagcctcccaagtagctgggaccacatactacacctggctgatttttttttgtttgtttgttttttagtagagatgaggtcttgttatgtggtcgaggctggccttgaactcctgagcacaagcagtcctcccactgtcacctcttaaagtgttgggattacaggtgtgagccactgcacccagccacttttcatttgttaatatggtgaaatatcgcatcgattttcaaatacagccatttgttgcctaacaatggagatgcattctgagaaatgcattgttaggtaattttgttgtgcaaacctcatagagtgtactttcacaaatctagatgttgtagcctactacacacctaggctatatggtaaagcctgtggcgcttaggctacaaaactgtacagcatgtgactgcatttaataccataggcaattgtaatagaatgctaagtatttatgtatctagatgtatctatacatagaaaaggtacagtaaaaatacaatataaaagataaaaaaatggtacacctgtatagggcattgaccatgaatggaagttgcaggcttggaagttgctcgggtgagtcagtgagtgagtggtgaatgagtgtgaaggccgaggacattactgtgcactactgtcgactttacaaacacagtacacttaagctatactgaatttatagaaaacattttttctttcttcaataataaattaaccttagcttactgtgactttttttactttataaactttaattttttatwttttgattcttataataatacttagcttaaaacacaaacacattgtacagctgtacaaaaatactctatgtccttattctataaacttttttctatttattactttttaaaattttttgttaaaaactaagacacaaacacacacgttagcctaggcctacatagagtcaggktcatcagtatcactctcttccaccttgacatcttgtcctgctgaaaagtcttcaggggcagtacatgcatggagctgtcatctccagtaacagtgccttcttctggatacctcctgagggacctgcttgaggctgttttatagttaacattttacagttaaattacttatttgatttccaaattgtactttaggtttggaggtgcgtgtacaggtttgttacatgggtaaattgtgtgttgtcggggtttggtgtacagtttattttgtcattttttttttttttgagacagagtctcagtctttcgccaggctggagtgcagtggcgcgatctggctcactgcaacttctgcctgcaacctytgcctcccgggttcaagtgattctcctgctttagcctcccgagtagctgggactacaggtgtgtgccaccacgcccagctcattgtttgtttgtttgttttttgaacggagtctcgcactctcgcccaggcttgggagtgcagtggcgccatctcggctcactgcaagctccgcctcccaggttcacgccattctcctgcctcagcctcctgagtagctgggactacaggcgcccgccaccacccctggctaattttgtgtatttttagtagagacgggtttcaccgtgttagccaggatggtctcgatctcnnnnnnnnnnnnnnnnnnnnnnnnnnnnnnnnnnnnnnnnnnnnnnnnnnnnnnnnnnnnnnnnnnnnnnnnnnnnnnnnnnnnnnnnnnnnnnnnnnnnnnnnnnnnnnnnnnnnnnnnnnnnnnnnnnnnnnnnnnnnnnnnnnnnnnnnnnnnnnnnnnnnnnnnnnnnnnnnnnnnnnnnnnnnnnnnnnnnnnnnnnnnnnnnnnnnnnnnnnnnnnnnnnnnnnnnnnnnnnnnnnnnnnnnnnnnnnnnnnnnnnnnnnnnnnnnnnnnnnnnnnnnnnnnnnnnnnnnnnnnnnnnnnnnnnnnnnnnnnnnnnnnnnnnnnnnnnnnnnnnnnnnnnnnnnnnnntctctactaggaatacaaaaattagcagggcgtggtggtgtgcacctgtaatcccagctactcaggaggctgtggcaggagaattgcttgaacctgggaggcggaggttgcagtgagccgagatcgcgccactgcaccccagcttggctacagagcgagactcggtctcaaaaaataaaaaaataaaaaataaataaaaataaaaaataggagtatactctaaaataatgataaaagtatggtaaatacataaagcagtaacatagccacttattatcaagtattgcatactgtatgtaattgtatctgccatacttttatatgagactggcaccacagtagactcgtttacaccagcatcaacacaaacacatgactagtgggttgtgctacactgttgggatggctgtactgtcaccaggtgttaggaatttttcagcttccctataatcttatgggactgccatagcatatatgtctgtcattgactgaaatgtcgttatggaatgcatgactgtattaaaagtaacctttcttttttctttttgagatggaatcttgctctgtcacccaggctggagtgcagtggtgcaatctcagctcactgcaacctttgcctcctgggttcaagcgattctcctgcctcagcctcccgagtagctggaactacaggtgtgtgccaccaggcctggctaatttttctgtttttagtagagatgaggttttaccatgttgcccaagctggtctcaaactcctgagctcaggtgatctgcccacctcggcctctcaaagtgctgggattacaggtgtgcaccaccatgcctggtcctaaaagtaacctttcattcctgggataaaccccacttgattctgccatattcttattctatttatatattgttgcaattgatttcctaaaatctggtttaaaaaatttgcatttctgtttatgaatgatactggtttgaactgtgttttgtaatatctttgtttttgatatcagggtaacgctggaaaccttgaatgaattggaaaatgttccttttcttcggttttctggaacagtttgcatagaactggtatagtttccttaaatgttcagtggaatttaccagtgaatccatctggtctcaagttttctttgtagaaaagtttttaactgcaaattcaattcctttttgccatataaggctattaaagttatctattacttgaacgaacttaacacacttttcagaagatccgtatgtatatatttacatgtttatmcacacacacacacacgtatatatttttgtagaagccttgaaagaaagagagaatcaaacaaaatacatagaaacaaatgagctggacatacagataaagctgtgattcacccagaacttaaacaaatcacaaatttcatagtttaatattggkacagaagcaaaacaacaaacaaataatacattttcccacttcagtaataaaatatgggaagacctgactatgagggtagagatcaaggctaaataaagctttatttatttacattaaaatataattttatttttatagagacagggtctcactgtgttgcccaggctggttttgaactccttcagctcaagggatcctcctgcgtagacctcccaaagtgttgggattacaggtgtgagccaccacacccagccaaaagctttaaatcaytggtgattattacaagctgcaactcgggctacatatgttactgggagctgattactcctatatctcactgcagcatagagtttagttatggcttttccccacaatattgtgagtttaatgtggagaactgtgaagaaaaacaaaagaaaccccaactaataattacaacaactataacaacaaccacaataataataattaataataaacccctaagggatgtatgagctggttttaattaagtagactaagagatactggttctgacttgcattcatctctacagtaaataaaaccttgtttttaaaaarcttcccatgttcctaatacagttaaaaaaatatatatatatactttaacctttttcctttcatatgcaaagatgttacttttcattatctcaagaatatcttcctttgaagtctgtgagggtggatttcagccaccagaaattggtgaagtgggggacaagrgggtgtgcttgtctctgtgtgcacaagtctaagtaaaagaggagcacataggggccaaaaagggacaggggagggaagctggagcagaaggacacctccctaggggaaggcaggaggctctaagtagtggagcaaaaacatgggtccctggcagcagactggctggaatagcctcaaggtctcagctgtcaatttttttttcagtcttttttccttctttgtttcattttggataatttctcttgctacatcttgaagttcctaattttttttttctgtggtgtctaatctgttgtcccattcagtgtatttttcatctcagttgacatggtttttatctctagaagtttaatttggatctttttttttttttttttaatatcccaggtctcttaacatagccagtctttagcttcttgaacatatggaatacaattcttttttaaaaaaatttttttacatagctgtctcctcaaacatgtaaggtatatgtatttatttacttagaaatgctgggatttggagatgttagaatcaataatgcttatatttcttgattgtaaatgctatcagaacataaagctattcaaattataagtgataaaaggatgtattataatcttctgatctcttaggctaatagaataaacaaatcatctcttaaaaatacagtaaagtgatatagtattcagagaagtaattactaatgttatttatttagaaaacatatatgcccttcagactattgtatccgtttggttgctttccttttataaaggaaagtcttcaatacaatacaataattattgaaaaatgagtagttttatcgtttgtctcaccataatttaacaaatacttgggtatagagttgaactggtttatctactgtttacacttttgaacggcattcaattaaggttagttttagtaaagatcttagaatctcagatgggacttttcagctttaggaaattggaatgtgtccctggactatgcccatgccagagtgccaagctaaaagaatgtaggaaacctctgaccaggcccttcaggggactctgtgcaaaataatgaggtcactagcatgaagagctctggactctgaggcagttggaacaggattctataatttctttccaatattattattatatattatatctctttgaggctaagaatccagggaagggaaagcagaaatggggttgctcaactgagaggttaaaaaaaagatgagggatgggccgggcrccatggctcacgcctgtaatcccagcactttgggaggctgagacaggcggatcacgaggtccggagattgagaccatcctggctaacatggtgaaactccatctctactaaaaaaatgcaaaaaagttagccaggcgtggtggcaggcacctgtagtcccagctacttgggaggctgagacaggagaatggcgtgaacccaggacgcagagcttgcagtgagctgagattgcgccactgcactgcagcctgggcgacagagcgagactccgcctcaaaaaaaaaaaaaaaaaaaaaaaaagatgagggatgaaggaccagaagttagaagaaggaagagcagtcttgcaagcttgagggagtgaggagagggatgtggttagagaaagaaagctcccttagaggccctggaggtaatgcttttctggaatacaattctaataactattactttcctgttctttattctcacttatttctatgttctcattcccagtcctccttcttcttctctctctctcttactctctttttctctcctctttctctcttagacatacacacacatacacacacacacacccctgtttaagaagtaaatgtgaatatggaaagcagatgagaagggaggttggattgaattgtggagtatttatttcagtttttatttcaatagttttaggggtacaagaggctttctttacatggatgaattgcatagtggcgaagtgttggcttttagtgtacccatcacccctatagtgtacattacaactcttttctatttaactactgtatgcttctgatccagggaaggtatcttttaaaatttcctttaattccctaatacagatccttcttgacttctgatggcgttgcattccaataaacccatcataagttgaaaatgtcatagattgggccrggcacggtagctcacgcctgtaatcctaacactttgggaggctgaggcgggcagattgcttgagctcaggagttcgagaccaacctcggtaacgtgaaacctgtttctaccaaaaatacaaaaaattagctgggtatatggtggtgcgtgcctatagtcccagctacttggggggctgtggtgggaggatcactggagcctgggaggtggaggttgtagtgagctgaaatctcacccctgtactccagcctgggtaacaaagcgagaccctctctcaaaaaaaaaaaaaaattacaaattgaaaatgattgtaatacacctactgaacatcatagcttagcttagcttaccttaaatgtgttcagaacacttatgttagcctaaagtttggcaaaatcatttaacacgaagccttttttttttttttttttttgagacagagtctcgctctgttgcccaggctggagtacagtggcgcgatcttggctcactgcaggctccgcctcccgggttgatgccattctcccgcctcagcctcccgagtagctgggacagcaggtgcccgccaccacgcccagctaattttttgtatttttagtagagaggggtttcaccatgttagnnnnnnnnnnnnnnnnnnnnnnnnnnnnnnnnnnnnnnnnnnnnnnnnnnnnnnnctgggattacgggtgtgagccaccgcgcccggccacacaaagtcttttttataataaagtgttgaatacctcatgtaacttattaaatactgcactgaaagtgaaaaactggtcatggggtccttgaagtacaattttactgaatgaatatagcttttgcaccattgtaaagttgaaaaattgtaagttgaaccatcataagttgaggaccgtctgtctgtacaatcttatatataattaattcagaggtttattgattgattgataacattttcatgctgtagcacccttagttctactttattagcacttgtgattgtattgtttattgtataagaagtcttaaatcctgtgttcataaaattccttccaaagaagtcagcatacttcatgctaattaatttattgattgtctcagcctttggcttttaccatacccaaagagtatcccacttcctcaggcatccaggatcctgcctcagcttaagggtcattgtgtgatcttgtactgtgctaatgaaaggaacactcagattatagtattgtgggcagagcccaggcctgattytcggggacttcgaaacttytggccagtaggaaggaatacatgtgacactgtccttgaactcaaaactacccaccacatgtagaatttgctctgacactgcaaatactcaattggactcagtgtaatatttgtatctcaaaggaattgaaagctgagatttcaaatgggtttcatggaattttgatcagttagaaaataattaatggaaaactatctagctgttaaaattgtctcattcttcttgcagtgcttttaattgtgttacacatgttttttgtttttattcttgagttctggtctgaagtgattgtcagtggtttgtgtttgatcagaagatccattgccctttcttgtatccctgccctacctccatgagtctccttgtgatacaacttcagaagaaaagatgaaaatcgaggtttttgttaactcctagaaggtgatagaaggacatgatagaacctggcagattttcagtggaaaagattgagtctagaattaaaagactatgtatgtttttatatgcattctatagtcttatttgttggtaattgaaaagttacaaagtaatgtatgcaaaatatgtgtaaggtatatagaatagcaggacaatgaatacccaatgtacacaaccaccagattaagaaaacaaaattatcgttgccattgaagatctccgtgcctttctcctttctgaggtaatctgaattttgtgttttctttatacttgaaccacatagtttgtatccctaaactgtggtttaattttacatgtttttgacactaatcaaatggaatcacagtgcagatatttttatgtgatttgcttttttcccatagcgtcaaatgtgtttgttttggtcagattttgcaaataatcktgggctgcttccacatagacgtataagtttattttgtagtaattttccttattcatctcagagaatatgatttatatgtttcggtcttgtggaagtaaaagagaatgatttcctagtggataaaaagaaaccagtctcctttaaggcattctgtctccatgcactccaccatcctcactctggaacccattgcagaggagctcttcaagggggtgttagctttttcctcttttacctcgccttggrcaggctgagacacctcctgctcctcaaataggtgtggcccagtgcttctttaccttgtgtataagaatcaccaggggaggggagctttaagaatattcacacctgtgtgcaaacactgaccaattaaattagaatgtctcctttacatacaattaaattagaatatttcttttacctgtttttacatttaaaatttcaattttgttttaatggagttgcttctttcatattgattgtaggtctttacatattctgtatattaatccttggactcctatgtgttagaaatattttctcctagtcaattgatttgtctttatgattccttttggcttacagaagtttttgatttttaaaatttgagacttcatcattatgacatctgtattttgcgtcttaactaagaagactttctttactcctaggttttaagctatttttcctatgttcttactgtatttataattttacttccaacatttagcactttaagccacctacagtttattttatttatttatttttatttaatttatttttttattttgaaacagggtctcactctgtcacccaggctggagtgtagtagcatgatctcagctcactgcagccttgacctcctgggctcaggtgatcccctcccatctcagcctcccgagtagctaggtctacaggcattcaccaccatgcccggctaatttttgtattttttgtagagatggggtttcaccatgttgcccaggctggtcttgaattcttgggctcaagcagtccacctgccttggcctcccaaggccactgtgccaggcctgaaggttatttatttatttatttagggacggagtcaggtatttatttatttatttattttgtgacagagacttgccctattgccaggctggagtgcagtggtgtgatctcggctcactgcaacctctgcctcctgggttcaagcgattctcctgcctcagcctcctgagtagctgggattacaggcacctgccaccacacccagctactttttgtatttttagaagagatggagtttcaccatgttggccaggatggtctcaatctcctgaccttgtgatccacccacctcggcctcccaaagtgctgggattacagtcgtgagccactgcgcccggcctattttttatgtgtagtaagaatctaacttttcttcaaacagatagccaggtgtgctattaccatttgagtggttctctctcctagtgatttgaaatacttttaaaataatttccctaaggtctgtttctagactctctgtttccttctaatgatgtctttgccaatttccagttgaatatcataatcttttaattactagtgtgtcataggatgtttttcaatttgatagagcaggtcttttctcgttactcttttgcaaacatttctcatctattttgggcattcttctattagatcttaaaaattactttttatcaatgtgaaattcacatcacataatgttagtcattttaaaggaaacaatttagtgagtgtgactggtagtacttcttgtggttttgatttacattttcctaatgtctgatgatgttgagcatctttccataagctcattggctgtaattatatcttctttggagaaatgcctgttcagatcctttcccattttttttcatttgatttttaagataagcttgttaggctgggcgcagtggctcatgcctgtaatcccagtgctttgggaggctgaggcgggcagataatgaggtcaggagtttgagaccagcctggccaatatggtgaaaccccatctctattaaaaatacaaaaaatcagctgggcgtggtggcatgcacctgtattcccagctacttgggaggctgaggcaggagaatcacttgaacccaggaggtggaggttgcagtaagccgaaattgtgccattgcactccaacctgggtgacagagcaagactccgtctcgagagagagagaaaaaaaaaagataagcttgttaatttctattaaaaggtcatgattggaatttgtgatcacattgactttttcaactcatttttaatggacctctttatagtattgagtcttttttgatcaaaagcagggtttatttgtttaggtcccttttatgttttcaggtgatcctcttacttcagcctcctgaatagctgggaccacaggcatgtgccaccacgcctggctaatttttaaatttttttaaattttaatttttgagacaaagtctctgttgctcaggctggagtgcagtggtgcgatctcrgctcactgcaacctctgcctctcaggttcaagtgattcttatgtctcagcctcctgagtagctgggattacaggcatgcaccaccatgcctggctaatttttgtatttttattagagatggggtttctccatgttgggcaggctagtcttgaaatcctgacctcaagtgatctgcctaccttggcctcccaaagatctgggattataggcgtgaaccactgtggccagccttccttcatgtttttaaaaataattttaaaattcaaattagatttcacaccctactagcttgtgattttggttgctacttagaattgatctttttttctccttgcattttcaaatttatcattgttggcatataggcatgttatcaataatataatttgtgagtatgtcattttagatgttctagatagtcattttatctgtaaataataaacacatagtctcttttccaatatttattcctcttccttttctgattatgttggctagggctgctccagcttagtgttgagttgtaggtggtatctcctcctaactgtaatgggaatgtcagtaatgttatactgttaagtattttatatatatatatatatatatatatatatatatatatatgagacatatttacatattatatatcatatttatatataaataagttaacatatgtttattttaattaagtgcttattaagtgtccttttttttagatgtttaatactaattggtggccaggcgtggtggctcatgcctgtaatgccagcattttgggaggctgaggtgggtggattgcttgagtccaggagttcaagaccagcctgggcaacatggagaaactccgtctctactaaaaacacaaaaattagctgggcatcatggtgcgtgcctgtaatcccagctactcgggaggctgaggcatgagaatcgcttgaacctgggaggctgaggttgtggagctgagattgtgccactgcactccagtgtgggtgacagaagtgaggctctctctcaaaaagaaaaaaaaaaaaagaaatactagttggtgataaattttgtcatattcttttttggacatttgttaagttcacctccccctattgctatatagtgagttatatttaatagatagactcttataggatatacttgcttgagtgtgtaatcttcaatatattgtggggattcatgttgttaatattttatttaggatttttgcatctatgttcataaatgagattggcctgtattctttgctttccttacttggctttgcaatctagaatacacttacttacagcatggtagcgggtttttcatcttagtctgtgctttggaatagtttacctaacatgggaagcaagatattatatttgtctttacatttgtttatgatgtattatatattcaatacttacgtatttcatctttctgcagttaaatctttcaatctttttatggttttgtgttttatgataacttctttaatctgtcaagtttagtgtgaagtagataaagaatgttttatttcttttccctgtatagctccactattatattaccatttagtgagaaatcttttttctattgatctgaaatgcctcctttatcatatactaaataatttctacatttggatttgtttcttagtgttttattcaagcattttttttttttttgaaacagagtctcaccctgttgcccaggctggagtgtagtggcaatatcacatctgactgcaacctctgccttctgggttcaagtgattctcctgcctcagcctcccaagtagctgggattacaggtgcccgccaccacacctggctaatttttgtatttttagtagagacgaggtttctccgtgttggccaggctggtctcgaactcttaacctcagatgatccacccacctcggcctcgcaaagtgctgggattacaggtgtgagccactgcacccagcctcaagcatcttttaaagataatttttggtaaactcttttgaaaactagattgaaagacaagtatatttttaagctgactttaatgcattttaattaatcaggctttgctttagtttcactctatgtattttacattcctctgcctttattggaaaagttatttgagatcatcagagaggagttttcagtggatctcctaagcttggttttagtggtgtattgatttactgaggctgccataggaaagtatcacaaactgaatggcttataacaatagaaatttattatctcacagctatgaaggatagaagtgtgagatcaaggtgttggcagggctggttcctcccaaaggctttgaaggagaatctgttgcatgtctctgttagcctgtgttggtggctggtaatctttggcttgtaaaacagggatcctgaactgtccgtggcctgttaggaactgggccacaacagcaggggatgagtggtgagcaagcattactgtttgagctccacctctgtcagatcagtggtggcattagattctcataggagtgcgaaccctgttgtgaactgcatgtgagggatgtaggttatgtgctctttatcagaatctaatgcctgatgattgagggccaggcacagtggctcatgcctgtaatcccagcactttgggaggccaaggtgggtggatcacgaggtcaggagatcaagaccatcctgcctaacacgttgaaacacgtctctgctaaaaatacaaaaaattagctgggcatggtggcatgcacctgtaatcccagctactcaggaggctgaggcaggagaatcgcttgaacccgggaggtggaggttgcagtgagccgagatcacgccactgccctccagccttggcaacagagtgagactcatcttaaaaaaaaaaaaaaaagaaaagaattaaatgtagtataagtggaacaaagttctttattataacagagttttctaattattattgggatataataaaaaggctatttttgtgtattgtttttgggcattattgaacttatattctaatactttttgcgtattggattttctagatagtgatttcatttataattgatcattttgtctcatttctaatatttatatcaccttttttgttatgtagcagactatctcctttagaacattattaaataacaaatagcaggcttttcctattcttaagttaataggaatgcctctggtgctttatcattattcatatgttattttatgttgctaatttttgtttaaacatttttccttttagcttttatttttaaattaaactttttatttttattttattttttgagatggagtctcactctgtcacccaggctggagtgagtggcgtgatctgggctcactgcaacttcttttttttttttttttttttgagacggagtctggctctgtcgcccaggctggagtgcagtggcgcgatctcggctcactgcaagctccgcctcccgggttcacgccattctcctgcctcagcctcccaagtagctgggactacaggcgcctgctaccacgcccggctaatttttttttttttgtatttttagtagagacggggtttcaccgtgttagccaggatggtctcgatctcctgacctcgtgatccgcccgcctcggcttcccaaagtgctgggattacaggcgtgagccaccgcgcccagccaactgcaacttctatctcccaggttcaagcaaatctcctggctcagcctcctgagtaactgggattacatgcgtgcgccacggcacccagctaattttttgtattttcagtagagacaacatttcaccatgttggccagactggtcttgaactcctgacctcaagttatctgcctgcctcagcctcctaaagtgctgggattataggcatgagccactgtgcccggcaaattaaactttttattttgagctacttgtagaatcacatgcaattgtaagaaataatgtagagaaatcccgtgtacccttcacctagttttttcttgtgtaactaaggtacagtatcaccatcaggtaactgcacataccttattcacattctaccattttcacttgtactcygtattcagattttaccagttttgcttttactcatttgtgtgtgtgttctgtcacatctgtagattgtgtgaccaccaccacagtcaagataaagaagagttccatcacaaagatcccttgtgctacattttcatagccacagccattgccctctctctctgcctccctaaccccatctaagcactaaactctataattttgtcatttccagaatgctatataaacagaatcatatagtatgtaacctttgagattgacttttctttattcagtgtaattcctttgagattcattcagattggtgcatgtatcaatagtttgtttttcttcattgctgagtagtattccatggcatgcatgcatcagagcttgcttaaccattcatctgttgaatgacggttgttttcaggatttggctattatgaataaagctgccgtcagcgttcatgtgcagctttcatttctctggaataaatgctcatgartgcatacaccctttacttagactcatctgttggtaacattttgtcccatttgcttattatttccttcctttctctctctccacttttccatacacacacaaatataaactaaaatttttccttaactgcttgagagtaaatttgactacatccttactcccacatacttctgtatttccaagaattaaggatattttmttacatactgtgatggttaatattaggtgtcaacttgattggattgaggcctagatagctggtaaagtattgtttctgggtgtgtctgtgagagtgttgccagaggtgattgacatttcagtcagtggactgggagaggaagacccaccctctgtgtgggcggacaccatccaattggctgccagtgcgtctagaacaagtcgggtaagctggcttgctgagtcgtctggcttttatttttygyccatgctggatgcttcagtccgctcctggtgcccttggacatcagactctgggttcttccgcctttgcactcttgtacttacaccagtggtttgcccggggctcttgggctttcagccacggactgaaggcagcactgttggcttccctacttttgaggcttttggacatggactgagccactaatggcttctttcttcctcagcttgcacatggcttgtagtgggactttgccttgtgattgtatgagccagttttccttaataaactccctttcatatatgcatataaactattagttctgcccctctggagaaccctgattagtacacatacccacaggaaagttatcaacttaatttaacataacttttgatatagcttttatcagatctatcatctataacaattttgtcaattcgcctagcaacgtcccttttagcatcttgtccccttctagtacaggggctggtctgggtccacatattgtgtttcattgttatgtttcctttacctcctttaatctgggaacagctctttacattgtcttctgtgacattggcatttttgaagaagcaaaaatgagaactttacatgtattgtctcctttagtacttaagacagctctacaaagaagcttttattattatcgcctcttttagatgatgagagggacagaaagatgaaataatttgctcaagtcatcttaaatggtagaacctggattcaaacctgggtgttttgacttcagaagcctgtttaaccactgagctctactgtctttcattaatcttttagcctgtttgtagtagcacttgacctttcagaaactgagaaccagggaaactattttctatattggctgacataaacaagtatttaatttgttttacagtagatgatccattttgtgatgacttcagatatttcatctgttgcttttagttggagttaaagttaggtctgcatctgattaacatttatggtactttatggaagtattaaatagtttaaatgaagttttaagcatcaagcagctggttgtcttgcatattagaaatagrstttataggaaaccctaagttgtctgggctgtgtgtttcaggccagataaggatagtttcttccaggacattcttcagggcttggtctagtctttgttaattgtctcaaagaaagagctccactatccctggaggaaggcagttttctaatctctcatctttctggaaggttttctttgtaataagatgtggcaattaaaatgtgccttattctttctaagattcttttaacgtcactaccatctgaagtaatatgaaatacatgtgtatgggtttgccaagattgcagtttccgtgggaatcataacattggatttaatcacatctgggttaatgaagcgtgcacaaaggctctgcatgaatataggttttatatttaatgtgcatctggaggcagcaaggtcttagtgatgtagtttccctgtaagtgacaagttgaacacttgctagctgaaggtttaaggtaatcccaaggctaggaactttgccacggaactgaggtcctgcaccttgaccctcagtttagaaggcatgcgtaagcactgggaatctggagctctttagtggagctggaggcccagcttatttccctggagtctgtagactttgggtttgttttgtctccatgagaagcagggattacagtgctggtgtttkgacttctttttttgaagtggtagggagaagaartacaccaggtctgtcatagttgtactttggtgttttgggaatgattttggtcatttttctttttctttctttcttttttttttgagacagagtttcgctcttgttgcccaggctggagtgcaatggcacgatctctgctcactgtgcgcgacctctgcctcttgggttcaagcgattctcctgcctcagcctcccaagtagctgggattaaaagcatgtgccaccacgcccagctagttttgtatttttagtagagacagggtttgtccattttggccaggctggtctccaactcccgatctcaggtgatccacctgcctcggcttcccaaagtgctgggattataggcgtgagccaccgcacctggcctatttttcttagattgttttctctgctgtctacctgacgttttataactattaagttcatggtgatggtccttgagagtggtagtggtttttacgtggaaaatctagaattttggattgctccaaaccctagaatcactatctttcaaactcactcatgttgaagggcatgaatgtggaacttaatttctccacrgaaagtggagctagagkgagggttgtctttgtagggcctctctcaggtccaccagtgccacgtgcttagctgacagaccaaaatcagaaagttgacttagaggtcatcaagctttccctatctatctgtggtctgttttagtatcttagtcattttactgtttagaattttgtgtcctccattcctccagattccttgaataacactagacttctccgtgactttgagggtaaattacaactggttgtgactttatatgtcatcttacaggagtgttctccaagacatgacgtggatcttgtgtgtaggcaggaagatggttcttagcaaggccttaccgtgcttagggctgaaagtctgttggtagtaacttccagatgtttgcagccgcagtcctgagagtagtaggcattgttgtagcaatactttcccaagactaaggccatgatataactgacatttttgaaaaaaataaataactaacacagaagctagattgatgttaatctcttgtgtaaaataaaaacaagtttttatgaacactgacattttatttgaactgatatgaacctagggaaaattactttcaattcttgtatgttttagtcattttgttcagttgattataggttctgaaagtcacatatttttccaaattgccatggtaaaattggccacgtggatgagctttgcaacccttttttcctttgtcttattacttttgagactagtgtatggagatgtgatggctcggattaccgttgaaattatgcgtgtagatagtgggtgagttctttctcagctttatttttaaataactgcttctgtatcacagcatgaaatttggattgagcttgtggtaaccttgctcaataaaatttatgctttctgtaagtaaaggccctaagtgatagtagttgttgctgaattgtttgctaaatagaatattttgccagtgtgacctgtaaatgggagttttaaaaatgtatgtgtcagtataattgtgtgtgtgtgtgtgtgtgtgtgtgtgtgtgtatgtgtgtgtttgtatagaggcgtagatgaaaaatctttggctattaattgaaaattatttaatttgatgatgaatgtatggtagtttcttacattttttctacctcatggatgttttaaaatttccaaaataaagagtaaaagagtctccccaaacggtaattaagaaaagggacaggggactgggcacagtggctcacacctgtaatctctgcactgagggaggctgaggccggatcgcttgagcccaggagtttgaggccagcctgggcaacatagtgagaccttgtctctacaaaaaagtagaaaaaattagtggggtgtggtggtatacgcctatagtcccagctactcgggagctgaagtgggaggattacttgagcccgggaggttgaggctacagtgagctgtgatcgtaccactgcaccctagcctgggtgacagagtgacataatgagatcttgtctcaaacaacaacaacaacaaaaagataagatgtaggttttatttgctagggagtagagacaagggtcaatgaaatagatgtcatgatttctaaaaccttccagggtggctttttcagtggtgctgaagtactgcccctgagttacttcaggagagagaatagaattttactgttgttgcctaggtttactgatcatggcagaggtattccagtgtgctgcccatacattacaaaaagaaaccctttgtgttttctttccacaagatccttttatttgatatttggagccaagtgtgaattctgacaccaataccttcccatgcttctttaggttttgatttttttttttttaaagatgaggttttaagatgaggcttttaattagtctctattgttttgcaagtgtttctctctgttccttccttcactggatggatggagagtggtttcttattgtttctaaagtacttgtgtttgacttgtgctttttgccactctccctagaatttgtctccgaagtctgcacatttttcccaaaaagaaaggttagaataaatttcagagggttgaaaatgccagtttgatacgaaagtctttaaagcataggaagaaatcttagtcgcttcagtgtaataattctgtagatgactttaatcgtagtaataaaatgcgggaaagaaacatgagattgaatttataatgttatactgtacagagtacacatgagaaatcaagctatttgttgaaacaatttccaccttataacatttttgggccttatttggtagcaaagcttgtatttgagatctctttcaattttggttttgtatgttttgtcattgcaaatcttaaatttgttattgtgtgatttatggccaaaactctggtacttcagtggcattaagatgattctgtctttattaggcaagtaatgatactgtagatccactcaagcagtatccttcatgtacttcctgccattaccgatgtcctgtgtattaccaagatgtgaatatactaaactccagcattcaaataaatcttaaatagactccgagtttttggagtgctatatgaatttataagagaatttcagaagcgagagaaagtttagttgtctttaagagttttcttttttttttttgagctctgcctcccgggctcaagtgatcctcctacctcagcctcccaagaagctgggaccataggcatgagccattgtgcccggctaatttttgtatttttttgtagagatggggttttgccatgtcgcccaggctggtcttgaactcctggcctcaagtgatccgcctgtctcggtctcccaaagtgctaggattacaggcgtcagcccactccagcctaagagttttcttaaattccgtaatgtgggaaatgtttaatattttgacggcaactattattgtctttaaattatttttattttttagagacagggtctaaccctgtctcctaggctggagtgcaatggcactatcatagcttactgcactcttgaactcctggactcaaatgatcctcctacttcagttttctgagtagctgggactacagcatgtgccaccatctggctaatttttagatttttggtagagatgaagttgggctatgttgcccaggctggtcttaaactgctgggctcaaaggatccttccacctcagcctccgaaagtgctgggattacaggcatgagccaccatacctggccttaattgtcttttaaatttagagttgaaaaacattacagaggctattcattattttccatcagggtatatcatattatttgcattagggtatattgccaaactgtgcctgtaattcctgatgtgacattaggccgtaataaattctcctgttatcaagaacatttattaggtgtgtaccctgtgggcatggtgtagaagtaggcagaagacatgatccctgctcctcagtaatttacaggttttgagagtacacagggcatctcttttaatgacttcattcagtaagcatttcctgagtatccactgtgtgctagcccttccaggaactggggatacagtgatgaacgggacatacaaggctctacactcttggaatttacatactggaaccctcaacacttcacgtgctaaatgatgaaattgttaaggaccttatgaggggaggtattactttgctgtggtatggttgggaaggctgtattgagggatgaggactggagctggacaggcgtgagactgttcatttcccactgtgtattctgtggaacctgctatcaaagatttcgtggtcaaatagatggaaaacatgacccacttgggattgtggagaaggcatcccaagagctggagaaattaggtgagacagtaggggagaggatatggaatttgagctgttctttaatgggtaaaattttaagagtgaggttggagtagagggtgagtgaactgtgtgagaatgtgcagggagcttgaagagtacgggccatgttgggggatgctacccaaaatgcacctgtccccagcctcccctcctaccctcacagaagctacccattgtccttggctccaccgtgtcacctcttccatgctttctgtgttttaacatgctcaagtttctcctttcataaaaacaccaacaaaaaggcaaactgtcttttgcttccacctttcccgcttcatggctaaatttcacaagcaatcaacagctcacgaactccacatccccccagcccattcatttctcagctgatttcttttttgtgttatccccattgcttcccccttgcacctctcactgagccccttgtgatatccatcctgctaagtgtaatgaacacttaatgccttatttcacttctcttagtgacatagggcttcattgccctctgtcttctcgaaatcttgattttctttctcttttccctgctgccaagcctccaggaagtagagaaaagacattttcttgacatcacactcttccaagttttctcttatatctccctcttaggaggccattttttctcagtctttgcaatttctgttcccttctccctggctattgaactttgaggctcctcagagtctcaatcctaggtcccttcctttttttctcgatattcttcctaggctgatcgcatctgtgttcaatttcagttgctttggttatgatttgttctctggtgactcccaaatttgctgtcagcccagatgttcttcagagctcctgacttttgtgtccagctgcctggtgttgcagtcacctcaaactcagcacgtccaattcttggctgatgatctctacccctctatcctcattcaataaccctgtcctggtgcatgtaactcccatccatccaattatgtaagctagaaaatatgaagttatctttttttttttgagacagagtcttggagtgcagtggtacgatcttggcttactgcaacccctgcmtcccaggttcaagcaagtctcctgcctcagcctcctgagtagctgggactgcaggtgtgagccaccacgcctggctgatttttgtatttttagcagagacagggtttcgccatgttggcctggctgggcttgaactcctgacctgaggtgatccacctgcctcggcctcccaaagtgctgggattacaagtgtgagccaccgcgcctggctgagatggctttttttctttatcagtaatccttgactgaggtcagtagtcccccagtkacctctgagggtctgcatcacttaggtttaattacctggagatttcacacagatcctaaaatgatatattgtaggtaaatggtgtccaggtaatgtctttcattaaaatgaaataattaatatacatttaagtccctccctctcatccactttaatacttaaggataaaacaggagctcatattccaactgcattttttttttttttttggtcttcttagaagagctctaacggttaacattgttgaataagaatgtcattgttgaataagttgtcattcatctatgtcaatgacaggttctagaaatgaaaaaaataacaatttatcttttttttcctttgtgaatcatgcttttcatgtcctaagaactcttcacctaatcgtaggtcatgatgcttttctcttatgttctcctctaagagttttatagtttttgtattagatctgggatccattttgagttaatttttatatatggtctgaggcaaaggtcaagattttttgttggttttttttttttttttggtctattgatgtccagttgttccagcactatttgttgaaaaggctatctttcctcccttgaattgcttttgcacttgtgtctgaaatcagttggacatatttgtaaggggctatttctgggatctctctgttgttccattggtctaggtggctgtccctctgaaaataccacagtcttaattgctatagctatatagcttaaaatcagatagtatgattcctccaactttattttttttggtcgttcattattttagttattctagttccttttcatttctatataaaatttaagataagcttgtctgtatctacaaaagatcttgggactttgctaagaattatgttaaatgtataaatcagtttggggagaattgatatctttactatgtcatggtctactagtgtcaacagcttaccactttaggtggaacataggaagcttaccacgatttaggcccctttaccctccctgctttatagttacatacattgaaaaccacatcagacaatattatacttttgcttttaattacctaatgtaattttaaaaactcaagaggagaaagtctagtactagtacacttaactataaagttactctccaacattagttactttttacttgtaaaattctatttctttcaaaatttatattttagtaagtttctttcgcttgtgtttattttttcttttctttttttctttcattctttttctttttytttttttttgagatagggtctcactctgtcacccaggctggagtgcagtggcattatcatggctcactgtaacctcaaccttctaggctcaggtgattttctcacctcagccttctaagtagctgggactacaggtgcatgccaccacatctggctaactttttgtagagacgagatctcactattttgcccaggctggtctcgaactcctgagctcaagtgttttgccctccttggtctcccaggtgtgagccattgggccctttcattactttatatacattgtttaaaaatattctgtagttgtctttttttaagacctgaagttattctgtactacattttgctattttttctttctgactgtcaatcgtgatggctctttccttatgtgctttgtaagcatttagcaggcttttgactgtaggcatattctgaagcaaatagttctgagaggagtttttggttcagcaatgggtgccaccaatctaggatcactttaagttcgtttctatgcttggggttcattagctggaccctattgtatgaatacaatcctgggttctgaatgttcagaggagactttcctatggaacctagatcaaaacagacacctgtgattttttttccttcaccagctggtgtattttttctagcctattttctcactgagattgttccccttcaagggtctgagttttttccaaggggctcacttcaacctttctacattttgtatcatcaaagccttagagtcttcagtccctctgcggctttaaaccactcttgatactaacaccagaaagtgctcccagggtctctatagcctcagtttctactttttctggtttctggctcccacttgatttttagctcctggggattttcttttctttcttgagaactcaactgtgcattttaaaagaaactggtaatattttgtttagcagttataataattcaataattcagtatcaggtggtttttcagatattgactccactatgttactagaaatagaagattttgacacacagcttccaaaccattcaataaagtatagattattgggtcccaggagggactcactctggtttctttaaaattggtcatttgggacaaaagttcttcctgtctctcaggaggggctgtggtagcgacacttgtccttaaaaggaagaagcatgggcatctttagtactgccctcacatctgccaaacagctagagaggttcaagaaggaagggaatgctcaactgtgtcaagtgctacagcaaggtcaactaagatcaagactgaaaattgacagtgggatttcacaattagaatgtctttgccagagtaatcccatggaattgggaggatggtctttggtccaggcaattcctgtttttctcaggaagaatgacttcttgtttatcagtatgtggttatttattttatgctgtcttattttaatactgtctagcttccaaccttgccttagatagagtagctatgtctgtcatagaaactggattcagccatagattgtaggacctatcttgtatacacctaggtccttaaagcttttgtttatatctcaggtgaggtcatcagaaggaagaactgaagaggtaagagcccagctggggtattaaagtaagagaaagaatataatgaggtattgtcagttttaacatgaagcctctattttgtggaatttttaaaaattatgaaacaatttgaaacacacaaaagtagagagaatagtgcattgagagaatagtgcataacccaaatttagtattttttgtacatttgccgtgtttatctttcttttgctgaaatattttaaagaaatcctgacatcatttatgtacatatcttaactatgcaatgtgaacattttcacatgtagtcaaaatgctgttatcacatctaatataaaatggattattctttactactatacataagactgtggaggctttctattttaaagtcctttgaacatgctgagattgttcctccttttctgtctttatacttgtcatactgtctgtctagaaggctctagtctgtgacctccacatggtggccttagtgacagtattatttcctcaataaaggctttcctgatgactgaactaaagtagtgtccctttcccccaccctgttggccactgcctccctgctctgtgtcactgcctgtgtgcttgtgtattgtctgtctcctcccctagattgtaagcgccatgagagtagggacctggtctgtcatggttattgctctatggccagggcctgaagcaagcctagcctattgtaaggaagcaaaggtttagaaacaagtcagctattagattaataaagattccaaaatttgcttaatattttataaccattatctcttcctacaactgatttctattccagagcttttcttttctcaagagctttaaccaacagctgtgtttgcaaaaagtgctgggctgttgtccctttcaggacatttaatcttttaaatcctcaaaatattttgtaaaatataagtgagtaaagtcattgctgacctgttaagaggcagtgtttttactgacataactctcatttgagatcactttatttgagcttgcagctaataaatctgttttggctcatatgaaacagggtggaatgatcctgtagtccacatagcctttaattgattatttgaacttcatttatttagtgcgtcatttgtattccatgttaggggtatatcaaaattgtcagttgttgggaatattctttagcatgagaaaaaatgtaattcagtaaaacaggtatgattctataattagacttggattcttttgaaaaacataatttcagaccgataaaagagacgagagaatggtacaaataattactttgtattctttacaagattccccagtgttaatattttaccacatttgctttagtatccctccccacttatcctctattgtgtttttttgttttttggtgagtggagacactcaaagccatcctcttttataacattatgcagttattagaatcagggaattaacattgatataccattagccagtagattttattcaaattccccaatcatgcccttttcctttcttatatgaaaagaaaattctggatcatgagtggcatagagttgtcacgtgtctttagtctcctttaatttggaacagtttttcctttcatgattttaacatttttgaagattataggccagttatacaacagggacagtttttagcaggtccctcaatttgggtttaactgactgtcttaatttgatttctgttactataacagagtgccacaaactgggtaatttaaggaaatttatttctcacagttctggagtctggaaagtccagtagtaaggtgctgacatctgttgagagccttcttgctgcatcatcctgtggtgggaaggcataagggcaagagagcaagagcagagagggccaaactcacttttatcaggaactcatttctgtgataatagcattaattcattcactatggttgagccttcatggccaaattccttcttaatgatcccacctgttaataccattacaatgacaattaaatttcaacataaattttggaggggacattcaaaccatagaactgatgtttcaaaactgacatgtttttcttagtgcttcatatcaggagacatataatgttgatttggctcattaccggtgtttactttgatcacttgattaaggtgggtctgccagatttttccaccctcaagatagattttcctctttgtgtttacataatatctttgaggatactttgaaactatttaaaattctgttacttcttaaactcttaccaactagttttagatttcattgatgaatacacattaattagtatgatgatggttgccaatggtaattttctaattccattgttttttctagatttatcacttgcgatactgctgtaaggaatggcttctccctttcacttatttatttttgtctatcagtaggaacttatggattcttatttagtcagttataaaattttgatatttaaatgatcatatatttggccagtagcagccttttcagagggctcctgtgaacttttgacatgtcctcatcattttttgagtattttcttactttctggaacagcaagatattctaggccagggcttggcaaaccttttctgtaagtggccagatagtaaatattttcgattttgtagaccatacagtccctcttgcaactgtttaactctgcccttgcmgcaygaaagcagccatagataatttgtaaactaatgagcttggctgtgtttcagtaaaagtttatttacataaataggtggatgcactatgcatagtttgccaacccctcttctaggctcatatttgtacgtttctaccctggtctcagaattggccatttttccattggttgcttttagtgatgagtggtgtttagaaactgagatctaggcactagatatgctcattgctactggaatgtcattgattctaggccctttcaggagacaaagctagggaatataagaatatatctttatatgctatatacatttgtgtgcgtatatagacgcatccgtatttctctatttattataaaccattgagttatactgatatctccagttccatttcgattctagcctttccacttttccatatttgtaatttttttctccaacattgacaaacttggctcgttatccacaagtatttacttatttgttccatctaggatatatagaaagcagttttggaattgctcactcatacttctataaaaaacctattaaccagagtttaatctttatttacacttattttttgtttttagccacaggatttggttaaatactgtaccccacagttacttgggttagtgtgccattcctgttacacccatttcctgctgccctctaatatattgtgatttatttatttttaattgacaagcaaaaaattacatatttttatggtgtgcaacatgatgttttgctatatgtatacattgtggaatgactagatcaagctacttaacatatccattatgtcatatacttatcatttttttgtgatgagaacacttaaaatacactctcttagcaattttcaagtatacttggcccctagatatccacaggggattagttccaggactcctacagctaccaaaaaatgtggatgctcaggtcccttatataaaatggcaagacatttgcatataacctatgctcatctttctacagactttaaatcctctaggttacttataatacctaatacaatataaatggtatgaaaattgttgttatgctgtatttttaaatttggattctttttaaaaattgttgtatttttatttttattgttgtttccccaaatatttttgatctgaattcacagacacagaattcatggatacagagagatgactgtatacaatatattgttattaactctagttgccgtgatatacaatagatctcttgaacttattcctccagtcttattgaaattttgtgtcttttggcacagacatctctcctctcccctcaacccccagcctctggtaaccaccattctctgttcctatctgttcaacttttttacacggcacatataaatgagatcatgtggtatttatttgtctttctatgcctggcttatttcacttagcctaatgtcctctaggttcatccatgttgttgcaaatgagagggatttccttttcctttcctttcttttcctttcctttcctttcctttcctttcctttctctttctctctttctctctttctgtctttctctctttctttccttctttctttcttcttcttctttttttttttttttttttaagagactggatttcaccatgttgttgcccaggctggtctcaaactcctgagctcgagcagttctcctaccttggcctcccaaagtgctgggactacaggcatgagccactgtacccggcttccttttttttttgtttgtttgtttgtttgttaaaccgaatggtattccattgtgtatatatactacattttgaaaatccattcacccttgctgaggatttaggttgattccgtatcttggctattgagaataatactgtaatgaacgtgggagtgcaaatgtctttttgatgtactgatttcatttcctttgaatacatacccagaagtggaattcctggatcatagggtagttctgtttttaattttttgagaaacctccaaactgttttccataatggctatagtaatttacatttccaccaacagtgtacaagggttctcttgctccacatccttgctaacacttgttatcttttgtgttttcgataatagccattctagcaggtatgaggtaatatctcactgtggttttaatttgcattcccctaatgattagtgatattgagcattttttcatatacctgttggtaatttatgggtcttttgagaaatgtctacctaggtccttttcccatttttaaattggattatttgttttcttgcaattgattgtttgagttccttgtgcattttggatattaactattatatgtatggtttgcaaatatattctctcattcattgtctctttgctctgttgattttttgcttaacagagtcttcttagcttagtggaatgccatttgtctttttttttttttttttttttgcttttgttgcctgtgcttttgtatttttaaagaaaaaaaatctttgccctgatcaatgtcatggaactttatttaactccatgttttttcccagtggttttcagtgtcaggccttacatttaaatctttaattctttttttttttttttttttttgagatggagttttattcttgtcacccaggctggagtgcagtggcccagtcttgggtcactgcaagctccacctcccgggttcaagcattctcctgcctcagcctcctgagtagctgggattacaggcatgtgccaccatgaccagcaaatttttgtatttttagtagacaacagggtttcaccatattggtcaggctggtctggaactcctgacctcaggtgatccacccgccttggcctcccaaagtgctgggattacaggctgagacaccactcctggcctcctttaatccattttgacttggtttttgtatatgttgtgagatgagtgtctaatttcattcttctgcaaatagaaatccggttctctcggtaccatttattgaagagattgtcctttccccactacgtattcttggcatctttttgagggccaattgatagtaaatgtgcttttttatttctgggttttctattctgttccattgctctgtgtgtctgctttgatgccagtactgtgctgttttgattactgtaggctatattttgagatcaggtagtgtgatgcctcaggctttattctttttgctcaagattgctttgcctatttggggtcttttgtgattctatatgaattttaggattgctttttctatttttgtgaaaaatgtcatggaattttggtagagattatattgaatctgtagattgctttgggtagtaaggacactgttacagtattccacaatcatgaacatgggatatctttccattttttggtgtcttcagtttatttcattaacatttgttgtgtttttcattttaagtagagttagcataatttctttctatttgaattgcatttttaggccatttcccccattctggtttgttttatgttgcttttttttgagatgtgaaacatcactgtggttccaaaagtcagaacatataaaaaggcatattaagtgaagtgttattccacatccatttcttttacctmgttatcacctgcctccctttcactgttcccatctactcactgtaggtagccagtctcattagtttctaatttactgtgttgtgtgtctttttgcacaaatgatcgtatgtgtgtgtgtaactcttattttttctttctttgtcatataaaaggaaacataccatagattatcttttagttaattcagaagctcaggagttggtcaaagtagaacatttctgtgtggtgaaatgagtggcctcaactcaatcaagttattggaggggagagtaggaacttcatcaggttatggtcaaattaagcctagaacaggaagtaagccaggcttacccaggtattctgccttggattaaaaagacgctaaattatttggtggcagggatcttaaatgataacaatttctctttcctgactctgctctaatctagacctttgtcctccaatctagaggttaccctttatgcttaatgcacatttgctatcctggggtctcttttttctctgtcgttttagaaaattcctttgcactttttttgtgctgagtcttctcctcattgtactccatatcatcctctgtttcagtttattgtgtcattttggtggagcacatcctttagtagcttcataagaaaaaatacaggaaattttttttggcctgctattttgaaaatgtctttattctacccccatacttgattgttagtttgactgcatatagaattgcagattagaaataattttccttaaaattttttacaactttactcatgtataatttacatacattaaatatttctggtgcttaacatttattcctgaaaatccagttttgctctggtatcatttccctttagcctgaagaactcagtatggcgtttcttgtagtacagtgctgctggtgatgggttttctcttttatctgaaaaatgtctttgttttgccttcattactgaaggatatttttgctggaaataggattcagggctgacagtttttttcttttagccctttaaagataagttattccattgtctttggctggcaggaaagaagacaataaaaaataaggaatctgctgccattcaaaatgttgttctgtttgaggtatttctttttatgttgactgctttagattttctctgtattgttcgttttcagcagtttgattatgatgatatagatataatttttaaaacaattttcctttttggggttcactcagtttattgaatctatgtatttatgtttttcagcaaatctgggatgtttttagccagtgtttcttcatttttttgggacctgttctcttcttctgggaaatcaattccccttatttrttttttttggagacagagtcttgctctgtttcctaggctggagtgcagtggcatgatcttggctcactgcaacctctgcctcccaggttcaagcaattctcatgcctcaccctcccaagtagctgagattacaggcatgcgccaccacatcccgctaatttttgtatttttggtaaagacrgggtttcaccatgtagtccaggctggtctcaaactcctgacttccggtcatcsacccgccttgaccccacaaagtgctgggattaacagatgtgacccaccaggccaattacctttatgtttgaccttttgttgttgtcctgtaagtccataatactttatgtttttgttcagtcttctttctgtttttcaggttgtataatttctgttgataaagtttaaactccttgagtgtttattcttttacctctattttgctattgagcttatccactgaattttttatttcagatattgtatttattaattttaagtttctttttttttttttctttttgagactgggtgtcactctgttgcccgggcaggagtgcagtggcgtgttcttggctcagtgcaacctccacctcctggaactcaagtgatctgtccacctcagcctcccaagtagctgggactacaggcatgtgctaccacacccagctaatttttgtgtttttagtagagacggggtttcaccatgttggccaggctgctcttgaattcctgggctcaagtgatctgcctgttttagtctcccaaagtgcgaggattacaggcatgagccactacacctggtctaaaattctcatttttaagtacgtttttatttctctgttgagagtttcaatctcttcagtcatttcaagtgtcttttcctttacctcagtgagcgtagttatcagagctgatgtaaagttcttgtctgatagttctaacatctgagtcattttgaggttgggatttgtagttttccctttagaatggatgttttctgggttcttagtatgtcaaataattttggattgtttcctgaatattattttatgtagactctgaattctgttaaattcctttgaagaatcttgatttttttttttttttttttttatttcactagcacttagcttcagaccctgttaggttcagattgcgtcttgtctcctgtaggcttaaatctcatttgaaatctcctgttggcttaaatctcatttgaaatttttaggcctttataatgttgcgttgagtctgtcctacatgtctacatggctaaggggtcagcctgagacttgaagagtcataagaattaggggagtcccttcttcagctctctcctcttttagattgctactgacctccacctgtggtcctttcttctagccaggcgcagcctatggaatttgtattgaagatttagctgcctgcattgcaccaaccctgtgatggtggcctgcccttgggacaaaacttctatttccctccccacaaattttataaaaactcatgaaattccccctactaataccagttacttgtccagattcctactcctcccaacagccttcctccctttgtttaccctgcagaatctataggtagttgtttctgatttttttccagggtttataattgttaacccaatttgtttttaagtcatttttctggctttgatggcaatcatagtctttcccaacttactattttcatcagtgattcacctagtgtgatattgaaaaacttatagtaagagatgcgcctggaaggatgggttagattatagagctgcagtgagcaaccctgaagggttttgaaaaggcactttatggctgggcgcggtggctcatgcctgtaatcccagcactttgaggggctgaggcgggtggatcacctgaggtcaggagttcyagaccagcctggccaacatggcaaaaccctgtctctactaaaaatacaaaaattagccgggcatggtggcacactcctatagtcctagctacttggaggctgaggcaggagaattgcttgaacccgggaggcagaggttgcagtgagccaagatcgtgtcactgcactccagcttgggcgacagagcgagactctgccttgaaaaaagaaaaaaagaaaaaagaaaaggcattttataaaatatcttctatgttgtaggtgaaacgtggagtgaagaaaagagattcgtgagtgagagacctgctaaaaaactattgccatctttatggtacatacaccgttgtaacaacctgaattcagacagtgctaattaagttggaaatgaaggaatctacttaggactcattttgaaggtagaatagacagaatttggtaatagagtactaatggagaaaaagagattagatgtctactgttgctgcccagggatgataatgatgtcattaatctggatgtagtatgcaggtggaaaatayagtttgaggagaataataaattgaattagaaacatgtggcattcaaagtgcttgccggtattattcagcaggatgttggaaagttaaagaagagctttgaagagcagagctggagatgaaaatttaaaactctttaaaagagaagtgagatgaggtataagagtagaatcttgtaaatggtagaaaccgaagaggtaagtgaaaaaaagaggagtctgtaaggaaacctgtgaattgtagagagagaaagagaagaaccacaagactgttgtgttctggaggccaagggtgaagaatttgtattacaaagatatagctggtcagtggcatcctgcacaaaaaacaagcaaactgagagaatgccattatttaagtagtgaggatttttctttctaggaatacagaaaactttacttcattatagagaagatgatagacgtcatattccaaaagagattaaagagtgtgtaatgggggaaatagaggttgtgagtccagaccacatttttaaactttggcaaggatgggaatgagakaaatggaatgatagctggtagcctgaggtgggcagaaggggagcagggccaggttcttacattggttgtgtgctattgggaataccccagtggcaagaataatgggtgtgttaaaagttctagagtagattaaaataacatgaagaacacacattaagagggttaggttataaatatgtagggacattttcccctctaaaatagaaagcgaagataggtgcaggtatggagaagttttgtctgggagaagagtgagtccatataggagagagttgggaatgagagagttaagagtgaggttgatacttccgctctcagttatggcatagaaaataattggaaacctggctcactgcagcctccacctctcaggctcaagtgtttgtcctgtctcagcctcctgagtagctaggactacaggtgtgcacccctgtgcctggctaatttttgtatttttttgtagagacagggtcttgctatgttgcccaggctggtcttgtgaactcctggcctcaagtgatccacccaccttggcctcccaaagtgaagaacactttcaccatattagaaaggacaggtattaagaaaatacaagagaatattttgaacaacattctactcccaccatgaaatgttagatgaaattgagaaattcctatagaaatgcaaattaataaaattgattcaagaagaaatttaaaaaatatgaactatcttatctgtttacaagttttagtttttttcttctgatgcctttctttggctatggtatcaagggaatactgtcataacagaatgaattctctattttctggaagagttgtaaaggatttgatgatatttttttcttttgatgtttggtagaatacaccagtgaagacatttgagcctggaagattttaaattaataattctatttatttacttgttatatgtctattcagattttctactactttttttttggagacagggtctcactctgtcactygggctggagttcagcgatgtaatcacagctcacgctcactacagctttgatctcccaggcttaggtgatcttcccacctcagccaccagagtagctgggactacaggtgtatgccaccatgtccatctaattttttgtacttttttttttttttttttaatagggttggggttttgccatattgctgtggctgttctcaaactcctgggttcaagcaatctgcctgtcttggcctctgaaagtgctgggattacaggtgtgagccaccacatctggccaaattttctctttttgactcagttttagtaatttttatttctgggaatttgtccattttttttctaagtttattgtattcctttataatccttttaatttctgtaaggtttatagagatgtcctctctttcatttctattctktggacaccctgtggaggtagaaaataacccttccaattaacaggtaggatgtctatgctggaagcactccacacgccaacaaaatttgagagaaattttattattcacccaagagacttctggggatggtagggttagtacaagtgggtctggcctgccttgagttagacagagggagtgggttatgcctttataatggctagggtgctggsgagttcccatgtgyaggctgaggatcggcaaaacttgaattttcccctggygccaaaggcaaggcacatgtggacttccttattagcctgatcagttgtgggttcaaaaggggagaagtgaggtgaggcttaacataagtcagtggtcagacatcaaaaatttaaaaaatggagtgagactccttattacaattcttsactttggaattaaaagaaaatttccttgttctttcttttcttcagattgtataacgttaattcatctaccttcaaatttattggttatttcttctgccagcttaattctcctcttgagcttctctagtgaatttttcatttcagttgttgtctttccacttgaaatttccatttggctcttttttataatttctctttgttaatattctgtttgctgagtcattgtcatcatagtttcctttattttaaaagtgttttcttctagttctttgaacatatttataatagctgctttgaagtcctattgtctaacttcaaaatctaggctcccctagagatagcttttrttgaaacttgtccccttccatgtatgggtcacgcttttctgattctttgcatatcttatgaaaactggatatttctgataatatattctgtattctgatttccttctccccagagttagaggtggttgctctttttgtttgtttagtgacttggctggactaattaattccatggagtctgtttctccatggagtgtgtgtgtgtgactgctgatgtctctgcttagctcatcctttcttgtttttatttttcagtatggctgtcaagtatttgcctcctgggtcagcgtatcttagtggtcagcctatgattggtcagaggttgtgtttaaattccttgaaacaacgagcttccctttgtcattggtttttgtgaggcttggagaatgcattcaaagttcagaaagtctgcctgggttttactttctccatttgcaaggcctcatctttttccaggaatgagcagcttgctgtggccctaacatttctttccttcatgtttgcagtcttgtgcatgtggacagtcttccagaccagcaggaaaaaatagatttttatcaaggcccagtctggctgtctcattccttagtctccacgttggtctgctgatctgttgcttgcgctgactggcattgcaaactcaagttagctgtaatattggctttccctccttttttgcccttgaaatcactttttgacaacacctatgggcatggaattcttctccaaattaatttagctccctctggcagtggagcttcctgtcatcacagcttgtcctaccctggtagcttctgtaccaaggaattgggagcgagtgtgggatgataggagccccaggctaaaacaccacactcttcactgttcttaccaagattcagtagattttcttggaccagcacttctcaaatttgttgtaatgtttttgatcaatatcaagatctttaaatagttttagcaatgtcagttttattgttgctttaggggttaatatttgtcaaactcctcattcaaccgtctggatatcctttcccctgccccctccctttctctctatctttcatctctgtgtgtctccctgtctctgtctctcatttttgaacatttaaattttattcaaactgaaatttattttggaatatgttatgaagtagggatgtattggttatttttttaaaatggtattaagtagtgtcttaatactacttgttgattaatccatgtacttcttactgatttgtaatataaatggtttatttttctaatctcattgagatttattttaattttgccctctttttttttcttaatcaatagtcatcttttgcttgtttttcccatcttttgctttccattggctcatctttttctctctctaaacctgtctttggactttatctctttgagtttccttcgctattcggcttcatacattccatttgctctgatactcgtaagtactaaggctaggctaagacaagtgagatgcataaggcacaaaaattctaggaagctctcactcctgggtcctgcaagtgtgggattagtactcatagaactttgcgttttcaaattttgcaccctaagtgcctggcttgccccattgtagtcctggccctgccactcatgcttctcactagtatatatttgttgtaacctgacttctgtcccaaataggcttcatttattccaatttttgagcctttgctatgtactctgcattgtgctaggttttggggaatacaraggttctcaagacaccgtttatttcacccagaagccttcttcagatttgcccttagtgaggtctagtgccttttccccattcctcatccttcctgccttcttgtaccatgtgacattattgaccgctattgcctgttcatcctaatgtcagcccagctcttaagaatgtataactatttccatggtaggacaccttttctagggaccagtgggctgttgggcagtgtatcagtggccctcattctggaagttagtaaggattggaaactggcccgtgctttcaatgtgtcagggtaggagtgcccagggacttgttcaggcttaatgggcctttataactatgtcacagggaatagaagatttcttgtttgttcattttctttctttttttttttttgagaaggagttttgttcttgttgcccaggctggagagcaatggcacaatctcagctcactgcaacctctgcctcccaggttcaagcagttctccaccttagcctcctaagtagctgggaktacaggcgtgcaccaccacgcacactaattttgtgtttttttagtagagacagggtttctctatgttggtcaggctggtctcgaactcccraacacaggtggtctgcccgccttggcctcccaaagtgctgggattacaggcgtgagccactgtgcctgcctgtttgttcatttttcttttttgagacagagtctcactctgttgcccaggctggagtgcacagtctcggctcactgctacctctgcctcctgggttcaagcaattcttgtgcctcagcctcctgagtagttgggattacaggcgcatgccacctygcccagctaattttttgtatttctagtagacaccgggtttcgccatgttgcccagtctggtcttgaactcctgagctcaggcagtctgcccgccttggcctcccaaagtgttaggactacaggcgtgagccacgatgcccagccattgtttgttcattttctacttagcattttatatactcagaatctttccatctccttctagtgctttggtacccaaatgtggcctttactgcctgcctagctgtccagcttattcttgccaattttgttttctcagtcctgcgttcttcccccattctttgctgacttgtttttaaagtagtttcctggtatgaccctgctctgcttagtgttctcattgcttgttcatgaaaacaaactcatccattcatttatggagcagcttttgagcacctattctatcctaggtgctgtgggagctgcyagagttacaatgacaaacccaatcaaacattccttgtctccctgagctaaagagacaagttaggtgttactcacacaaactgggataactgctgtgaaggaaagatacagatgcagctgatctagggacactggaattgaaatctgtccccttgtctcacttacctggcagtaactccccttcattttgaacttctgcctgaatcaggattgacatgtagtgccccattttcaattccagcgcttgtttttgggttgctggcagtttgctctcgactcctcgccccaaccaaggctgccgcgtttgttttcttagtcactagtggtagcataccctgatcatggatctgtcctcacttgggagctcttttctcttttttttcttaatgcctgcctctgttgattcttttcctacatcttcattagcttctttgttgtattttatacttctttacatttcctaaaagttgccctaacccagattttgtcagggtaagagtgcccaggacttctacagggataataggccttcacaatgatgtcacrgggaagggaatgttgcttgttcgttccttgtcctatgccctcctctgtatctgcgtaccctttcttggcaatcttatccattcttgaacactccgtgttaccatctttatgcaaatgactggctaacttctctctctcttttgctcctgttttcaagtatttggtggattgccccatgtggaggcatataatactccaagtagaattcatcatcttctctaactttaccaactcccagtctcctacctagaaatctcacacaaccactcccaccttgctcacttccagacatgcctcgttgctagatggtgccactttgtcctgtgtaataccatggtaagggcctcttcttttcagtgtcctgaactcaagttcgggtcttcctttcctttcacctgtctgtcctgattttctcctaagatgcatctgctgctagtatctgtcaagtccagatgactctgagtcctgtaccaggttaatttttcctgaaacaattctaatctgttgtttttctcttctgctcattcatgctttgaaaactccctagtgcttttgaaaaactggcctagttttttagaccttccaacttgttttaatttccttgccactgcctcccttcatataggctggactctatccaaatggaattaattttgcgagaactcgcctgtattttctgtttgcgcctctatttttatttccttttgccaatagtatgctttcctcacactcttagttctttaaaatctctcctaaagtactctcaggtttcctgacctggagatactctttctctcctgtcatctgtacatttatccacattttaaaaaaacatagtgcttaccacttatccttcattctgtctagtgtagtgccctgaagaaatatgtgtgaaattaacgagtggataaaagcatttctgtattaagccctcagacagtcttgactcctccatctgcctttcccattcccttgctgtttatataaggccatctctttctctcccttctttcaactggattggctttatctgtgaatctctttatctttccctaagtggcctattatcctttgtctccattgcttttcttctgctgagttagtattaatttcaatttaaagagaaattacatcattttggtgaaggacgtgtgtgggaaatatagaggaaatggaagctagtgttcagaatgacatcttgattcattttgtgggaactcaggctgcccacaaaaatttcaaatatagacttgactcctgggctggtggccagcagagactagaaagtagaagttgtgatgacatgttcagcatccaggtggaaggccaggggccagctgcagggccccacattccagcctgctgatcctggcagctgctcttatattccttagatacagctgtttgagcttctgatgagacagctggtttgaggtgatggcaggtaagagtaggggaagagacgtctaattacagtattgctgtgttttgaaagcatgtgaatcatctggggctccctgcatagtttgggacgtcaagttgtgacaatgaattaggttttgttggtggattctaaggaattgacttacttggtttcatagaggtatatcatttgtccggagttggacttagtaaatgccacatattgagccccagtttagtacctattccattacagcttttagattctagatctttattatcacttttcaaaactatatttctttatatttttgtgcatttcacaagctgaatagaaccgcaggattccttatttttcacatcattgccccatttgtggagatgtttagttgaagtggcccaaagaagcagtctagtggtacctgtgagggtgaaggccttgaaaagaaacttgagacagatggtgtgcttgactaactgccccagagaatgtgatgccagaacccaggaggggcaccatgttgcctttgccattgaactactaaatttctgagaggacagaggaggctacagcttaaccgctctccaattaccaatctcttcttggtttcagcgaatgacaacagagctgctcaaggcgggaactctgagctaagcagtggaggtttctctggatctggagagaagagtgaccttggagccaataatgagccatcctgactacagaatgaacctccggyccctggggacccccagaggtagtaaaaggaaaatggagtctgcctgaataactggagaactgaaatgaaagtggaatgggtgtgaagtggaggctgtcttttaggactgagggctactataattcttttagtgacctgttaagtattctgtgtgatttattctagaattagatgtggtttcttgctgtcttaatttattgttgtattaagtacagctgtttaatttcctctagaaaagtggcaatcttttagtaatttctattttcaaaaagtctgtgtgtctataaatagcaaagaatactgaactcattattcagattatgttccatgcgtgttgttgtgctgatttaaaactcaagtctcatctgtgtatattttattcatgttttcttagccactctttcctttttgttattgttaaaaatcaccatcagggagtttcagtctcttgttggtctctttaaataataattgtaaaaaggtataatatctccagttttaaaaatacacagatgtttgaggaaagagttgattgctgcctcctgtttctaggtgtgtctgctgtggctggtccacatgacattggtgcttcgccaggtgacaaaaagtcaaagaacaggtccacacgagggaagaaaaagagcatatttgaaacttacatgtccaaggaggatgtttcagaaggcttgaagagaggaacactcatccaggtgcttaaaatctactggaaggctattctctgaatatgtagaatccaaaacaatctattaaactgtttcctgttctgtgctatatgctttcagagagacgatgatgtaacaggtgcagggctgttatgatggcataacagagatgatgaggtaacagattcttcttagaactacagtacatttagaggtaataagcaccacaagacaggaacaggaaaagtgctctgagatttgagaggagggaaccactatttcccattaggattgtctagagatgctttattggaagtgacatgtttgagccaggccatggattggtgcagtttgagtragtgaagataagagagagctttacaaatgtagggaccagtgtgagctactacaatagaagtgagaaattgggtttggatatatgaaacattgaatagttcagtttttctggagcatgtggatgctgaacgacrgagaaaaatggatgaggttggaaaggaagcagtaaacaacaatagacagtatttgttgagtgctttatactttacaaactatgtttacaagctagttcagtggtttggctgaacaaatgtttatggagcatccattgtgagccaggaacagttatggttagaataagtgtgcagcatgggtgcctttgacatggaggtagacaagattgccttgctgtacttcagcttgcagcccagtggtrggaggcagtcatgtgaacagatgatttggggataaaatggcaagtgctcagataaaagggtgaccagggtatatggcaaaatattggggggaaatggggaaactgtgtaggctgaggttctggagaggcttcctggagttggtgaccctcgtggtaggtattgagggtctagtttgggcctatcagatgagtgatatgtgtgtgggaggtatggagaggcagtggcgctaacgaaaacatgaacttgtgaaacaacatggagtatggcagcttaggcctccttgggcataaactatcaggcaggtagtaggctggggagggaggcagggccacatattctgtgaattaagtctatttcataatactttcattagtatagaaatattgccatgtgctacctggctcacttgaaaatgctgtgttccattttctcttattctgagagcccagcttctgtatttgtgtttttggctgaagatctaaccaatttacagatgctgtcatcttctcttcctttttgtcccctccctccctccctccctctctccctccctccctccctcccttccttccttccttcacctttctttacctttctgtatttatctgtggtcaagtgcacacgtgcacaagaaagaagaaagaaaactatcttttaaaaaatgagttggtttttctgattcttggagtactcttggtggttttaatttattatttatttatttattttttgagaaagtctcactctgttgcccaggctggagtgcagtacaatcttggctcactgcagcctctgcctcctggattcaagcgattcttgtgcctcagcctcccaagtagctaggattacagaaggtaaaaattagtcatgccatcatgcctggctaatttttgtatttttagtagagatggggtttcaccatgttggccaggctggtcttcaactcctgacctcaagtgatcctcctgccttagcctcccaaagtgctgggattacaggcatgagccaccacacccagccctattggtgtttcttttttttaaagctttccctggatttatttgacaaggcctctcttaggagagatgaagctgcatttggatgttagtccattcattaatccattcatttgctcttcattgttcagcccatatcccaaacaccattttatctgtaagtttcttggcccttctcttgtttcacataggaggacccattgtgcctttccattcttatcctcctgcactctcctccaggaacactctcctccattcaccctgagccttccagtcttttcctctaaaaactgttcttcttgatgtctctgtgactttgtgcatgctgttcctggtgcttggaatgctttctcctgctgccttgatgtaatggtgcttaccttttaagtccgtgcctaaatgttacccactttgagaagcctcattttaattctccaagtagagttggctgttagtgttttcctgtagttgacttctttgttttccctttattctaaacttaacaccatttcttggcttttatgtttcccccagatagactgttcatgtccttgatggcagggtcatgtcttgttccagaagttagctcagtgcctggcatttgactgttgcttaatacatttatattgaataaatacttacttactgactgaataaaggatccagatactgtcttttgaagaagagttgggggaacttcagttgttagaacttgaaagaaaactagcctagaattttggttatagaattatacctgtctagagataaggagaggacagcgaaggagaggacagcgttctgcagtgatattagcttcagctcccttttagtttttgcttttgaagcaactcgttgctgatactcaaacaaaacaaaacaaaaatctgatcaatattaacaactctaattcccaggagtttgtaagtgattccttctggcctgtgacatcatgggactctgcagccagggcctcccccctacatatgagaacagttgttctttgcagatgggaaaaggaatgggttccagatatgaggtcaccgtgtgaaatatacaacactgtaaataagattttcataggcagagaaacagagtccatctgctgcttgatataaactttatgtgtgcaagccttgcggggtaaggtaaaaggccagacaagaaaggatgttttaatgctgatggagaaaattaagtgtattagagatacttagaaacttttgttaactttagtattcaaactcatctcttttgacctcttttttttctccctatccagagaagaaacttttatcgagagattgaagggggatttaaaaaaaaacaggagtagagtatttttattttgttttcaataccttaactaatacttcgacatttcattagtattttttcctatgtggggaggagaccacagtttcctctttccagtgtttgaaatggcaataacagtaacacatggtcatgtacatgtagttttgaagtttaaaaaaaaataataaattctcacatcaaaaaatgtatttcatttctctcttcataggtagagtactgagaggttgttataggagatgttgggagagattagagtaggggatagacaagcctggaaggggctccagtttagggtgatgatcaaggtgacatgggtatgaacatggcagaattggctgtttcagatcccaaaagatgctttggctaaaggaagttcaggctaagcctccagagctgtcttagtcatgatgtcggagttcctcttagaatagaatattggtgtgaagttgttattggctctctgaaaaatcctagtccaggaagatagaggtcaggatgaactagtttctgggaccttcaccatttgttaagagtgaaatcaagcagggtgtggtggctcacgcctgtaatcccagcactttagaaggctagggtgggaagattgcttgaggccagaagtttaagaccagcctgggcaacatagtgagacttcatctgtacaaaataaaaatcagccaggcatggtgatgtgcacctgtattcctagctactgggaaggctgaggcaggaggatcgcttgagtcctggagttggaggctatggtaggtaagtcatgatcatgccattgtgctccagcctgggcaacagagtgagaccctgtctctctctctttttttttttttttaaagagtaaaatcagctggagaatacttggggatgaattaaagatgaggggaatagatgtgatgttacagtggaatgcccagccacttagaagggagagatgatattcataacattaatactgggggtgatgagagaactttagctctgcaggcattaattaattaattactgcaacaaatgtttcttgacttcttactcagtgccaagcgtataccagtgagcaagttaggcaagtcactggggaggtaaggaaaaacaactaaagaaaaagagaagaaattatagactgatcattgctaataaagaaaygggaagggtgagagagaataattagagagagcctctttagtagggtcgttagggaaagcctctgtgagatgatctgtgggttatctgagatgagaatgaatcagccaattgaagaattaggagaagaacataggtggatagctcagctagtagaacagcagcaagcagaagaaggcttggtgtttctgagaaatgagaaggaagcctgttggaacattgtgagcaaagggagttayattatgggacaagtggagagttaggcagcagccaagtcatgtagggtctctaggctatgctggagaattggattttgttcaaagagcagcaggaagtcactgaaggctcttaagcaggggaagaaaataatctgtttcatgctttgaacatacctctctgggaattgtgagatgaatagagtggaagctgagaggccactcaggaaggtatcaaagtaaaccaggtcagaaaacatggagatgggaacaagaaagtggcagtaaagatggagaggagtggatggatggatggatgtggggctagaactgatgtgacatggtgatggatgagatatggaaggtgaggcagagggaggcatccctgatgcttgctgagttttcgaattgagcagctggctggatgatgttgccattaaccaagacagagaaaagcaagggttggaatgtggtgctgagtttttgggcaagagggatagctggcatacatgagtgaasaggccctggtggtgaccgtggcaaacagagagagaggctgttcacagtagttgagagcatggagtctggagccagattgtctggccttgaatgtgatgtgaaagcgggcaattttcttaacctctcagtgcctcagtttcctcatctgtaaaagcaaggataatagtatctacctcatagggttgttgtgagggttaaattagctgatcgatataaagctcttcaaagagtgtgtggcatgtcgtatgcctgcataagtggcacttgagttttgtttttattactataagaggagcgtctgttattcaggttaggtggttgctgtcatttggagaaccctgtccaaagctgttagatcttatgatttttcaagaatatctggaaatatgtattttatatgtgtgaaattcctcagttttaaggactctcaaacaagccaaatacagtatgtttgtgattgccagttagactgatttagcccagttgtgtggtgtttttctatggtactgtttagctcctggggtataggaagggagaaagcagatagctggggttagttgagagtagagaatcaagggtaaaatcttcaaggtcttttgctggttgagtatcagagtaagaggtttgttcaggatttgcaacgttaatagataatgataggccatggcaattaggtggctagagaagggagtaaacagtgggaggacaatgaatggtgacaatgtggtcacagctttgggctggagatcttagtgaaatcgaagagttgttgaagtggggtttctaccataagtagacagaagattgccatcggaaagtgcgatatttgaattttttttttttttgaggtagtgtcattagtagtgctgacgggatccaggctgtgaacgtgggagagagtaggtgggttaggggagcaaatggtagttagagtgacaggctagggttgcttggtcttcaacatggatgtgaagtcccaaaaatatatatagtagtgaggatagagaggaaggcagtgaactgctagtcaaaatgttagtgaattggagctttgacccacctgtaaatttgaggatgacagcaccaaagaggtgctaatgatatgaactttaaaggatctgggatttttgaaagagaatggaggaaaaaatacttttaaagtcatgatggggaagcaaagagaccttcctcccttggtccctgagatacatgggttatgagagataaaatagactccctctgagagcactcgagagaagcaatcacttcagggaacagccaggtttcaattaaggcgaagaatcaggagcatctggagaagagatggaggctatgggatcctcactgatcaagtttcaggcctagggaagtgctttaggaagaagacaggagatgggcaattgggtcaggttaggggatggctatagaaatgaaagccttggacttttgtaggtgagtaagacgagatctgtgggaagtatcctttagttaaatgaccatttgtttttgacagacttaaatgccagctgcttctctcaggctataggaacaactctggtctgctgcggagctctgtgggagtttctgctttcttagtgtgatctgcattccctcaagggctctgtttccgaggtccagttcttcagagttatgctccagtcaaatttgcaaatgctgttgtggaaccaggtttctattcttccttgtgtgcttttgtatatattgggaagtttgggatagagaatcaagggtaaaatcttcaaggtcttcttaacatcttttcttttaaatagagcctggatgcagccctgagcaacctgtctcttttccctgggcccagcctggcctgtctgagtgccctgcaattaaaggcattttcaaagctagaggcattctgatctctgtacttgttcatatgctaaccattctttgagcgacaagggatgatagaagaataggaattgaaaaaaaaacttaggccagagaaaagcatctggaatcagaaaatgaaattgttagacatttaatttcaatgaattgacttttgtttgtttggagtctcttcccctcacgagactgtaagctctgtgatggtagagactgtctgttgttagtctcccttgtaccccgtcatttgacatggtgcctgccatgctattcgttaggaaatatttgttgagtgagtggatgaatatttaggttaaatgtaagttttttccctccttccctcaacaagaaacagctgtctagaagtggatttactgtgacactctttaacaagggactggccttggggagctttgccaaccttatctcctggtccctccctcttctgtgctaggcagagttatcgcacaatggagaagagttagtgagtgccctcttaaccacttttgctaacacagtgtcctctactatacttctcatctgatttatttgcaaattttgctcttctgtaaaggactaggtcagataccatctctgaagcctcttctggtgccctcgctgtgaaagtaagctgtacctctgctttatgttttcctttaaaatagggattgagcttagttaatcattatcttctccatcagtgtgtctcagggtcttgaatatagtccatactcaataattaattgttgaattaaggactgaatgatcrtttgtagtagtctatttgagtgttcatgatattgtaaactgtggcatggacatttgtaatttaaacatggtacagtgcagaaggaaattattttctgctttattttatgccgttgcctgttttgttaattatgtatctttgagtctttaaacgttttagggagaaatgttatttaaaacactttctcaagatatcctttgagtctggctgttagaaaaataactgcttccatccatgtgttccagtggcctgagactacagctggaacctggggagccttacagcttcctgcaagagcctgaaatactgaactgctattgaagaggcccccacctgcacccctgtgtgtaaatagaagcagaccytgatttggtgctggaataacatgaagttgaaggcagactgggtggcctggctgttggagccaggattccagtttgcattaagagctggttatggaccattttgaattattgactcattcagctctgcagaggggccagagtaaaaaataatgcatccagtttcataaggctcagtatctagcttggaaatcaacctgtaccactttgaaaattgtcacagaaacaagcaattgtggaaaggtcttggaactgggagaaaaaaaaggcctttatatagtgaggcacaatccctaggtaatcttgtttgtaaagtcaaggtttaaatttgargactagcatataggggcatctaaaatcctaatagttgccactttcccactctacgccaagctctgttgttccttacctttgcttgttcacaccaaggtgccagtctaagctttctgtttttgatagaaccctctatttcagatatcaacataaattgtgtttcctgcatttaatgaatakttcttatacatctaacttgttttctcaagtgacctgtttaattttaaaactttttattggagaataacatacgtggaaaaatcgtaaatatatagctagattttcacaaactttattttttgttttaaagggtgtattgagaattaatccaaagaagtttcatgaagccttcattccttccccggtaagttcaataaatttataataaactttatgtcacatttaattttttagatctgctccgaaactgaaatcatatattctaactaaaaagcagagtagtgaaacaaaattgacgatgggcaaagatttgtttcaaatttaaataaactaaattttcttttggttaacaaccccttctgtcagtcttaaaatcgcatgccaaatgaaagggatggcatttgttacaaggctgcaaagagcagctggacccaggcagactacccaccagttcgtgtaactggacgcccttggtttatggcttaaaaggatttatggttttttccaccgatttaagttaatctttcctaaacaaatatgctatctactttggatctactgcatgagctaatctgaacatttgtccaaaaataacgtgtaatgctttttttttttggtgggggtcagagtttctcacttcactttcgtgcaggtgataaaactttgtacaaggctctttaccgttgggtctttagaccctttcttacatttatgactcattttaagaggctctttccacttaaatcaagtttacactgatatatagttagcagcagttctctagagaaggtttgattgagcaaagctgggagagcaatattcttaaattcctgacctaacttttccaggataccataaatagaatagctatagaatcacagatttttcacagtgaaagagaccaaacttatgcttatagatgacgaaatgggatacatatattttagttaacatattttattattttaaatgacagtaagtttagtgagaatataggttcagtcatgtactttataaatgtcattattacagattgagcaccccttatttgaaacacttgggaccagaggtattttggatttagaatttttttttaaatattggaatatttacattacatacttacactgaaatccaaaatgctccagtgagcatttcctttgaatgtcatgtcagtgcccaaagagttttatattttggaacatttcagattttatatgctcaagtgatattattgttattgttacaataaccttatgacctattctcaagctcagtttagtccttttcccctgccttctgaaatccagggactcacattgcatccaagttcgagtcttacccattgaattagataaaaggtatcactgacattcacattattctttctcagtcatattctgttcctgttagagaaaatggcatatgtcttgaccctgaaacttgagttgtaaaattgggttgtagaattgagggtcagttttgaggtggtaacttggctgcacgaacagttctcacatgtacgagaagtgcagtttacatatgtgttagtttccagaatttgctcataagcttaaatttacatccaggaatcataaaaactacccagaaaatctcttaggaaggtgctgtgttggagacggataaaccatctctcagtacgtcctgcataaccaatgtttttttcccataagaaagcatgactgtttcttcaagaatataccagttgaaggaacttgattgtattaggagccctcatgtatgaaagacacagatttttaagcatgaaaatgtcactcaatgtagtaagttcatcctgagagacagctgggaactgggtatattcagacctcttgtctcttgtgcatgcttaagtttgctcttattgattggtgtgataaggggaactacagcattttgaaaattttgctgcttcctctcttccctgataacacagtatagaatttccctaagttaaatccctattgggttggctcctagcaagtgtgggacctaggacagaagtasaaaagaaggcacacataccttaaatcaaatattgaaaagttagacatcaaaaccaccatcaagtaaaatatattattctatatattccatgtaggaatagacaaagtctattccttgccaaatacaccttcatatacctgagttcaaatgtagaattctcagatttcttgcagctccatgctgaaacatggcttcacctctggcttgcccctcttcccttctcagtgctagctccctgtccccttgtgattcccttgcattcagtgagggccctttcatgcccaaacgtgggcatcctatcccatstatctaagctatgtccatacccattagaaatacctgccattgagtggaggcacccccrttgagggggtgcctccggtggtggggaagtgcctgtatatgtcctggaggtaggctttgggctgcttattttagggaagcacatccatttggccctgtgaactccttgtctgatggggagggttgtggctggagcagggccagagcagaggtcctatggttcctgcaagctaaattcaagtaatttacatctgcaaatgatgtatctccatggtgtaacctggcttgttaaagaaagctaagacacaaaagcaaaaggtggtgatgttttaaaagctcatagttgttctcttacttaaaattgtattcttactacgtcatacttagaaatttttagacagttgcgatattaggattggcttatttctatgcctcttttattcttttatttggctcctgcttgagtcgtaatattgtctcagagaaaaacaattcacctctaggtaattaagaatagatcataagagctaccaatcaaggcccattgcargtgattgtatacactctggttttggacacgggaacagtcctacattcttgctttgtgggtttcagtttccagaagcattatagaaagcaactgaagagggcaataatagaggcaacagattactcatacataaagcccataaccacctgtggtctagatttctgagtatacatatctcatatccatgtcaaatatgaacttgtatgaactggaaacttgacttaggttcattatagcttctactgatagaaagttgattttcattttatgacatataaaatgtatgggatgaaaaatgcctgcagatagactgggaagtagaatgtcagaaccagggcctaattgttaccggcttaagctaggagcataaaggcaggaatgaatatgaaagatgaggcttttgctctgacagtaggacatacagtggcttcctcatttgtaaaatgaggggatggagtaaatgttgtctaatgttgctcacattctaaagtttttagagagacaaaaatagagatttgtttaaactatttaggtttgctcttactsactctaaaaatggttgtgaatttacacaatgtcatttgctatgctaaaatatctccctaggtaaagaggtgaagaacagtgaattagtcagcaggtataaaataatactttgttttaggggaacttgacttaggttcattataatttctactgacagaaagttggttttcatttcatgacacatctaaactatacaggatgagtaacttatgtgtacttgctagttttgtgaggttctcaataaaaatgaaatacagaatgtgagtaaaatcatgtgactttcaagcaaaccaagataaaatgatattattgtcatgccttttatcctatttggggataggataaagaggagaaaattgatcagatggaaaaacctgtcatttttaaaaagcacagtttctattctgaattatgtaaatctaagaagctctctaactttttaatgcatcgtgtcataggaggcaccctttgtacagtggtggaatttatttttggtccaaagggaactgttccatcaatgaaggatgctgtgaccatcgtggcatatttgtgttgtcctccttcccccagtcctctaagtctttagtctgattaccacatgcccacctcccaattccattatttttcttccagggaagttcattatctatttttctttcttttttttctattatctattctttctgatgggtggaacaagacttctggcattcaaacaaagagctgaaatctttggcctaaaaaagtggttaaaagagatgactcaaacttttaatattgagcagttcccaagcttagtgtctttaaagtaagagattcagcgacagatcagtcttctgaatgaatcaaggaagagctgagtatgatgcagtagctatagatttttgtgttgtctgaggttcaactcagccctgctttccttggtttcctgggattgtaaggtgacagtactatcatcccatcaatctgaaatctctgcgctgccaaagggtggttgtatctgcttataatagaggcatttcattgcatatgtttgacacgtgagtatgggttagggtgacctccaaacagcccatttttcattccaaggaggtctgagagatcctattgctgtttgaattgcaaaaggcagcaatagatggtgatgtgccttatttcagttgttctctctctgtttactggctgtctcttccacatctctctgagaagcttgtcaagaggtcaactacagtcatgttttgtggctaacacagtagcttttcctcagggactagggtggggtcagttttggcagagtgtgcaagccacagctgtcaacccatagctaaactggaaattgagcagaaaaactattctagaagatctctaatggtttgtaagtggaagctgtaaaaaatgctgagtgactaaaatctgcccctccccctttttttgatttggtgattttgggatgctaattttaactttaaccaaaatttcatagtaatcaccttcagtccattgagtgttatgttcaatcttatctatgtcaagtgtctctattagaaaaatttgagtgatgatgttccagactcttttgctgtcacctcctgtaagaaaaaatgttttacttctttcttattctctgaaaaagagcacatcatataaacttgtagagaatagaaggataagagtacatgtttgttggtgaaacattttgaaaatatttcattttctcaggaaccctgactgctggtgaaggcctgcatttccttggctatcttgtttatttaaaattacaaagtaatttggcttactaagaagactctggcacctatttaagccaagaagttgacacctggggagttcactggggagccacattatttaaagtgggttgtttctgagtgagtgagtgaggatgaaagtgtctgtatcttgtgttcattgtctggagttcacggtggtcctaagtcagcaaggtcggtagagtgtgaagatcrcgtgatgaatctcatattacatctctttccttctcttctttgccctctacttaggtctccrtaaaaacaaccacaatttagtctctctgccactttcttggggggcattatgaatttgctggtttcctcctagagagtccaaatcttagagccattgctactcctgccctcagtttgttttcttgggggagattatatgttgttcctcttctgttctcttgcataccttctatttttatactttcttgatatgtaaaaaattcatttagtattaaaaaggtatcagcatgctttatttaatacgaaaaaggataacctaagaataacttgctgttttctatttcagttatgaaagcaggcaatctgttttttgctttatgtgtttttaagctcactattgttttatttctttttccaacctaggatggtgatcgagacatttttattgatggggttgttgctcgtaatagagccttaaatggggatctggtggtcgtgaaactgcttcccgaggagcattggaaggtgagttaagttttccctttctaattacagatttcttagggtctttcacattccatggtgcaccaacaaggcatcataaactggaggagtcacagaccccttaggcgctgtgataagatggggtgtaatcttggaagcatgctaccgaatgcttggaacttagaagcatctgctgggcagattgctaattaaatgagttctccttgctctctctctagtgatccatcctccctgtcacatgccttgcactggtttttggtattcttttgaataaatactgagggcccattcaaacttggtatgtattattttcctacatcctatgcagggagaactagaaagacaaagccatggagacagtggcagtccccacgcatttctgctgcctccagtggaaaacccaggcaatacatgtggagttctgttggcccagtttggtgattgggtgccttggcagataaaaatagttggtctgtgtttttataaatcagggatttagtggcagaagaaaatgtttttaatatgagagtattttgggtttcrgtctccatctatgtctgttaattggaaaggaagatatggttttagttttgatggttttaaataaaagtaaggatcaggcattggaatgatgtgtggtgacaatatctttgaattgtcatgtaggattggagacatgtatctaagtctgaatttgtcttcatatcatttgttttatttggcttttttgttttatttatttgaagaatttggtgtcttcttcaataatacgtgttatagatgtatctaagtctgaatttgtcttcatatcatttgttttatttggcttttttgttttatttatttgaagaatttggtgtcttcttcaataatacgtgttatagagtagtgactaaaagtatgggcttttaggctaggctacttagatttgaatctcatctctgccattcatctctataactttgagtgaattgtacaacctttctgctgcaaatgtctcatctgtaaaatgggaataatcatggtacctacttcataggtttgtcatgaaaattaaatgagaatacatgtaaaaattttagaatactgcctaaaaatcttagaatggcaggagctcaagaaatgttcttactagcttttccaaaaaagatgtgatgtgaggagtaccattttatctcagagctttgttgaggcatacattctttttaatctgatacagctaaagtaattgagttatagctatatgccaggtattcatagggtgtagggaattcagtaatgagtagtattgacatagttcttgctctcatggagcttatagtttaatggggagtacaggtaggaaaagacagatactgatcacacttatacaaatttaagtgtaatttttattagtgctgtgaagtgcagggtttctttttttttttttttatattataccctaaattctgggatacatgtgccgaatgagcaggtttgttacataggtatacatgtgccatggtggtttgctgcacccattaacccatcatctatattaggtatttcttctaatgctatccctccccttgtccgcacccaccgacaagccccattgtatgtgatgttcccctcactgtgcccatatgttctcattgttcacctcccacttatgagtgagaacatgtggtgtctggttttctgttcctrtgttagtttgctgagaatgatggtttccagcttcatccatgtccctgcaaaggacataaactcattcttttttatggctgcatagtattccatggtgtatatgtgccacattttctttatccagtctaacattgataggcatttgagttggttccaagtctttgctattatgaatagtgctacaataaacatatgtgtgcatgtgtgcatgtgtctttacagtagaatgatttataatcctttgggtatatacacagtagtgggattgccgggtcaaatggtatttctagttctagatccttgaagaatcaccacactgtcttccacaatggttgaactaatttacactcctgccaacagtgtaaaagcatttctatttctccatatcctctccagcatcggttgtttcctgactttttagtgatctccattctaactggcgtgagataatatctcattgtggttttgatttgcatttctctaatgaccagtgttgatgacctttttttatatgtctgttggccacataaatgtcttcttttgaaaagtgtctgttcatatcctttgcccactttttgatggtttgttttcttgtaaatttgtttaagttccttgtagattctggatattatccctttgtcagatggatagaytgcaaaaattttttcccattctgtaggttgcctgttcactctgatgatagtttcttttgctgtgcagaagctctttagtttaattagatcccatttgtccattttggtttttgttgcaattgctttttgtgttttagtcatacagtctttgcccatgcttatgtcctgaatggtattgcctaggttttcttctagggtttttatggttttaggtcttacatataaacatttaatccatcttgagttaatttttgtataaggggtccagttttagttttctacatatggctagctagttttcccagcaccatttattaagtagggaatcctttccccattgcttgtttttgtcaggtttgtcaaagatcagatggttgtagatgtgtggtgttatttctgaggcctatattctgtcctattggtctatatatctgttttggtaccagtagcatgctgtttttattactgtagccttgtagtatagtttgaagtcaggtagcgtgatgcctccagctttattgtttttgcttaggattgtcttggctatatgggctcttttttggttccatatgaaatttaaagttttttctaattctgtgaagaaagtcaatggtagcttgcttggaatagcattgaatctaaattactttgggcactatggccattttcacaatattgattcttcctatctatgagcatggaatatttttccatttgtgtcctctctttccttgagcagtcgtttgtagttctccttgaagaggtccttcagatcccttgtaagttgtattcgtaggtactttattctctttgtagcaattgtgaatgggagtttgctcatgatttggcactccattattggtgtataggaacgcttgtgatttttgcacattaattttgtattctgagactttgctgaagttgcttatcaacttaaggagattttgggctgagacattggggttttctaaatatacartcatgtcatctgcaaacagagataatttgacttcctctcttcctgtttgwataccctttatttctttcacttgcctgattgccctggccagaacttccagtactacgttgaatagagtgctgagagagggcatccttgtcttgtgccggttttcaaaggaaatgcttccagcttttgcccattcagtatgatattggctatgggtttgtcataaatagctcttactattttgagctatgttccaatacctagtttattgagtgtttttagcataaaggggtgttgaattttgtcaaaggccttttctgcatctattgagataatcatgtggtttttgtcatcggttctgtttatgtgatggattacatttattgatttgaatatattgaaccagccttgcatcccagggatgaagccaacttgatcgtgktggataagctttttgatgtgctgctggatttggtttgctagtattttattgaggattttcacattgatgttcatcagggatgttggcctgaaattttctttttttgttgtgtctctgctgggttttggtatcaggatgatgctggcctcataaaatgagttggggaggagtctctctttttctgttgtatggaatactttcagaaggaatgataccagctcctctttgtacctctggtagaattcggctgtgaatccatctggtcctgggcctttttttggttggtaggctattaattactggctcaatttcagaacttattattggtctattcagggatttgacttcttcctggtttagtcttgggagggtgtttgggaagaatttacccatttcttctagattttctagtttatttgtgtagaggtgtttatagtattctctgatggtagtttgtatttctgtgggatcagtggtgatctcccctttatcattttctaatgcgtctatttgattcttctctcttttcttcttcattaggctgtctactggtctatctattttgttaatgttttcaaaaaaccagctcctggactcattgawttttttgaatggtttttcatgtctctatctccttcagttctgctccgaacttagttatttcttgtcttctgctaacttttgaatttgtttactcttgcttctctagttcatttaattgtgatgttagggtgttgattttaaatttttccygctttctcctgtgggcatttagtgctataaatttccttctaaagactgctttagctgtatcccagagattctggtacattgtgtctttgttctcattggtttcaaagaacttatttatttctgccttaatttcattatttacccagtagtcattcaggagcaggttgttcagtttccatgtagttgtgggttttgagtgagtttattaatcctgaattctaatttgattgtactgtggtctgagagactatttgttaagatttccattgttttgcatttgctgagaagtgttttacttccaattatgtggtcagttttagaataagtgtgatgtggtactgagaagaatgtatattttgttgatttggggtggagagttctgtaaatgactattaggtcctcttgatccagagctgagttcaagtcctgaatatccttgttaattttttgtcttgttgattattgtctgttattgacagtgtctttttgtcttgtctattattgacagtggggtgttaaagtctcccactattattgtgtgggagtctaagtctctttataggtctctaagagcttgctttatgaatctgggtgctcctgtattgggtgcatgtatatttaggatatttagctcttctttttgcattgatccttttgccattatgtaatgcccttctttgtcttttttgatctttgttggtttaaagtctgttttatcagagactaggattgcatcccctgcttttttttgctttccatttgcttggtaaatattcctccatccctttatattgagcctatgtgtgtctctgcacgtgagatggctctcctaaatacagtacactgatgggtcttgactctttatccaatttgccagcctgtgccttttaattgggggatttagcccatttacatttaagtttaatattgttttgtgtgaatttgatcctgtcattacgatgctagctggttattttgcccattagttgatgcagtttcttcatagtgtcaatgatctttacattttggtttgtttttttgcagtggctggtaccagtttttcctttccatatttagtgcttccttcaggagctcttgtaaggcaagcctggtgctgacagaatccctcaggatttgcatgtctgtaaaggattttatttctccttcacttatgaagctttgtttggctggatatgaattctgggttgaaaattcttttctttaagaatgttgaatattggccctcactctcttctggcttgtagggtttctgcagagagatccactgttagtctgatgggcttccctttgtgggtaacccaacctttctctctggctgcccttaacattttttcctagatttcaacctttttccttaatttcaacttttccttcatttctgacaatatgtgtcttggggttgcctttctcgaggagtatctttatgatgttctctgtatttcctgaatttgaatgttggcctgtcttgctaggttggggaagttctggataatatcctgaagtgtgttttccaacttggttccattctccctgtcactttcaggtacatcaatcaaacgtaggtttggtcttttcacatagtcccatatttcttggaggctttgttagttccttttcattcttttttctctaatcttgtcttcatgctttattttattaagttgatcttcagtccctgatatcctttcttctactcgatcaattcatctactgatacttgtatatgcttcacgaagttctcatgctgtgttttttagctctatctagtcatttatgttcttctctaaactggttattctagtgagcaattcctctaaccttttatcaatgttcttagctttcttgcattgagttagaacatgctcctttagctcggaggagtttgttattacccactttctgaagcctacttctgccagttcgtcaaactcattctccgtccagttttgttctcttgctggcaaggagtcgtgatcctttggagagaagaggcattctggtttttggaattttcagcctttttgtactggtttttcctcatctttgtggatttatttacccttggtctttcctgttggtgacctttggatggagtttttgtgtggtggtcctttttgttgatgttgatgctattgctttctgtttgttagttcttcttctaacagtcaggcccctcttctgcaggtctgctggagtttgctggaggtccactccagaccctgtttgcttgggtatcatcagtggaggctgcagaacagcaaagattgctgcctcctccttcctctggaagcttcatcccagagaggcacccgccagatgccagctggagctctcctgtatgaggtgtctgttgacccctgctgggaggcgtctccctgtcaggaggcacaggggtctgggacccacttgaggaggcaatctgaggaggcaatctgtcccttagcagagctagagcgctgtgctgggagatctgctgctctcttcagagctggcaggcaggaatgtttaagtctgctgaagctgcacccacatccgccccttcccccaggtgctctgtcccagggagatgggagttttacctataagcccctgactggggctgctgcctttctttcagagatgccctatccagagagaaggactctagagaggtagtctggctacaggggctttgcggtgctgyggtgggctccgcccagcttgaacttcctggtggctttgtttacactgtgaggggaaaaccgcctacttaagcctcmgtaatggcagacgcccctccccaccaagctcaagtgtcccaggtcgacttcagactgctatgctggcagcaagaatttcaaaccagtggatcttagcttgctgggctccatgagggtgggatccgctgagctagaccacttggctctctggcttcaaccccttttccagcggggtgaacagttctctctcactggtataccaggagtcactggggtacgaaaaaaaactcctgcagctagctcggtgtctgcccaaacgtctgcccagttttgtacttgaaacccagggcccttgtggtataggcacccgagggaatctcctggtctgagggttgtgaagactgtgggaaaagcataatatctgggccagagtgcaatgttcctcacagcacagtccctcatggcttcccttggctaggggtgggagttccctgactccttgcacttcctgggtgaggtaacgccccaccctgctttggcttgccctccgtgggctgcacccactggctaaccagtcccagtgagatgaaccaggtacctcagttggaaatgcagaaatcaccagccttctgcgttggtctcactgggagctgcaggcagaagctgttcctatttgaccattttgtctgggaatcctcttttttctttttgaattacagtgaactttcctagttcagatccacctcccagcttcatccccagttgctgccaattgttgatacagtgtcttccctggattccttgaaagcatagctaaaggctggcttcatgttttaggtatataggttgatttaggtcactttgttttcttgaatctagcatagtgttgaccaggtccaagaagataagagaagtgtattagggccaggtcaaaccaaaggaaacattcctagaggtcatttgagggagtaaagaggcagcattgtaatgaagaagagccaaagaaagaacagaaagatggtggcatcttttaccctaagacatgagagtggtagaatagggagaaacagaagaatggttagcaagttgggtgggtgtagagcagaccagagcaggtataggtgctgactggttgtacagtaggcatggaaagcatacagtagagcaccagtggagctctacagaagtggatgagattgcttaaaagagcaaggccaagtaacctggcatcctttctgcccttggacccaggcaagagatggccaaaataagcaaacatatgaataagtaagtctgttgcattgttttccttgtttctcaccccctttattgataagacagtcagcacagcctttcctgtgctgttagaagtgctcttgcttcaggcaggaagtctaagacgatggggtagattgttaaccaaagcttgggggtaggttgagggttaaagtgtttgctgttgttgaggtctggaggaaaggtttgggacttgagcattcttgtttctgccttggtgccttttttcttggacaaaaatcagtacctcttttaaaactgaatacaacaaagttgtgtttctccctagaggcctaattttatgaatttctaggtcataaaattagcttagtgctacctacttctacaaactgttatctgtttaactagctcctacagaggggctgctggctgcctctgaagctttcagaagatttgaaatgtagagggtagccccgggttccttattattttgtttctgtggagctcccgagagtcttcacagtggctgcctgacaattgctttttgtgttaacgtcagccccattaggtacatctctcaggcctcattagttagaatatttcacagcttcttattctgaagtgggggagttctgttgtccttagcccacctgtgatagttgttggtgacagggtcaaagtagggagaagagaatattcggactgtcatcaagaatccctgacgtctagaatataaacatctccaaacatactggccaattgtcttacaggtttgttagtacaaaagcatattgttatcaaaggaatctgtagtcactagcgtgagccaatgtggattaattggattattcatctttgcttctttctgcttgtcgtgctcactcctcttgggtatgtaaactacagggcttttggggttttagaaaaacaacagttcttttcgttgtagtagtaaatagtcaatttatttcacagcatgatttttggcaaaatagatagctgtatgagtatcaagctgtgaggcaataatgaaaaataatttactcttatataactcttcgaagttcagattcttccacatttttactgtctccttatactttttattacagacatctaatgaaagatagttgaggggcaaatgatagtttcttcctttgtcaattggaatattaaggtactgtgagagtgactggtttgaggactgagagtttttggcagaaccagggatagaatccagatctcttgacttacagcttaatatccttttcctcagattttcaaagtggagatcatgtccscaaatggttaggaagcattgatcctgacagttctgcctggagcagttcaaggtacccagtggcttctcatctaccattcatcctgccctgtgttagattctagagatacaaactagaataggtcacaggctttgcgcttaaggagttcataggctggttgggaagagaatggaaacaattatggtacggtttgcaggatggaaacagaaataccacactgttatgggagaaacaaactctatttgaaagaattggggaagacttcatagaggttacattagagctaaggtttaaaggatgggaatagagaaagagagaggatttgttttatttcaagatgagaatgatttggcaagagaggattgtgaaaattttaggtttcagggaggcatgtatggatcaaagctttctcttcctggtatactattggctgagtacagcagcccctctactaactctcccagacattggaagaagtagkgggctcctaactcttctgaggatcctgccctcaagggaaactgaaagggggaccatggcacccttttacagagactcttcgaacattgctgccagctcagtaaactcttgtttgccatttatttgatctttgccctgcttcttccattctctttccctttttttcatcaagttcacctcccataaccatagcccatacttgtctttcatcttttggttaaccataatgagtttattctattattttccttctcttaataccccaatacggtaaattacaaatatgcatatataaaccctgtgggtgctaataacaactgctaacttactggtgcttaccgtgtaccaggtactgtgtttagtgtcttgtactattcttttgtatgctgttgtctgtatcccaattttgtgaatgagaaaactggggctcggtttaagcctcttatttagggcacatataactaaggagtaacagagtggtattcagatttacatctcctggcttcatgatcatactgttatttgttattccagagatatcaaggagagagttatttgatctgtatacagatattgtcagtgtcataataattagcacacatttagaaaataaaaatatatgcttcagcattaggtaataggtaatatcttaagttgccatcatggataaacaaggtgactatcagttgacataactaaaagcttagtgttagtctcagaaaataaacaattcagaaaatattagttagaattctagtggttgtatcttaggactggagaggtatgataggacattatggagacaggtgttgagaatgagggagaaccttaacaaatacttgccctagacagtggagatgacccaacaataaaagtcacatcagagttgcagcttgctgttcaaggcagagtcaaaggggttacagacctagatgccattcctgactcaatggcagcagatcccaaattcatagtatttggatgcacaggtattcaaaaggcaggtaggcagttgtcatataggaggaagggggtcctactggggcttrgggacagggtgctaagttcagaaatgtgggactgttttgttataagcagagtggtagaagcagccactgggctaggagtcaaggataggatttgatcctcaagctgggagaattgactagagccatactgggagcaaaaaccaaagcagaggaccagccttgagagccagaattctgaaactttttttggttgtaccaaaggagtcttgggagcccagaattcagctgtggtattttagttgatgcagccatagtgattggctcagagaaaataagagtaaaagaggctgacagagcatattaaaattacactcaatcggcaaaacaatgtgatacagaacctaactagcaaaagagatggatttcaagtgaaacttttactcattgaaactgttaaaaatatagtaagacaggcaggaatatgcttgatacattgatacctgttggaaacctataatgctagggactcatttatttctcccacatgtatttgtgcagcacctgcagggtactgagaggataaagtgggaataaatcagtcaagtactttgttagcaagtctaaatttctctcaagacaggattatttcacttaacttacagcagagcaaagtctatacatgatttaaggaagtagcgttcagcaagggaataatagatgtataggtgagtgtttcggaagagattggcactgaaagaaagaaataacttgagtctgaaagaataaaggaagtgttgataggagtggctactcttgttctaaattaaacaaatgcagaaatcaaagtacacatttaatccctaattttcaatggttgtttcaaaccttcttatggtcacatgaaattggtctagtacagtaaagtgtttcctttgacaactaacttttccttcaagtgattgttttaaagttttgtgttccaagttcttctttaaatgtgcacccatcatactagattatatttaatccaatctcttatataaccactatcattttggattgttctcaattccagtggaattagaatttcttagaactgtttggtttcttggcctgcatggcaggcctgaaaaagacttggaaggtactcagtgatgggagggcaagatcttcggagcctccatcaagagtagtatggtaggtaaggtatatccactaacatgatcagattttcccaagattgttatatamacagcctatttttaacagtcatcttttttcttcattactgccagctctgcatcaaatacttcaggttcttgcctgctttaaacatgccctcagatctttgtaattcaagttgaaatgtctgaaataaggagtgtattgtttaaggatagagtagcttatttatgctggaaactcctaattaatatttcagggttattttctagaaaactaatttatttctccttaaccccatggagatgttttggtgaaaaccacattcattgtaacgaaagagttaatgtaggtaaatacttagggcagtgatggcacattctaagtgcttgagagatgtcaggtattactactattagtcttagaaatgaggaccaagaacatggttcagccacaacacatgataattcagatttactttttctagctcttgagtgtaccacatttactgacagaagacaaaatattcacataaaatgttggtgttttagtatgtgtttctttgagtcatctgcactgctgagcaactgtatgataggcaaggttatattctggaatgatgtggtttgtttcttactcatgctcactgcccatcaagatcatctaggggctttgctttgcattatctttactccaaagctcaggatggatggaacatagaccatcagaagtgctccctttctctgtggcagaaggaaacagagccaaggagggccacatttaaaatgcccctgtccagaagtgatggagtcacttctgctcatagctcattggcaagaacgagtcacctgacactacccaaccacaagaggaccaggaagtgcaatcctaccaaatgtctgcaagtagggatataacaggatgtatctggtaaactgtgctaatgactctcacgctggactaattagattcattatgtgttgcattcctgactagccatctgaaaagagtatgacactggtcatggcaaaagcttcaatattgcttactacaaatatatccccactactgaaagtagaattcagaaggaacctgaaaatgttctagatggtctgtctataagatcaccctcagtcatgtaattattgctttaaagtacagggtatgataacaagtaaatttgttgattttggaattaagttaatggtgtagtagtacagtttttgtaagtgaaaggcaaggaaattatattttaaggaaatgtactgacatttacttggtaatatttataaaccacaaagagtttatcattcatagtagtattgtgatactgctgcttgctactgctattgttcaaattctcattttttattaaaatttcaatagatttctcttatgtcttatagaactagtaatgatttagggcatatacatagctgtcttatgaatttaggcagtattatgtacaaaggcattggagacttctgaaaatatggtagatttggaaaactacagatattattttatttttgagcttaaaatgcaagctagggatataaagtggcaagagatgaggccaggctggcagatggagaggcaggggtggtggtggtggtgtcacattgtgaaaggtctggtaagagagttcagttggtatgtagtcactggggagtcactgaatgattttgaggaaggtgacatagtcacattgtatattaaatatcattgtggtggtaaggtgtgaaggacttaaagcaaaggggcaaaattggtgggagactgaaaagaaaattatgtgttgagagtcccagtgagagatgaagtcacagtgcccatgtggaatacaaggaggagatgaatttaagactgtttaataagctagaacatggtgactggatataggaagaagctggggtgactcctacatgttaggctctggtaattgaggggatggtggcaccctttgccaagatggaatttaggaaggggggcaagggcagaagttagggtaggatgataaacttgtttcgacatgttgagtttgagatgcctagggacatataggtatacaaagctagaaggcatttagatattaggatttagagttcagaagtcagagcttggctagaggtagagatttgggtgacctcaattgcacttgaataaatggacattttatagagagataaaagaagacctctgaggatagagcctgaggaataccaaaacttaatgggtatgcagaagaagaggatccaggaaaggatgctgtggagtggtggccagcaaggaaggaggaacagcagcagggaatgatgtgccagaaaccaagttgaggaactcctgacctcgtgatccgcctgcctcagcytcccaaaatgctgggattacaggtgtgagtcactgctcccagacaagtagagttgttatttattgcatgtaatggatgctttagtgtatgggggcttaattctcctgggaactcaggttgagaaaatcggtctagtggagcaataatagagtggtaagtgcagtgatagagaaaaaatcctgggtgtcatgggagtgtgcaatagggatacccagctagcttgcagagggccagggaatgctttctggaaaggaattttgggaagaaatgaagtctgaatggaaaactgttaaccatgtgaagagtagaaaaggcttgatggaaaagagagactaaccttctctaagtccaacaagttttaaaaatatggctagaggggagattttgagaacagtggtgagcagaggtaagttcttgtcagctttgttggggatgtttcttactgggcactgacaaaggcagatcacagacagtcagacccagtgtcttactggtctcagttttgtgctgctgtaacaaaacacctgaaactgggtgatttataaagaatagacatttattttctcatagttctggaggctgggaagtcaaagatcaaggcactggcaggttcaactgcctggtraaggctgcattctccagagggaaggaatgctgtgtcctcacatggcagaaagtggaacagcaagtgggcctaccactgtgtgaagcctcttttataagggcctaaatcccattcatgagggaggagccctcatgatatcatcaccttttaaaggcctcacttttttttttttttttttttttgagatagagtctcgctctgttgcccaggctggagtgcagtggtgcgatctcggctcactgcaacctccacctcctgggttcaagcaattcccttgcctcagcctcctgagtagctgggattagaggtacctgccaccacgcccagctaatttttgtatttttagtagaggtggggtttcaccatgttgaccaggctggtctcgaacccctgaactcaggtgatccacctgcctcggcctcccaaagtgctgggattacaggcgtgagccaccgcgcatggccattcacttcttaataccataacactggcgacacctgaattttggaggggacacattcaaaccatattacccagtctcactggatgaatgctatctaagatgagctggacactgtcacaacacttggtgcgtggtcatttcttttycttgaaattatgatgcactatcttcagtctgtaagcaccatagtctcaggtcctttgggataagatatggtgtcttttgaaagggaggaggttgagcctggatacattggctttgggccttctgcctgtcctctctaatacatacttggtgttgggtgtggttttccttttggggtaatttggattattgccactcaaagtgtggtccatgtactaacggcatggaagaatctcaggcccaagacccactgaatgagaatttgcattttaatgagatccctaagtgatttgtatgagcattatattttgagaagcatcgatgtggatgagtaggtcttctttgctcttaagataaagattagtttgtcactatagagaaaggaggaacatatatatgacattattatagctggtcctggaggagagtcatgggtgcagtgtaacttgttggggcttcagaggtttcaagtaattataacgaattctttgttttagactctagatccctcactgtaaccccttcacscccttctccagttaggtctaacaattgaaggatatattgttcttgtagttggaaaaaacccactgactagtttattgaaaagagatagattttagaatatcttgagttatttttatcctactaagtgttctgtaacccacctccttcccattttggggagatcattttatttatttattattattatttttaagatggggtcttgctgtattgtccaggctggtctygaaccctaggttcaaggtgtcctcctgccttggcttcccaaaatgctgggattacaggcatgagccaccatgcccagccttggagatcatcttaatattaagttcagacaatcatgtcatttctgtcttactggactccagcttcactcatttttttctggaaggggattacctgttacattatgtttaatacatgtttgtcacagctttctgttggagacccacttttagtagttttcagcrtgttttgaagtctttttgacaagtaaatttacagaatattgcaaagttatttcaatataaagagtttttgtatcttgaaacacttcaaagtgcaaagcacctcctcataacttgagtgttactgttttccatttggcctatgctactgcaagatcatagactagtgcatcaggtgggattagaaagaaaaagaagatagctgctctttctgtagttgatagtgtaaagaactacaagaggaaaatgtaaagaaaagcagtctgaaactttaaatgactatatttgaggtttatcagaaagatgaactgttttttaataaatgaggcacctgtattatcaaaatgatttattatttgtaattggaattgtcttttcattcagacactttctttggtaagaggtggttagattatgccaaaaatgattaaaattttaaaaaattgagataaaattcacataacatagaattcaccattttgataatttaaagtatacagttttgtggttttagtatatttacaatgttgtgcagccatcacaccatctaattccagaatattattcacccccaaaagaatccctgtgcccattaagcagtagtcactctctgttccccttcttcccagatgctggtaaccactaatctgttttctgtctgtatggattttcttactctagacatttcatataaatagaattgtacaatatttgtcgttttgtgtttgtgttccttcacttagcataatgttttcagagttcttccacgttgtagcacatatcagtacttcatttctttttgtggcagaataacattccatgtgtggacatgccacattttgttatcctttcatcagttgatgaacatttgggttgtatctactttctggctattatgctgttgtgaacattcatgcacaagattttatataagcacatgttttcacttcttttgagtatttgtctaggagtgaagttattgggtsatgtggtgactccatgtttaacaaaaatgatttttaaaatatagatcactaaaagatactgtccccaaacttttctgaccccaaaggaattagtcttatgaatgtatacacaagttaagccctaaaattacttgttttctttggcatttagtccactatatgagcagcagctgtgttgctcccgtttcttttcacacgcaagtcaccattttggacatttcaaaatggagcccctctatctcctagattgtgaatttgatggccctttgctgtgttattttatgagttacttctggagcatcaaaagttctctcttaaaaaaaaatcttgtgggcacttaataagagttgtaggccgggcgcggtggctcacgcctgtaatcccagcactttgggaggccgaggcgggtggatcatgaggtcaggagatcgagaccatcctggctaacacggtgaaaccttgtctctattaaaaatataaaaaattagccaggtgtggcggggtgcgcctgtagtcccagctactcgggaggctgagacagaagaatggcgtgaacctgggaggtggagcttgcagtgagcccagacgcgccactgcactccagcctgggcgatagagcaagactccctctcaaaaaaaaaaaaagagttgtatatgcccgaaatatgtttgttgctgttgttgaaggaggttgtttattatcattgttgttatagtgtgttattgaatatagtttaggaactcaagtagcttagttacctaatgtaaatactattgtcctatcagcatttcatgtctttgctatatagttctaaaaatgcttatatactacaaatatacaagcatttcatattatatacacacatatagtttrgtgttcatagtatatatagacacatagtttagtattgtaagctttttacgtaccataaacatctcagtttattataattgtttcaggcacatggaatgcattcagtgaatgaataaattgtcacttttaatgactacataatatttccttgagtggatgttatatattttaaataacttccctatgttataggacattttaattttttatgatttttaaaatttaaataatattatggagaagatctttaaatatatgactttttatttcttaagattgttttctttaaattcttaaagaggaattactaggtcaaaagataagaaattattcaaatggattctttgtactaccaggttgctgtggtctgaatgtatccccagaattcatgtgttagaaacataatctcaaatgcaccagcgttgggagatgtggggtcttttgggaggtgtttaggtcatgagggtagagccctactgaatggattataaataaaagggcttgcaggagtgggttttcgtactcttgcccttctgccttccgacttctaccttctgtccacatgatgacacagcaagaaagccctcaccagatgctggtggcttaatcttggacttccgagcctccagaactggggagacagtctggacacagggaaaacctgagacacaggtttttatccattctttaattaartaattaaaagagatcaaatttgcatttatttctttaacttttactttttggttttccatttcatcctgtgaccttgttgatattttgaatgttggttttatcatcttcagtattggttgtttcttatatatgttatttctacatttgacayttygcsttgggcacagtgccacttctgtgtgcctaagctggatttgtgtcctcatggtatttaggggcatagacatatttctgtaagcgtacacatccttattttgtgcagacttttctttcatgctcctgtttcttttccttttgcttgtagccagactttttggactcagtgtctatttctcactagtgatgtggattctgcagtttgttttctaccctagctttctactaaagttgttcttttcatggttgtcactgatttcctacctgttttcattggttgtttgcttagttttcattttcctggagctttctacagtgatttaagaccattgatttcccttttctttgtaataacctctcattagctccatgtcccagttctgtttcttctattcagtatgtttgttttttattgatttctctcttttctccacttagttgtagacatttcttttttctttttttgagacggagtctcgctctgtcgcccaggctgtagtgcaatggcgtgattttggctcactgcaacctctgccttccgggttcaagtgattctcctgcctcagcctcctgagtagctgggattataggtgcaccaccatgcccagctaatctttgtattttttttttttttttagtagacagggtttcatcatgttggccaggctctcgaactcctcacctcaggtgttccacccacctcggcctcccaaagtgttgggattacaggcgtgagccactgcacccggccggttgtagacatttcttaagcttctagcctatgtcctcttttctttctttacgttcttttccagatagatctttatgtagtttcctagtttaaactgacacttttatttggaggatttccaccatccatttgtttattcgacattttttgattggcagctttgtacgtggcactggcatgggtcctggagatacaaagatgaacacactttgactaccctcgatgaatttggagaccattgcagaaatcagatgtgtrgacagagagccacattgctgtgtgatatgttttaacagagatctgagcacagagatgaaggaggtgtatggagtgggagacaatggctctgcctaagggaacttaaatttcttgtaagagtgacatttcaattgcagttggaaaggagagtttgcgaaatgaaaattaaggggagaggagaatatttaaggcaagggaactgtatgtttaaaggaagagacgcatgcattcctcccaagtctcaactggtaagggcaggggttttgtcttattttatttatattcatggtgttaaggtaacaacaggaacctttcaagttagattggggtctccattctagatcctttgtttactggctctgggctttaggggcctcacctataaatggtataagtttttgataaggattaatgaactgtaatcacctaaaatagtgtctgacaagtagtaggtacttttaaaacgtgagttttattctttcattttccttctatctagccacctgttaactggcatacagtaggcagggaatagatactttttgaacaatttcagtgtttccaaacwtcagaaaaaggataggattgtttattgtgatgtaaacttttacgactaggaagaccaaaaacacaggatgaattcactaaatttagtgatcttacaaagcagaaacttgttttcttaagaactagcttcggctgggcgcggtggctcacgcctgtaatcccagcactttgggaggccgaggcgggcrgatcacgaggtcaggagatcgagaccatcccggctaaaacggtgaaacmccgtctctactaaaaatacaaaaaattagccgggcgtagtggcgggcgcctgtagtcccagctacttgggaggctgaggcaggagaatggcgtgaacccgggaggcggagcttgcagtgagccgagatcccaccactgcactccagcctgggcgacagagcgagactccgtctcaaaaaaaaaaaaaaaaaaaaaaaaaaaagaactagctttgattggaagagaaaacaaagcaatgaatcaagtcagctctgctggatgtttgcacatgggagctggataattctccccccaaatataaaagattggatatattgtttataaatgtcttctataatgtttcttcattaatgtttatagttgattttggatttgttttcatcttaatttccttttttttttttgagatggagtttccttctgtcacccaggctggagtgcagtggtgcgattttggctcactgcaacctccgtctcctggttcaagcagttctcctgcctcagcctcccaagtagctgggattacagatgcccatcaccatgtctggctaattttttgtatttttagtagagacggggttttgccgtgttggtcaggctggtctcgaactcctgacctcaggtgatccacctgcctcggcttcccaaaatgttgggattacaggcgtgagccactgtgcccagcctccttcttaatttctttttgtttacagagttaaataaacttgattgtagatttcagttgatccaggatggtctgttttctccttggggtctcaaatacagtagtttaactatttctcagttagtaccagctcagactggagtcttttaggtttttattaccaattacattcttattcctttgtatgacataaaggccttccatgacctgccctcttccctgttgggcaactctgtttcctttagcatacccttaatcttgggcaccacatacagaaggtctttgaatgcaccatgcagctgcatgcttacattttctttttatacacagtttcctttgcttgcagttctctgcatgtgtctcttcctctttcccctactcatctttctagactggtttcacaggttgttgcctctgggaagcctttccttcatatctttacaattgttattcaatgctgctgttttattgaattgaaaaatctttagatgtttttcacatattatagggccctttatattgtctctgttcacattccagtggcatttgatgttttcttctgggtggtatttgcatgacctactatgaatgactcccactatgtgatgatgttaaaaatggcaagtgccgtttgttgttgagtacctgttctgcgttaggcactcttctagggctttgataacactgcatgttgcagacatagatttctttgtgagatggactggactatagtatttctttttcattcttcatgtgcttatttctaaatagaccagagcatattgatttaattcatgaggagacaatgtctggtaacagataaaaagtcagttcctaaatccaaagaaaatgagtaaattcttgaayttgagtttttgtttatacaacatctaaacttcatyttcaaggtacttctgttaagactatacagaatttagaaaatatgttggtgtcagttttattattatgttaaaagtagtttaaaagtatactttttaaaataaaagcaaggagaatacttacatgtctaaaaggaaacactgtttttctatactactctcaacactgctgacatcaactgcatggattttccacaccaaccagttctcctcagactctaattgggtgtcctacattttaactcaatcctgacactacgcagagttagcacagaccccacaggttaagggcttataccacaagactgccctctacccaggtgccagtcacagtccgggctgcctgtacttctgactggctattatttggggattcccatggccccctcaggttcagtaatttgctataatggtttataaaactcagggaagcattgacttatgtttaccagtttattataaaggatattgcaaaggatgcagatgaatagccagatgaagaggtacatagtgcctctatggaggggcatggagctgccacaccctcttgaagtcctccaccctaccagcacctctctgtgtttaccaaccctgaagctttctgaactcatttatggtttttatggaggccacattacacagggatgattgattaaatcattggccattgaactcaatctccagcccctcgtccctttctggaggtcagggggtggggctgaaagttccaaccctctaatcacatgattcattctctggcagctggccccatcctccaagagtccctcattagcataaactgaggtatgttcgaaaagggcttattaccaataacaaaagatgctcctctcaccccatcactaagaaaattcctggggtttttaggagctctgtattaggaactggggatgaagaacacatttatattttttaattatatcataatatgacagtatcagtgtttcttttcttcttcagtgatgcgacaattcattcaacaaatattattttggacatctactgtgtaccagataagagaacatatcattgaatataacatagtgtactgtcctcatggaacatacagaaagtttatattgtctgttaggccaaaatggatccatagaggcttattttcaaaacctattctgtctttatttaagaaccatagaagatttaaataatactttaacatttggaaactattttaacaaatgcaaaagccagaagtgatttttacctttttctaatttgaaaggaaaatttttttcttttagcagagacctctaaattcattagggaaagaacaaccaaccagccatagtattayatgcttaaagtatgatttttgtcatagaaccagtaagttaaatggctttcctaaactcattcatttgagacttatttgacacctttttgaggtatgaaaagtccagtgtcaaatggctttacaagtgaatgcttccaaatgtttaaaacagataaataacaccaatcttacaaaactattctggagaacagaaaaatgttttttgaggccagtatgcccttgatatcaaaacgtgacaaagataatacaatataagaaaattgtaggcaaagtccttttataaacacagatacaaatatcctaaataaaataatagaaaattgaatccatagatatgttgtagggataatagattatgaacaggtaaggtttattccactaatgtaagattggaggattactattcaaaactcaaataaggtaattcatcacgttaccagaagaaaggaaaaatctatggttactctagtttctgtagaaaagtacttgatgaaattaaagatccattcatgataagtactagtaatagaagaagactttcatctgataaaggctccttacaaaagccgacagtaaacatcatagctaatgttgaaacagtgaaagctttccctctgataatgggaatgaagcgaggatgctcactatcattacttttattccatgttatatcgtagactgtagttaatgcgataaagcaagaaaaaagacatgaggattgggaaagtaagacagtactcatcattttcagactagttgattgtatacatggaraatttaaaaggctgctacatacaaagtcagcctacaaaaattatttgcatttctatatatcaacaacaaagaaaaaatgttacccttatgttagcatgtaaaaaagagttttcaagacctcaacattgcaaacgacacaatgttatcaaaagatgctaaagatgctctaactaaatggtcatggactgtaaaattcattatggtaaaaatattaattcttcccaaattgattgctgcatttaacagaatccaagccaacattccagcaatcgttgttgtgtgtgtgtggaaagtaacaagctgattttaaaaatagatggcaatgtgaaggaccaaaataaccaagacaattttgaagtacaaagctggagttcttaaactgcccaacatcaagrcttaccataagtgagcacagttacaatagtttggtatttagtataaggagagacacataagctagtgaatgggatagaaagtccagaaatagactcatatatggtcacttgattatgataaagggaacagtgcastgcagtggaggaaagaatgctcttttcaacaagtggtgcaaggctgattggctacccacttggagaaaaaggatgttgacctttatttcataccatgcacaaaaatcaattctaggtagataaaataactaaatgtgaaaggtagaacagtaaagcttttcaaggaaaacataataccatattttcatgactttaggggcaccaaaaatttcttaaacaggacacaaaaaataggccaggcgtgatgccttatacctgtaatcccagcactttgggaggctgaggcaggcagatcacctgaggtcaggagttggagaccagcctggccaacatggtgaaaccccgtttctactaaaaatacgaaaattagctgggcctggtggtgtgtgcctgtagtcacagctactcaggaggctgaggcaggacaatcgcttgaacttgggaggtggaggtgagctgagatcatgccactgcactccagactgggtgacagagcaagactccatctcaaaacaacaacaacaacaacaacaacaacaaacaaaaaacagtaaccatgaaggagaaaaattaatagattggagtacattaaagaactcttcaaaaataccacaaggaaagtaaatattaatctgcacagtgggagaagatgtatgcaaccagatatatattcaacaaacgactcctaactagaatttataaagaattccctgacataattgagaaaaaaaacagacaacaaatagaaaaatgggagaatgactgatacaggctcttcacaaaaagctatccaaatggccaatgcacttaggaaaagattctcagctttatcagttatcagggaaacacaaatcaaaaccataatgcagtactacttcacatctccctgaagggctgaaataaataggtaaacaatattaagagttggtgaggtgtagagtaactggaattctcatatactgctagtgggaatgtcagtgtagctgcttcagaaaactgcttggcatcatttgctaaagctgctgctatcttgtggcccagaattttcattcccaggtatatgcccaacagtaatgggtacatttgtacaccaaaaaaatatgtctaggaatcttcctaggaatattatataaaatagccccaaactggaaaccatccaaatctcaatagtagaatggatgtattgtggtatgtatatacaatagaatactgtacagcagagagaatggatcaactacagcaatgtgcagcaattaagtatgaatctaatggccaaacacaaaactgcttatggttctacttataagcataaaactatagttttatcaggatattatttgtctttgaaggggcaataattgaaaggggcaagagaagaacgtcttgagtattggttctggcaggcagaattgtaaggtggccctcaagattctcctccttaaatacacacaccatgtttaattccatcatcttgagtgtgggtgggacctgcgaatatggtggggtatccttcctatgagcaagtcgcaattttgggcagaggtaaagggcttttgcagatgttattgaagtccctaatcagctgactttaagttaaccgtaagagagattatctttgtggacctgacctcatcaggtgagccctttaaaatagcatccaggagttagagatttttcttgctgcccttgaagaaacaaactgccaggagttttatagctccaagaaaacaaattttgccgacagccacccaggcttccgttaggaccctaatcgttaaaccatagatgagatagcagccccagctgacaaacatcttgattacagccttgagrtcaccactagagaacccagctaagccataccgagatactcgacccacagaagttgtaagataataaatgtgtcttgttttaaactgctaagtttgtggtaggtttttgtgtcgcatagaaaactgacatactagtgagactctgtttcctcatcttggttagtgttgtatgtgggcattgtttattttgtaaaaattcatcatattatgcatttatgatttgtgtatttttctatatgtaattaaaaatgagttatattacccaaaagtgtttactttaaaacaggagaaaaattaatggcattcctctgtatttcctttaaccagtacacaaatataatcaaatagttatgttgtaattgcaatggttagtttgaacacaagcagatttggtcacaaaattaagttaaatatttcttcccataagtgaactcaccctctgtccttgctctcattgacatgtcacttatattttacatctcctcctccatggtttcactatgagagtggtagagtcttgaagctggagatgtaatgatttttcactttcttatttcaaaattgatgaaactggaatgtgcctcaagttaagtattgagtagcaaagccagtacctcggttcttgacggctctaattctgtgcccatttcctcttatcatagagcttctggaatccaaaggaaatacaagcattttggtagtggttatgtcatagatgtagtttgatctgggtggagggtactgagtgggggagtaacattctctgtttctaattagaactagtaagctaattttgcaggttgtggaaggtgtaggggaaagrttcggttagccacaaatgtctactatgcctaacctttatgctatgtactgggatgtyactgtcaccaattatctttgttttgagtttctgtttaccacacatggcttcctgcgcttccaaattttcccagactcatactgctttacagccttcctctttcttgagtcaataaggagttagataatgcccctacttttcccagtgtgcacacagaactggactctgtatatgtgtgagtgggtgtaaatccaggtttaagtcagtcattgatcgtgaagaatccttgggttaaggtttctactgattgaaatcctgactcagtgatgtaagaaagcattgcagaattaaatgtaacaattatggcaggtagatgcatctaaacatgtttgattcataaagcatgtttttatttgtgcccattttcttaaatggttttataacttatgacttattttttttcttttttacatgctgatcctgagttcatagtcttgtattttggaaaagctagaaatattaaaatagtgcttctggggtaaagcatctgtcagtatttccattttggaatgcaatttcaaagggtttagaagtcagctgtaaaaatttgttcttggctgatattttgtatacaaaaagctctgcccaggataattttcagaagaattcttgcaacagcataaactgtaaggttatatggcagaaccagcttacattgaactcattttttatgcttctatcaaagtagggaaaagatgaaagcttttaaaatgattcaaataaaacaatatgaaatttgtattctagacttatatgcttagaaaattgttggttttaaaagatactctaccactgtactatcacaaggctcgccattggcttaactatcaaaaataatagcaccaccaaacccagcataagccctgaatcttaggtgacttcagaacaactctttttacaaattttttaaaaaataatttcaacttttattttagattccgggagtacatgtgcaggtttgttacctgactatattgtgtgatgctgaggtatggggtatgactgatcctgtcacccaagtattgaacatagtacccagtagtttttcaactcttgcccctatcccttccttcctcctctgggagtccccagtgtctgttgctgtctttatttccctgagtacccattgtttagcccccacttataagtgagaacatgtggtatttggttttttgttcctgagctaatttacttaggatagtggcctccarcttcattmatggtgctggaaaggacgtgatttcattcttttttaatggctgcatggtattccatggtatatgtgtaccacattttctttatccagtccaatattggactgggcacctaggttgattctatgtctttcctattgtgtatagtgctgcaatgaacatatgagtgcatgtatctttctggtagaacaatttattttcttttggatgtatacccagtagtggcattgctgagattttttttctatagagttgtttgaactccttatacattctggttgttaatcccttgtcagccatctgtaaagsgatatctgcgaaatagtttgcagatattttctccattttgtgggttgtctcctcactttctccattttgtgggtttttttccattttgtgggttgtctcttcattttgttgattgtttcctttgccgtgcagttttttaacttgatgtgatcccatttgtccgtttttgctttggtcgcctgtgcttgtagggtatcgctcaagaagtctttgcccactccaatgtcttggagagtttcttcagtgttttcttttagtagtttaatagtttgaggtcttagatttaagtttttaatccattttgatgtgatttttgtatatggcaaaagattgggctctaattttattcttctgcatttagataaccagttttcccagcaccatttattgaagaaagtgggttctctattctgttctctatgtgtctgtttttatgccagtatcatactgttttggttactatagctctgtagtataatttgaagtctggtagaatgtgacttttccagtttcgttccttttgctcaggatagctttggctattctggtcttttatggcttcatataaatttgaagatttttttctatttatatgaagaatatcattggtattttgttaggtattrcattgaatctatagattgctttgggtagtatggacattttaacattattaattcttccaaccaatgagcatggaatatctttccattttttgtgtgtctttttcaatttctatcatcagtgttttataatatttattgcagatgtcttttatttctttggttaagctaatttcaaggtatttaattttatttgtagctattataaatgtaattactttcttgatttatttttcagattgttctgtgttggcatagagaaatgctgctgtatgttgattttgtatcatgaaactttactgaaattgtttattagctctaatagttttttggtggtttttaggtttttccaaatataagatcatattatctgcaaacaagaatactttgacttcttcctttccaatttggataccctttgtttctttctcttgtctgattgctctagctaggacttcccgagcaacttatttaagaacagattttagcagctcattttgaaagcagcatttggggctgctcagggactgtgtaactctaaagagactcttttgtctctttttcctagttgatgaaaaatagctttctgtttgttacctggcttaggtgtcctcaaagaaagtaagaagggaaagcaaagacatgtttcttgcgtgattggagacttagtccgtgaagctggagagcttcttgttaatgtaactttcttcccaaatctttgggcaggtcttagcttgaaaagatcaaccacaatgaagataagctccctgcttttatgttattgtgagcacacgtacacgtatagttctactgcattttacagcttgtggccaggtttttttcttcttattgtctactttttcttcaacattcaatctcataagcagattgcctccaggataattttatatgtggcagccagtctagcctcagagttggcaataccttcctctattgtattacttctgacccatggaagtgcagttcatgtgcagagagcctacagggaacatttgaagtcttgttggtctgaaatgaaacatgactttatgtgaaatgtgaattagaaatgatgttgggttatatacagttactcagaaataaagtctccatggtggagaaggaactacctcattaaggacatgcttctttccctcaccactccttattcttcaaggtgctgatgctgtaccacacttgggcccaaacaaggttaaaacggcaacagccctttggtttataaagctaaacaacttttctttctttgtaaaagaaaacaacttctttagacagatatatttttttaaaattaggtcattacttattcagagatcataggaaatttgcttccagagtcatcctgttcagctacggggcgggctgggttggggggccgctatgccgagatgaaggaaagtcggccttggcttcagaggtggatgcatgttgctttctctggagtcatctcagctgagaggcagcttctccatccttgcctggtctagttttaggtggcttattctagagacaggcattcatgttgtcatgatccactagaagctcgaggctggaatcttaggtgtggaagtgatagtaggcctcttgaagggagagaaggcactaccacaccactgagtgaatgtttgaattcacagttcctggaaagtgggtatgtttagtatagagatgctctttgggaaagagcagattattttgcttctcagaggggtaatcaattactataattatttattgaagagtaatgtactactatcattattgttcaaactgcccctgatctgaccagtggtagccccccaagttgatctctgtgccatttggacatgtcctcatcgttctttgaacacttgtttatttcctggtgatgttcccacctcatcctgtaactttctctttgctatccctcgaatcagccattttttctaagactccctagttccttttaatggagatatccagactctcccaagccctcttaatgaacagaaactaggaaagacatgtatgtatctyccctccttccctcctttcttccttcctgccttcctatcagcctgcctgcgtgcctgccttacctatcttacctaccctatcttcatctatctatctgtgtctctctctcctttcccttccttcccttccttccttccttttcacatggatatctccaattctaacacaacaccatagggtttgttctggtttcccccttcccacatttgtaccccctttctttgacagtgagaaacctggctcttactgttcacattatatttacttttttgctcattcctktttgtaactaatctatttccattgcttgtcttctgtatcactaggtcacctgcttcactccaggcttcagtccttgctaggctcctgcttcctcactcagggcctggctccttgctcccacctccccatccccattgcaccatgttatttttgaacatggttcctttgaaagttggaggttctagcttttctatgtaaagtcctatagccagttgatcaatggcacttagtatacaagaacctcaactctacttgtgtttagaatgttataacatttctattttgatttctttcttgatggctatctttcttttaagcatcaagttgagaaaaaaagaaactgtgtatgtgtgcatgtgtgtatgtgcctgtgcgttttaaggtacatacgaatgacatttaaggccctccttggcaaggatgagctcattcttccttagtggattttttgttttttttgtgcctcttcagaagcttccagctgcagtgacacctgtctactttctgttctgcaaacatgcctacttcttgaactttttaaactatgacatcttttttcatcactatccattctcatgacctatgctgcattctgccatgttaattaagtctttccttcgtcatctcacaggaagcaagacactgccttcatttcctaaagcttataccatttgattgatgattgcttctgcttgaagatagttagggatgtgctttgtgggtgtacttatttctaggtgttgataggccaatactagcgatgtggttttcgaaaatgccttattaactgaagcgtcacctcactgtaagtgggagtaatttgatgcctaatagatgctctgcacattacaaaattttgataaatatttcttggattttaagttttatcagaataaaaaatatttgatacctttagatcataaccttggcttgtagtttgggtgtttttatggagttttgcacttttcctgtgtatagatgctgagtttgcttggctttggtataaaaaaaaatttatttggttcatatagtctttttgctcaggtttattgaagtataatttacatatagtaaaaaatcactccctttaagtgtccggttctatgaattaaaatcttgtgtaaccatcaccataatgaagatagaaaagcattctttactcccgaaaattcctttgtatcccttttaagtcaacatttcccctcatcccacagcccctgccaaccactgatctgttttgcatccctgtrgatttaccttttccagaatgtcatataaatggaataattttgagtctggcttttttctattagcgtgcgcatgtgaaatttatccatgttgttcactgttgccgactagtattccattgtatagatgtttcagagtttgtttacctcttcaccagttgaaggacattttggttgttttcagtttttgatgattaagaacaatgcccctgtgracactgctgtacacatcatcgtaagaacatatgcttttatttctcttkgttaagtaggtacctggatgtggaattgctggatcatatggtaagcatatgtttrtctttatacgaaattatgaagtggttttccaaagtagctgtaccatttctcactcccatgaaaaatatatgagagattcagtttctttacatcctcaccaccacatattataattatagccattctggtggatgtatagtgttatctcctttgttattgtttgttatattttgctttgaatttccctgatgacaaaatgatgctgagtattttttgtatttacacccattaatatatatgttattctctgatgtgtctgtgtaagtcttttatacatttttggctttcattttaatgaattgtaagagttctttatataatgtggacaaaagtcctttgctacacaaatttctgaagggtaccttttgcagagcagaagttttaaattatggtgaaatccaatttatcaaaatttttaatgagttatgcctttggtttcctatctaatatatctctgtctatcccaaagttgcaaagatttctccttttcttctttcttcttaaaattgtggtaagaacacttaacttgatctaccctcttaccaaagttttaagtgcatggtatttttaagtatgcatgatgctgtgcagcagatctctagaacttaattcattttatacaactggaactttatattcattgaccagcagctcccatttctttttccccccagctcctggcaaccaccattctactctgtttctgcaagtctctttttttttcttataaaaggtttatagtagtttgaattttcactttttggtctattgtccatttcaagttaatttttatatatagtgtgaagtgagggctgaatttcatctttctcctgtggatatctacttattttagcacatttgtttaaaagactcctttccctattgaattaccatgacatctttattgaaaatcaatttactatataaatgtgattctatttctaggctctatattctgttccattaatctatttatctatccttccttaattactgtagctttgtagtaagccttaatatttagtggtatttgtttttcaaaattcttttgactctttgggctcctgtgtatattgatgggaaatttagaattgactttatctacttctatgcataaagcctatttggattgcattgagtctgtagatcaatttggggtccaaatggcatagattggagttgtctaatccatgaacagatatttatctccatttatttaggtcttctttaatttcttttgacaggattttgtagttttcagtgtataagttttgcatatattttgttagatttcttactaaatcattcatgtttttgatactatgataattgaaattatccccttaattttattttccagttgttcatatctagtatatagaaattgacttttgtatatgtatatgtatatattttttataatgtcctgcaacctagttattagttttagtacatctttaaagattctgtaggattttctgcatatatattgtctgtgaataaaggctgttttatgttttctgttctaatctatatgccttttagttttttcatgctttacaagaaaccttcactatgatgttgaacacaagtagtgagatattcttgccttgttcttgatcttatgaggaaagccctctatctttctcattaattatgttagttttaggtttttcatagatgccctttatcaagctgaggaaatatccttatagtcttagtggaattttcatcatgaatagaagttgaattatgtcaaatgtgtgtattgagatgactatacagattcttttctttttcctgttaacatgttgaattacagggattgattttaaaatgttaaattaggtttttattcattggtttggtttgctaataatttgttgacagatctaacatgtgtcctcatcaggattattaacttgtgacttactggtattattatgtctttggttttggtatcagggtaataatactggtctcataaagtgagttgggaaatgtttcctcttcccctatattttgagagagtatgatagggttggtatttcctttttaagtatttgataaaatttactagtgaaggcatatgggcttagagtattcttttctagtgggtttttaattacagtttaaatttctttattgatatagagtgtgrtggttttaaacatgacccaacattttttttgacattcctattattgataacagatactaaaggcttttaaatttttctgtttcttcttgtatctgtcttggtaatttgtttcatttaggggacttattcatttcatctaatttgtagactgtatcggcataaagctgttcataatattcttttactgtcctttkaatgtctgtaagatttttaatgattgcccctctttaatttctgaaatattattggtaatcatgtgccttatttttcttttttctttatcattctagtggaagattttatcaatcttttcatgtaataacttttggttgcattcattttctctagtttttggtctgattttctatttcattgattttctctcttaaatttactgtatctttccttccacttattttgggttaaattagcttcttatacttcccacctccagacttttgaaggtgaagcttggctaattgatttagtccctttttcccattagaagcacttagagctatatcattttctctagacgctactttacatgcattgcacacatgttagcgtgttgtatttttattattcagttcaaaataagttaaagttttctttgtatttttttctttgacccattctttattttcaggtgtataggtgaatattcaaatacttaggaacttttctagaatatcatactactattcatttctaatttaattgtgttatagtcagagggcatactctgcaagatatcaagctcttgaaacctacagaaattcatgtggctcagcatatggtctattgtggtaaacattctctgtgcacttgaacttatatctgcagttgttcagtgttatgctctgtaaaggccacttaggttacagctgcttgcattgttcagggcttctgtttccttactggtttttgtcttactttatttaattgtgaaaatatctatgattggggatttgtttatgtctccttttacttttgtcagtttttgctttatgtggtttaaagcttttttattaggtgcatatacatttgtaatcattatattttactaatacagtgccgcttatcaacataaagtgttcctctttttccctggtaatgccttttttcttgaatcactgtgtctaatattaatatgggaatgttttcaaagatgggaggtaatagagaacatttgtgtgctgatatgagaaagatttaccatagagagggagaggcaatgagatggggagagaaggattatccaaggagcaaaaccctcagagcaagaagtagtattcagagcatgtgctgggattggtcttttgcaaaagaagtgaatcacttcatctgtatttgcactgcagaagaaggcaaggatgattatagacataagtagatttttagagttggctatacgtgaaatctatatattttagatttttaaaatctagcaatatgtactttacagtatgccagaaaccactgatcaaagaaatgtggtttcagtttttgtcatcaatatatgagggtgggccaagtgcagtggctcacaactgtaagcccagcactttgggaggccaaggcaggaggatcgcttgagcccaggagtccaagaccagcctaggcagcaaagtgagaccctattgctactaaaaaaaaaaaaaaaaatacaaaagttagctgggcgtgatggcatgcaatagtcccagctacttgggaagctgaggcgggaggatcacttgtacctgggaggttgggggtacaatgagccatgattgtgtcactgcactccagcctgggtgacagggtgagaccctgcctcaaaaaaaaaaagttatatgtatatatatttatatgagggtggtaattaaagtgttggctgatctttcagataattgtggttaatttcttaatactaaattgatcctttggaatatcctcaggctccggaattatggctgttatatcactgtcctgaatctcccttgtcctgaaattttttttattatatactgtttgattttctgaaatggtctgcaaattgagcttatttttaattttaattttaatttttttcttgagacagtctcactctgtcagtcaggctggagtgcagtggcgatctcggctcactgcaacctttgcctcccgggttcaggtgattctcatgcctcagccactcgagtacctgggattacaggcatgtaccaccatgcctgactaatttttatatttgtattagagacagggtttcaccatattggccaggctagtctcaatctcctggcctcaagtgatctgcccgcctcagcctcccaaagtgctgggattacatgcgtgagccaccgagtctggcctgagcttattttttagtgaggtccaggatatttaagtgtgtttctaagatgaaatctgaggtaagggactgcagctaagtctctccacacataaaatctttaaatatagatgatctttatttgacaagttgtttaacctttacaggttattttctttcctgaatgatgttatatctctgctttgattctctatcaaaaattgttgtgattctaaaaggggaataatctttcattctggcaagcagttggaaattatacccatagaagtaggcttctgtgtattgttttatcagtgtagtgttctatgaataaaaatacagagacttgtcttttaaaatgatcctacttgagcatttctaaggaagcttcaactttattctttactagtgttgaaaaattggccatattcctcagatacagggataatcagtgtagttcacttccttgctgtggtgatagatggaggaatgggcatgtgacccaaatcaaccccagcagacccagccttgggacttatttgcagagtctctcattaagagcttatcgggttttgtttttgttttaattttttactgggatctctaagaggatggaatgtaattctggagctactggtatccttgcatccttcatccttctctatgaggagagaagctgtcctgataatggagcaatattgaggaaggctgagttgagacacatacacacatacacacaggcacatacacacatctgtgcacacactgtcccacagatatcatctgagcctctcaatttgatcagtttgtctcaattacataagctaataagttactttaaaaatgacagccagttcaagttggtttttctgtctctagtagctaatagaggcagtactaatacattgactatgttttagagacttaagtcaaaatacagtaaagagtatgagtcaaagaaaagcaaccacccatgtacaaggtatatctatatacatgtatatatgttcatccactaaatttcaataattattcctcctgtgaactctgttcaagtagaaatccagtccttctatctctgttagaaattctttcgtaggggcggaggttgcagtgagccaagatcgtgccactgcacgccagcctgggcaacagaggtgagattccgtctcaaagaaaagaaaagaaaaagaaaaattctttcctagggcttgcttttctagtttacccagatttacttcctgcctttttgtttgttttttttttcctgtttctgagctttagaacttggtgtgatattctgtcaaattgcctaatgctctctgtttatttctggcatcaaaaatatttatcaccttgctactgagagaactctagttggatcctgctgtgttctatgaactgggtctcctctgggaagtatgcctgcttctcactcttcgttagtgattcagtaaggaggcttgcttgtaccggagttaggttatggttctttttttttttttttgagatggagtctcactctgtcgcccaggctggagtgcagtggcgccatctccagtcactgcaaccttcacctcccgggttcaagtgattctcctgtctcagcctccctagtagctgggactacaggcgcgtaccaccacacccagctaacgtttgtatttttagtagagacagggtttcaccatgttggccaggatggtctcgatctcttgaccttgtgatmtgcccccctcggcctcccaaagtgtggaattacaggcgtgagccactgcgcccagccaggttatggttctttagttgattgtggtggccatgcaggagaggagagagggcacatgttacagaacacttctaattctgattcaaacatgggaacagtgtccagaggccctatagcctgacccttagatctctgaactcttcttctcctgcagtccaagccaggtctgcatagaggagggctccttaacgggtgctgattatttctccaaatctatttttcttttttttcttaaaagagttaaaacataattcagccatttttaaagggagttaatatagttttctgtactgtatcacaaagaatcagaaagagagagacagatcctgctgttctgagttgttagagacctattcttggctcgctgtggtggctcttgcctataatcccagcactttgggaggctgaggcaggaggatcttgagaacccaggagttctagaccagcctgggcaacatagtgaccctgtctctacaaaaaataaagaaaaggtagccaggcatgttggtgtatgctggtagtcccagctgttcgggaggctgaggtgggaggatagcttgagcctgggaggtcgaggctgcagtgagctgtgatcacactagtgcactccaccctgggcaacagagtgagaccctgtctcaaaaaaaagaaaaaaaaaaaagaaacctgttattgagctggtgggatttaacccaagacagagtttgcagtggtctgtgaatggtgtataatggaaggaaatggcagataagattaaaataactgaaaaaggtcagtggacattgagaaagtcaaggtcttgtaagccaaagaatagagaagtagtttctctttttaaaatagagacgaggtctcactatgttgcccaggttggtctcaaactcctgggctcaagcagtcctccaccttggcctcccaaaatgctgggattatagacatgagccactgtacctggctgataagtagtttctctaggaaagagaaacccatgggaatgtttttgaataagaggataatcagaatttttatttctggagatttgtagggtggtgtcacttagaagaccagggaatttgtggagctctaagattgcttgtaaaaaggtaagtgaaggatttggtgactggtatgttaagcagtgggaagagtcaaatgtagttgcaaggttttcagcttgagtggcctggaagaagtagtagtggtgtttgaagaaagagaagaacaggaaagggaaatgctttgaggggaaggaccagagtgcttttgatgttttgagtttcaggtggcagtggccttcatggagtttgtgttgcactgggaaagatataataatattaaataaaatactacatgtagcatactcaatggtgatatgtgctgaagagaaaaaaaataaggaaaggaaatatgattttgggggataaggattgagattttaaatagggtgatgaaagaagacctcattgagagcatgactttgggaagaaacaaaggaagagaggaagctgtccttatggagatcttggggaatggcagtgcgttcctagtgtgctcaaggaatagcaaaggggctgaggtagagaattgtcagagacgaggtcggagggatccggggtgggggtgcagtcaggtagagcctttacatcataggtaggattctgtttctggctctgattgaagtggtaaggcttagagtggtaggagtagagaactgacatatcacttatgtttcataggctcactctgttatgttgggaatagactgaaaggaggcaagggtagaagcagggagaccccttacatggctattgcttacttccaggatggagatgatggagactaaaccaggatggtggcaatgaaggtagagctgacaagatcagctgacagttgggatgtggggtgtgtgtgtgtgtgtgtgtgtgtgtgtgtgtgtgttgctgtgtgtttgagagaaggggaggttgaggtggggtggggaaggaagtcgaatgattgattgataaggactgcacagggattttgggctgagtaattggaagaatggagagagattgttcattctttggctgttaactagataaaaggtacgtttggattagctaccctaagcaaacgaagttcccaacaaatacgcccttgaaaatgtctgtaaatatgtcttttaaatgatagtgcccatagttaaattttataatgaaaagcttattggcaagccttgtcaagagctccctgtggaaatatcagttgcttttcttggcttcaaggtgtttcctgaacagtgtattatcctttgtcccgagtrtgccattaagggatttgaaagtttgttaaaacatgtgtggcaagtgagtgctgtcatttaagcctagccagggaagccaagaaatgaaaagcagctctttgctggacttcctgacatgctttagctctgaatccgaggctcaggtagtggggtggacagggcattatttcctgtgcacaaagtgtcagtggacacagttctcaagccatttccgcggaaaatgtctgtggacatgggtatatgtgaatcttttggaaaaactccataataccaagttgatagcaaccccctgcctaaggagaatgtaatagggtttatttgctgcaacagaattttccagtgctaatatggacttgctctttttataagatttaaaacagcactctttaatgatggtctttgagctcgaggaaaggttttttctatatcagtaaacagggaagctatgaaatgtttcatgcttggagttcgggtgagccagcataatggaaaggttacctggcacttttatttaggattccattagaattttttggttacagggactttttctgtttgcttttcaattttgaaatacggtatattgattttaaaaggaagggaagaaaaacctaatgcacatcaaacagttttgaagtgaccagtttcttctctagatcctggtaggtttgaattgctgtttgcaaytgatctaacttactacacagcgtagacgagatttccagctttctgagtgacagattgctacttcacaactctggaaagatcaggaaatgtccctctgaggtgttgccagatctaggctttctttccttcatctggacatttgtgacttttcttgctaagacacttcttttcaagttggggagcagttaactttatggttatatttgcatttatattgaaaactggagttataatttagatataaaggcatagaattattttagaaaaatgaatttatttcagtgcctcccaattttattcatttgcatttatttatcttgtatctcttacagtgataagtttcaattttgatgaaataattgttgactatttcctggtttccagacacattgtgttaatggaggacattgctgtatcatgaagtatcttatggacatgcattttaatttagctggctcttgctgcttagtatttatttctcactattttttgcaaatgcttcttttacagctgattcaagtctttctcattctcttcagaagaagagaaaagagaatcaatatttactgagcacattctatgtgccatggatcatgggagactctcagaaatataaaaatgaatgtaatgtggtttactgtctagtggaagaaaaaatatgcaaacaaataaatgaaatatagccccatcaaggaacctttttttttttttttttttgcttttgagaaaggatctcgctctgttacccaggttcaccacgtgagcagtgacacaatcacagctcaytgcagccttgacttcctgggtcccaatgatccttcctcctcagcctcccgagtagctgggaccacaggcgcatgtcaccatgcctggctaattttttatttttggtagagacggagttttgccgtgttgcccaggctggtcttgaattcttgagctcaagtgatctgcctgcctcggattcccaaagtgctgagattacagcttgagccaccacacctggccgaggaaccgtatagtgaaagaatgdctaaggactagcagtgctgcagaggaaggcaacaacatttaggcagagagagagaagttagcagataaacattcacagaagagctgggtcttgaattttgattatttgctaggccaacaaaaggttcagaggcatttcatgcaatgtgtgtcagggatgggagctgtatgggtgaggttcactctgaatctctttgttttcaactcctgtggatgatttccttcagtgtccaggactaagagaattgcatttagagtcctagacctgtaggcacattacaactctgccatttagtagctgtgagattgtgacatgtctgaagtcatttcctcctctgtgagatggagatactcattctcctgtgcatcacccagggtcattgggtggatccaatcagttaatgtgtataaaagcacagggacgattgtgcaatagaatgtgaagattcataataaaaacttcagtgtttcttgtgattcccatatccatagttatgtttaaattctctctactttgctcactcctattccttgttgaaaccccattatttgagtcttccccaagggctttatcctcaggttctcttttcagtagacacttggccctgagtcacctttgcttaactgtcaacccatattatgggtaaccctctaatctgatttctgtcctccaagacacttctagtctccagacctacatttccagctgccacctggatgttcctcatcatcttgcacttctcgagtcatctgaaggctacatttgtttccttatatgtaactgctcctaatttttctgtttctattgtctgagttcaggaccttgcaattatttttgacccttccttccccttccccttgcttcaggttgttcttcaggatgtaaaggctcccaactgagtgtactgttattattaaatccttcactttacttaagctcctaccatgttccaggcacctgtgctaagagtttttcatttattatcttagttcccacaatagttttgtgatattagacactcttgtccccattttaaagataatgaaattgagattcaaagaaactgcttttccaaggtggcattgcaggtaagtgcagagccatgactcaagccagttgtgttgtccctagagtttgtgctctgaatcactccactctgctttcacacttcactgacttgacagtaaagtcccaactcattaagttggcatttagggctcttgacatcttgatcttcctttctcmctcttgttgtatattttcacgattatttgccattcctaaaggagaatttgcattttcttatctctttgcttttccatatgttctttctcagcttagatacctctttttcatgtgtacctgtcagaatcctgaaggagacagggcagtgtagtggaataagccagggctccggagtccagtggatctgctttctgctttccctcatagtcctggtctcttctacaaagggctggaccagttcacattcacactagatatgtactgctgtgtgttcttgctagcatttggtattatcagaatttttgggttttgcccatctgtgggtttgtagtgatatctcattgtggctttaatttgcatttctctgactaataaggcagagcacctttccatctttattgctacrtggcatctctattttgtgaagtattttaagccttttcttccatttttctattggattatttgtcttttattgatctatagtagttctttatatattctggatatgagctcctctgtggcttgccttttaaaatttcttttattatatcttagaataaaaagaagttttaatagagttgaatttatcattatttttctttcgtggcagtgttttttatatatatttaaaacatatttcccaacatattttctcacgttttctaaaattctgccagctttttagattacatcttccttagctatttcccactcccagtattgcatagtgtctctgacccggcaagtgttcttgtctttgaaataggatgctacaaggcattttgccattcctctgccaacacaaggcctgtgttccccttaaaatgctgacatcatgctatacccagcctacttttccagcagggtgtctcttcttctcctgtgtctctgaactcaggattctgggcttagttctgttcctttaagtggagagcctctcatagctgcccctcagtttcagccatccttcatggtttttctgggtgccctccacccctacccactgccccaccatgggtcctgctgtagaggccaggttgctgttctctgtcttccggagcatagggaatcctgcctgatggagaaagccttactttttcctttcagcacactgccataccactcttagtgcccaattttaccttccaaaaaaaaaaaaacagtagatagattacagatctgtgcttggtaaaactaacttcaggatgtatctgacacaagtttctgtgtgtgtgtgtttgggagttgggggtgaggtcaaatagattaaaataagtattgtaatrtgctatttctagagcatttttagtggctgcaaatgccatttatttcttatcaatactcctcagttgatatctgtctatattttcactgcttatttttatcagcagggttttatgtgatgcccatcccaccctgttcatggaaaaagactgagagtgaaaaagttctttatgatccagtgatttgattctcccactaatctgtttctgtcctgtccttcagagattagactaaatctccaagggagaaataatcccatttgcagcatgcactcaggtaataagtgcagtcagctgccccacccttgcaggtctatggagaaaccagaagaatttaaaaagtcctcagttaaccatgtcagtaatatatctgctatcctcagggccccttttttcacgctgagcccagagttctccaaaatattggccagcctgaactggtatccttcagcaccaggccctttactgtactttgttatagagtattttctttctttctttctttttctttctttctctttctttctttctttctttctttctttctttctttctttctttctttcttytttctctttctctttctctttctttttttttttttattttttgagatggagtctagctctgtcacccaggctggagtgcagtggcataatcttggctcactgcaaccaccacctcccgggttcaagtgattctcctgcctcagcctcctgagtagctgggactacaggcgcgtgccactacatctggctaatttttgtatttttaatagagatggggttttgccatgttggccaggctggtctcaaactcctgacctcaggtcatccacccgccttggccttccaaagtgctgggataataggcatgagccacctcgcccagcctagagtattttctatctgcttgtagatatgcccttcccccccgccccgctccccgggaggaagggtttacagctttcatctgattctcagagggatctgctaactttcaaagttgagaaccactgatttagacttcttaactctttcaaagacaaccccatggaagaaagcctcttactttacagagtcaaggaaaattgggctactagtttctaacccacatacccttgtgcttgaaaacttttctgaaagctcttgcatcttgataatctactatgtgcattttattgttcttctacctgtttatccatttattcatcaaacattgagtacttaattatgcaagtttctatagaatacacaaaaatgtgtagtatacagttagtgagcagatagtcttaacagatgagataaatcatatgcctagataacaataatgcagtaaagaaattgagaagtgctgaagaagaggtatagataaattgctttgggacttcaaagaaagagaaattattcttgtctgggcaggcaggaggatagagaggaactgggaagattatgtggtggattttggattatagaaaattcatgctttttggagtaggtcttaaaagatggatagattttagatatgtggagatattagatacagtgtgccatctctggctgtttatttgaaagacaattgagtactactgtgtgccaggcctagccatgggcacttcatggagtttatcagggaagatagactctgaacaaatcatttcctaattaattgtcatatttgttgattctgttagcatgtatttcagtggctactaaatgctgctctcaactcagaatacagcagtgaatagaatagatacctctatgttcatgaaacctatattctagttggggaaacagaaagtaaataaggagatatatactttcagatagtggtaagtgcaaatgaaaataaagctggataaggccaggcgcagtggctcacacctgtaatcccagcactttgggaggctgaggcrggcagatcacaaggtcaccagatcaagactatcctggctaacatggtgaaaccccgtctctactaaaaatataaaaaattagctgggcgtggtggctggcgggcacctgtagtcccagctacttgggaggctgaggcaggagaatggtgtgaaccggggaggcggagcttgcagtgagccgagattgcgccactgcactccagcctgggcgacagagcaagactctatctcaaaaaaaaaaaaaaaaaaaaaaaaaagtaaagaaaagaaagtaaagctggataaggggctagagaaatgatagcaaggtggggctatttcagttactgtgatcagggaagtgtctctgacaggcagatatttgagcagagacttcaacaaaacaagagggcaggccctatgaatagccaggcagagagctttccagatagaaggatagcaagtgaaaaagccctaagatggaaggttgtagtattctaggaacagcaagaaagtctctggagttggagggtcatttgcaaaagaagaaactgtagaacatgaggatagaaaaatgtcttgataaggccttgtagcacggcaatggaaggaggttggaaagctgttgggagaatgacatgatctgatttgtgttttaaaagaaacgctctaactttattggtccaaaatggaaataaagagaccaattattgcattaattcagcgtggcaataaaggttgtttgggtttatgtagtaacagtggaaatggcaagaagatccatttaaaggaaaggccactgrgctcttctgatggattgaatgtggggaatgagagggagagggtcaagggtagtgctgcggtttagggctggaggaactagatggaaggtgatgttatctgctgagagagtgtgctgggtgaggagcaggttctagtggggatcaagggttctcttgtttgagatgtcatctgggcaattgaatataagtctgaagatgggaaagattgagctaggcacttaactttgggagttaatagcatgtagagggagatttaaagccaaaagactgcatgaaatcacctaagaagtgagtatggatggatccatcatttcatccctgaatacttcaggtatctccaaaagttagagatttttgaaaaacagtcataacgaattaatgatattcattgtctaatcactatttacatttctcagatttttgtctctcctcctttttttccctttcttttcttctttaaaaatacagggctgggcatggtggctcaaacctgtaatttcagcactttgggaggctaaggtgggtggattgcttgagctcaggagttcgagaccagcctgggcaacatgacaaaaccccatctctacaaaaaatacaaaaattagccaggtatggtggcgtgtgcctgtagtcccaactacttgggaggctgaagtgggaggatctcttgagcctgggaggtggaggttgcagtgagccaaggtggtgccgctgcactcaagcgtaggtaacaaagtgcagctctgtctcaaaaaaaaaaaaaaaaaatacagttggttggttagaatcaggattaaaataaaacctacaaaattgccttttgttgatatgtaacaaatattttaatctataggcttacccttttttcttgcaatttatttgttggcaaaactgggttatttgttctacaaaatttctcaaattgtgaatgtgattgagtgtgcatggtaatgttgtttaacatgttcctgtgttccatttcctatattggatcaggtttaattttggggaaaaaaatacttcgtaggtggtgatgtgtacttcctgatatagtgaatcaggaagcactttggttctttctctttttacaatatgcatatgtatcagtgggttcaggtattgcctctctggtccatccattataaaactctggtccacccattataaaacatccatccattattattacctctctggtccacccataataaaacgttcatacgttataaaactccctctccatcagcttacaacttactggttttagcaaccattgatgaccattacctgaatccattattcagtagggatggcaaaatggcgataccgaaagcctttttttttttctttcttaatttaattagctgaaacacttgtataaagaaaaactttacctcatcaattacttggttaccttgaggtacagtttgtacaggccaggtagaataaatgcgtagaattctccatagttgaccagagaagcccctttatgatacttcctgtgtcctttagacaagacactagtagccattgatagctttcttgttttcccagtatgacaggaggttccagggttgtcttgtccatttcctgctccagatttgaattagccatttctctaaggagtcccacacctttactttttttgtttgttttgagacggagtcttgctctgttgcctaggctgaagtgcagtggtgcagtcttggctcactgcaacttttgcctccgggttcaagttattctcctgcctcagcctccccaagtagctgggactacaagcacatgccaccatgcctggctaatttttgtatttttggtagagacagggtttcgccatgctggccaggctggtctcgaactcctgacctcagatgatccgcccaccttgtcctcccaaagtgctgggattgcaagcatgagccaccgtgcccggcctcacatccttacttttaaccagtatgcaatatgagatggttagagagtacacaggttttgagtcctgtgatctcataatgatcttttccccccataccttttgttcttttcttatgtgttttaggataataacatagaataaaatgctttaaagaagtaacacattaatttatattttaattgcacagttttgaatgacttaatttattaagtcctattacctcaggagtctccagcccctgggccatggactggtactggtctgtggcctgttaggaactggaccacacagcaggaggtgagcagtgggcaagtgagcattaccgcttgagccccgcctcctgtcagatcagcaggggcattagattctcgtaggagcatgaactctactatgaactgtgcatgcaagagatctaggttgcatgctccttatgagaatctaatgcttgatggtctgagatggagcagtttcatcccgtaacagccccctacttctggtctgtggaaaaattgtcttccacaaaaccagtccctggcactgaaaaggttggagactgctgccttgtagcattttttggtttagtaactcaaaagtgaatttagtccctacaacactaattcttcagtataaaccatgaagattatcacaaaatcagacgtaggttagtttttgaatatgctctacagttaagcttgctgtactctggttgttgctttccactgatcttctgtattagtccattttcataatgttgataaagacataaccaggactaggcaatttacaaaagaaagaggttaatggattcacatttccacgtggctggggaggccttccagtcgtggcagaaggtgaaaggcacatttcacatggcggcctacaaaggaagaggacttgttcagggaaactcccctttataaaaccatcagatcatgtgagacttattcactatcatgagaacagcacaggaaagacccaccccccccatgattcaattacctcccacctggtccctcccatgacacattggaattgtgggagctacaagtcaagatgagatttgggtgggggcacagccaaaccatgtcgccttctcttcccattctcttcttaaacttcgtatgcatgagccaaagcataaattattaagtaagtaggcaggcagaatcacgctgattacaatttataccccccccccacacatatacatacatgcagagaaagacctttcactgtgagaaagttcaacctgcagattgtataacaaagtcagaattctggtacctatgatatttctccgtggttggtgggaaccaaatcctttgtggaaccactagtggcagaaataaatacaaaatagaacctaaaggcctgagctctttgcataatgtcttcttcttcttttttttttttttttgagacagagtctcactctgttgcccaggctggagtgcagtggcgtgatctcagctcactgcaacctctgccccctgggctcaagtgattctcttgcctcagcctcctgagtagctgggattacacacgtgtgccaccacacccagctaatttttgtatttttagtagagacagggtttcaccatgttggccaggctggtcttgaactcctgactgcaagtgatctgcctgcattgtccttccaaagtgctgggattacaggtgtgagccaccacgccaggcccataatgtctttccaggagactaccttttacctgctagaccaactgcagcatgacagttgctttcttgcccagaacttctctctctgagataaagtatgtatggggatgatacaggaaaaaccattaaacccgagattgtatatagccaccatgctttagacatagggtatacacctgtgccttctgcctgtgcttaggctgctctgacagtacccaaggttgtattagttctttgaggatggtcaggggcagatgttcctaaatatttctgaatttgccaggcatatttaaggaaattgaatgaatttgttgatttgagtgatatcggattctttttctgctgtaacttgtcagtaaattttcttatttttggatgatcttctttgggtcagttatgaaaacaaggcttatgtggtaaagcagaagtgcagatgggggagctggttttttaattgtacaggctgtgtattccttatccagaataaggaattcttatccaaaataaggtcctttttgggaccagaagtgttttttttgggtttgggatgtttttcggattttggaatatttacattataccagttgagcatcctaaatcctaaaatctgaaatctgaaatgcttcactgagcatatcttttgattgtcatgttgatgctcaaaaagtttcagatttcagaccattttgrattttcagattagggatgttcaacctgtgtatcagtgccctagctgtagcttcactcacatgagctcttgcaggaagggccctgcgggaatctttttggagattgctggcctggccagtagaacttttttgtagtattaaagagagggagatatgtctgtttctaacttcccattgacagatgaatggacaaatgaatgtatgaatctgacatgagtcaaaacaagcaaaaaagaaaattttattaaatatactcagggactgggaaccaagtttttaaaaaagtttgctcaaaagttttgagcacagttttgctcaaaaaaaaaaaaagcattgtttacaagtttttctattactatatttttatggagtcaatttttacaaactgaggatatattcttacctttattctgatcgttaatatctttgtaatattttactttggttttctgagttgatattataatattaattgtctaggaatggttatgttaattgaacctactgtattaaaatgctttaggaaagatttaataactttttctctcttgtataaggtgaagatctttcactaagcatgatctttgtgttacttttaattagaacattagacctatcaaatataaacatggtgaaactgctagagctctcttacttcattcaggtctctgctcaaatgctgcttcctctaagcagtatttcctaatcaccctactgataaactaggcacaccctctccattattctctcatttacttaacgagctttctcattctttcaatatatttaattgcgcttctcactagtcgacttttgattgtgttcactgttctgcccttggcacctagaacagtttctggcaccatgaaagggactccataatgacttgttgaatgagtaaattgttcatcatttgtcaccccactaggatgtaggactcatgacggtgcctggcacgagstgggcattccaacatttgtttgaaagaataaaaggaatgtttacaagtagtgatcaaattcattttttatatttatgtatatacaggtgatcatttaagttttaattatatgtttaaattgaacataggtatttatcatatagaaatagattattaaaaaggatgcagtattcaagtaacatccaagaacctacaaaatctgctgcttttttgctaatgtggatggrcagatttacatgtagggtcacaatttttttcagtgactcaataacacctggtgtattttaatatagtgtccatagacatcagagtgctgtatgtgacaaactcataaaatggattagtatctggattggttttttattttattttattttattttttttagagctagaatatccctttgtcgcccaggctggagtgctgtggcgtgatcatagcttactgtaactcctaactcctaggctcaagtaatcttcccacttcagcctcccaagtagctaggactacaggcgccctgccccccaactatgcctggttgatttttaaattttttttagaggcaaggtctcaatatgttgcccaggccggtcttaaactcctcctgccttggcctcccatagctctgagattacaggtgtgagtcactgtgcctggcctggatttttttcctctacttgcttcattagtattgtagtgtaaatgtccatcagtgtgtgtgtgctttatacgtatatacgtatatatacacacgtatagacgtgtatacgtatatatacacacgtatagacgtgtatacgtatatatacacacgtatagacgtgtatacgtgtatatacatatacgtatatatgtatacatatatacatatgtatatgtatatgcatatgcatatgtatatatacatatatgtatatatatgtgtatatgtatatgtatatgtatatgtatatgtgtatatatacatatacatgcagagaaagacctttcactgtgagaaagttcagcctgcagattgtataacaaagtcagaattctggtacctgtgatattttctccatggttgatgggaaccaaatcctttgtggaaccattagtggcagaaataaatacataatagaaactaaaggcctgagcctttaaatatatatatatatatgtgtgtgtgtrtatatatatatatatwcacatatatatatrtgtatatatatatatrtgtgtgtgtgtgtgtgtgtrtatatatattttttgagacagagtctcgctctgtcacccagactggatggagtgcagtggtgccatctcggctcgctgcaagctccgcctcctgggttcacaccattctcctgcctcagcctcccaagtagctgggactacaggcacccgccacaactcctggctaatttttttatatttttagtagagacagagtttcaccgtgttagccaggatggtctcaatctcctgacctcatgatccgcccgcctcagcctcccaaaagtgctgggattacaggcttgagccaccgcgcctggccaataaagctttatatttttataagaacattttataaactcttgttcacacttaattttgttttttttccacttcatcttgtattcttgtggtttccttggtttcctttaggaacactgtggcatactttgttgagttcttttatcattccctaacttactaattgttcctatatggtgagggtttatgaagcagcatggtactacttctggtattcagggcctttggggagaggggatgaaaatgtagatcagaaatatgagaagtggataaggcattaatttggggcatcctgaagagctgagtgtcagcctggctttgctggattgattatgtgcattaggtggtctgtgcttctggaaaataaagatccttttttgaactacatgattagtgtccaataccgttagcttctgaatatgcagtttcttccttagaaaagaaaaatctgctcttttttttttttcctctctcagtgatttagcagaatttttctgttttctttaggtagttaaaccagagagcaatgacaaagaaacagaagctgcgtatgaatcagatatccccgaggagctctgtggacaccatctcccgcarcagtccctgaaaagctataatgacagtcctgatgtcattgtagaggctcagtttgatggcagcgactcagaagatggacatggcatcacacaaaatgtgctggttgatggtgttaagaaactctcagtttgtgtttctgagaaaggtgagtactagactattgtcttactttttttttaagtacactgattaagtattggaattccctctctgctgcagagtaaataacacaatgccattgatatagtcctaatttttgacctgtggcmgctttcagaaaagggggatctttgacaggtttagctgctggttatgaaagaggggatgaaagtgcttccagcggtttgtgtgggcagtagttgcagttgccacattcctaataggcttgagctgtgttgctggttaacgttgacatctcttgcgataggcgcaatcctgtggatgatgtgaacacaattaaactggtatgtaaaattcatatgaaaaatcactttattttactttcagttttactttaaatatcttttagaagtatttttgtcggctgggcacagtggctcacgcctgtaatcccagcactttgggaggccgaggcgggcggatcacgaggtcaggagatcgagaccatcctggctaacatggtgaaaccctgtctctactaaaaatgcaaaaaaattagccaggcgtgggccgggcgcggtggctcacgcctgtaatcccagcactttgggaggccgaggtgggcggatcacgaggtcaggagatcaagaccatcctggctaacacgttgaaagcccgtctctactaaaaatacaaaaaaaaaaaaaaaaaaaaaaatagccgggagttgtggcgggcacctgtagtcccagctactcgggaggctgaggcaggagaatggcgtgaacctgggtggtggagcttgcggtgagcctagattgtgccactgcactccagcctgggtgacagagtgagactccgtctcaaaaaaaaaaaaaagttttttttgtcatttctggtgggcatggatcacccaaaattttataaacaaatagccttagaaagtattttgattctaagccttttaaaaagccagttttgttttctctgattgaaatctaagccatgggccctctggatgcagaaaaaaagcagttgtaaacacatgagagctgtgaccacggaccctacctgaccacacttgaagagacttaaggaaaatattaagtacaatttgaatatttcaagttagagattttgaagaaattctacatagaaggagtatattttctagccaaatcgaattttatgtatactattaatggaaaccgaccaactctgacctggccaggctgactagataatgagctttgttatcaagaagaagtttctggcacagttcccatgaaaggctaggagaaatgccagaagatttctaaaggaggatgttcagcagacaactcgtttagggactggtgagcatatgtccccccagcgtaaagaaagccgaaggtatcttcaggacatgactggagaaggatgactgcttttctccattgctgaggaggtagtgatctgtgaaagaaagcattttttgaaagcatgtgtcctttttggtgccaagtactcattcagaatgactttccaactttgaaattcttcttgactgaagaggctactacttcctgtgtcaggtactgctatgggccccaccaggtatcactgccttcagggtacccaggttccttttgtttggggacaygtttaggtaactagtggtttccctgtttagagctcagccagttccttttggatgctattccttgacattttattcttgcgatttttctactttcttttctttaaaaatagtcgaatactgtgacattcctcttaaagtaaatgtgtattatcgtaatcacatcagtactatgagtcatgtattttcagtgagaagagtggcaaataaccaggactctaagtagccaaatccttcattaacaagatcagcaaggaagagagatattcacaggataaagccaggcaaaggaacactttaaagcatattgagtatttggcttaaaactacttcgtggaaacccagctctggtgataggcttggcagatctcagcagcctcttttcctctgggctccaagtgaagggataagacacattgatctctcattagtggttggtacaaatataaggacaaggaaatactgatggatggaagtgacagcagaatggatgtctgggttggatgctaacggtttactttgctggcatccaacccagagttttgcgaaactctgatgctatacctcctcttgattcaccctctattataattcttcccccacactccttttgagatagggtctcacttttttgcccaggctagagtgcaatggtgtcatcatagctcactgcagccttgtcctcctgggctcaggcgatcttcctgcctcagcctcctgagtagctgggactaaagtgtgcaccaccacacccagataatttttgttgttgttgttgttgttttttaatacagccctgttgttgccagggctagtcttgaactcctggcctcaagcgatcctcctgctttggcctcccaaagcgctgggattacaggtgtgagccattgtgcctggcccctccctctttcttacaagtaaatatcactgagtacgttacaagcccgctgtatgcatgtttctttccttattctttttgcatccttcctagcccactgttatttatattacttccttagtagccctgactgagggaacaaccttaatccttccctcagtatctggtacagatttctctttcctgctagcctctaaatggagagtttgtgaaaccacatggctgtttctcatttcttgccctcttgatatttaggaaaattgcaatttgctcttttgaaaatcacagcatttttaaggatatttcaaccatcttctcttacttgggataataaaaaaaatctggttaccattaggatgttagtactttttgcactatttagggttttgaagtttgttattgaaacaaaccataaccttgagaatatcaaacttttcctaagacttctagaaaggttctttgctttgtgttctacttgcaagtggattattaatcctggttcatgcttgtgttcaaaagtgtttttttgtttgtttttgctttagtattatgtttctttgcccaaagcaaatgctctatattgcatgtgtatttatagcatatacctatttgctgaggaaatatttatatctttgtgataactaccagtttctctggtaagagagcacattgctcccgttgtctgtagcaagtgcctgtcattgcgttaagagaaacatctcagcatctcagacattcatacagtagtttctttgaggacgactacacaggtctgcattatccccagyccctgagagagagtgggccaaagacctgggccccttttagagatccactccccaatccccctttgagattgaacttttaccactttacaagcagtagctttgttgttagcatagaaagctgccatccatgtggagcttagggacaaccaattaaaattttcttggtatcaaatgcgtaaatggctttaaaaatgttcagctgttgtgctaggaaatagtaggtcttattcattctttgtaactatctttttttacccattaaccattgccacttctccccacttactacccttcccagcccctggtaatcatccttctactctctatctccatgagttcagttgttttagttttttagctctcacagataagtgagaacatatgaagtttgtctttctgtgcctgactacttcacttaacataatgacctccaattccattaatgttgcaaatgacaggatcacattttttttaaatggctgaatagcactccatcgtgtatatctgccacattttctttatccatttgtctgttgatggacacgtaggttgtttccaaatcttggttattatggttagtgctgcgagaaacatgggagtgcagatatctctttgatatactgttttcctttcttttggatatgtacataggagtgggattgctggtatggtagctatttctagttttttgaggaacttccaaactgttctccatactgattatactaatttacattctcaccaacagtgtatgagggttcccttttctccacatcctcaccaacatttgttattgcctatcttttaaataaaagccattttaaccaggatgagatgatatctcattgcagttttgacttgcatttctctgatcatcaatgatgttgagcacttttctgtaaacctctttgccatttgtctgtcttcctcgctcaagaagtctttgcccagtccaatgtcctggagagtttctccaatgttttctttctgtagtttaatagtttgatgtcttagatttaagtctttaatccattttgatttgattttttatgtgagaagagataggagtctagtttcattcttctgcatatggatatccagttttctcagcaccatttattgaagagactgtcctttccccagtgcatgttattggcacctttgttgaaaatgagttcactgtggatgtatggatgtatgtatggatgtatgtattctgggttctctactctgttccactggtctgtgtatctgtttttatgccagtaccatgccgttttggttactatagctctgtattataatttgaagtctggtaatctgattcctccagttttgttcctttttcttgagatagctttgactattttggatctttgtggtgctgcataaattttaggattttttttttctatgaagagtgtcattggtattttgttagggactgcattgaatctgtagattgctttggtattgacattttaacaatattgattcttcccagccatgaatgtgaaatgtctttaaacatttttgtgtcctctttaatgagattcatcaatattttatagttttcattgtatagatcttttacttctttggttaattctgagttatttaattttatttataactattgtaaatgggattactttcttgctttctttttcagattgtttgctgttagcatatagaaatgctactsatttttgtatgttgattttatatcctaaaagtttactgaattttcagttctaatagttttttggtgaagtctttagggttttccaaatataagatcataccatctgcaagcaaggattatttgacttcttcctttccaatttgggtgccctttatttctttctcttgtctgattgctctagctaggacttccagtactgtgttgaataacagtagtgacagtgggtattcttgttgtgttccagaccttagaagaaagtcttagtttttccccattcagtttgatattagctgtgggtctgtcctatgcagcttttgttaggctgagatatgttccttctgtacccagtttttcaagggtttttattatgaatggatgttgaattttatcaagtgctttttcagcatcagttgaaatcatcatatagttttcttccttcattctgttgatatgatgcatcacattgattggtttgcgtatgttgagccatgtttgcatccctggaataaatctcacttggtcatgatgaatgatccttttaatgtgttgttgaattttatttgctagtattttgttgaggatttttgcattaatattcatcagtgatattggcctgtagttttttttaaatatatgtctttatctgtttttgatatcagggtaatattgcccctgtagaatgagtttggaagtattcccttctcctctgtttttcagaatagtttgagtaggattggtattaattcttctttaaatgtttggtagaattcaatagtgaagccatcaggtcctgagttttctttgtaggaagactttttattacagcttcaatcttgttatttgttactggtctgttcaggttttgcatttcttcatggttcaatcttggtaggttgtatgtgtctaggaatttatcaatttcctacattttccaatttattggtatatagtttctcataatatccactaatgatcttttgagtttctgcagtatcagttgtagtgtctcctttttcatctctgattttatttcttagtctggctaaagatttgtcagttttgtgtaacttttcagaaaactatctttttgtttcattgatcttttggattgttttcttcatttcaatttcatttacttctgctctgacctttattatttcttctactaattttgggtttggtttgctattgcttttctagttctttaagatgcatcattaggtggtttatttgaattttttcttctttttcttttttttgatgtaagcactgctttccctgcatcccataggttttgaatatgctgtgattccattatcatttgtttcaagaaatttttaatttgttaacccactggtcattcagcatgttttttaattttcatgtatttgtatagtttccaaaattcctcttgttattgatttctagttttgttccattgtggtcagagaagatactttatactatttcagtttttttgagtgttttaaggcttgttttgtgatctaacatatggtctgtccttgagaatgatccatatgctaaggaaaagaatgtgtattctgcagccaatggatgaagtattctgtaaatatttattagggctattttgatctataatgcagattaagccagctctttctttgttgattttctgtctgcgagatctgtcaaatgctgaaaatggggtgttgaaatctccagctgttggccaggcatggtggctcatgcctgtaatcccagcactttaggaggccaaggaaggtggatcacttgaggacaggagtttgagaccagcctggccaacatagcaaaaccacgtctcttctaaaaatagaaaaattagccagtcatggtggtgcgcacctataaatcccagctactggggaggtggaagtgggaggattgcttgaacctgggaggcagaggctgcagggagccaagactgcgccactgcactccagcctgggtgacagagcgagactccatctcaaaaaaaaaaaaaaaaaagaaagaaaagaaagaaagctccagctgttattatattggggtctatctctctctctctttagctctagtaatatttgctttatatatctgggcactccggtgttgggtgcatatatatttaagatttttataccttcttgctgaattgacccctttatcattatatagtgatcttctttttctcttcttatagtttttgccttgaaatctattttatctgatattaatataggtacttctccccttttttggtttccattggcttggaatatctttttccatccctttattttcagttgatgtgtgtctttataggtgaagtgtgtttctggtaggcagcagatcattgcatcttgttttttcatccattcagccactctgtgtctttgtattggaaagttcagtccagttacattcagtgttaacattgatgagtaaggacttactcctgccattttgttatttgttttttggttgttttgtggtcttctcttctttccatcttcctgtcttccttttagtgaaagtgatttttctctggtaatatgatataattcttgctttttaatttttgtgtatttgttgtatgttttttgatttgaggttacaatcagtattacagatgctatcctwtaacccattatttgaaactgataacagcttactgtttttataaataaataagcaaaaagaaaactaataaaaactctacactgtaacttcatcccctcactttttaagtttctgttgcttttattcacatcttacaatattatctatgtcttgaatagttgttgtagttattatttttaattggtttatcttttaatctttctatttaaggtaagagtagtttacacaccaaagttacagtgttataatatttcagtgtttttctgtgtacctactattatcagtgagttttgtaccttcagrtgattttttattgctcattaatgttctgttctttctaattgaagtactccctttagcgtttcttctaggacaagtctggtgttgatgaagtccttcagcttttgtttgtctgggaaagtctttatttctccttgatgtttgaaggatactttcactggatatactattccatggtaaaagttttttttttctttagcactttaaacatattatgccactgtaaagtttccactggaaagtctgctgccacatgtgttgtagctccattgtatgtttgtttgtttgtttctctctcttttcttttctttttctttttcttcttttcttttctttctttctttttttctgcttttaggatcctttctttatccctgacctttaggagtttgattattaaatgccttggggtagttgtcttttttttttttcttttgagacagagtctcgctctgtcgcccaggctggagtgcagtggcgtgatctcggctcactggaagygctgcctcctgggttcatgccattctcctgcctcggcctcccgagtagctgggactacaggcgcccgccaccacgctcggctaattttttgtatttttaatagagacagggtttcaccgtgttagccaggatggtcttgatctcctgacctcgtgatctgcccacctcggcctcccaaagtgctgggattacaagcgtgagccactgcacccagcgccttggggtagttttcttttagttaaatctgcttggtgttctataaccttcttgtacttggatattaatgtytttctctaggtttggggaattgtctcttattatttcttggattaaattttctatccatatgtctttctctacctcctctttaaagccaataactcgtaggtttgtccttttgaggctgttttctagatcttgtaggcatgtgtcattcttttttattcttttttctcttgtctcttatgtgtattttcaaataacctgtgttcaacctcactaattctttgttctccttgatcagttttgctattaaaagactctgatgtgttcttcagtatgtcagtttcatttttcagctccagattttctgtttgattttttttaatcatttcaatctctttggtaatttatctgatataattctgaattccttttctattatcttgaatttctttgagtttcctcaaaacaactattttgaattttctgtctgaaaggttacatatctctgtttcttcaggattggtccttggtgccttagtttgtttggtgaggttatgttttcccagatggtgttgatgcttgtggttgttcatcggtgtctggacattgaagagttaggtatttattgtagtgttcgtggtctaggcctattgcatctgtccttcttgggaaggctttccaggtattcaaaaggatttgtgtattgtaatctaagccgtatgtgcattaggggttaccacaagcccagtaacactggtttttgcagacttgtagaggttctgccttggtggtcttggataagatctggaagaattctctggattaccaggcagagactcttgttctcttcccttactttctcctaaacaaaccacatctctctgtctgtgctgagccacctggagctgggagtgggctgacccaagtacccctgtggccattatcactgggactgtgttggatcagacctgaagccagcacagcactgggtctcacgcaaggcccactgtaaccacaacccaacaacctgtattgctgctgagctgactttcaaaccacaggatgcagtccttctcacccttccctcccctttccacaggcagaggagcctcaccctgtggctgccaccactacagacccatggggagtactgccaggcttccaccaatgttcacttaaggcccaagggctcctcagtcaacttgtggtgatgaatgttgctaggcctgggacttacccttcaaagtggtgggctcccctctggcccagggcaggtccagaagtgatgccatgtaagagccaaggcctagaatcaggaaccccaagagcccacttggtacccttctcccctgaggccgagctggtacctaaggtgcaagacaaagtcttcctttcttttttctctgcttttctcaagcagatggagtctctcgcgatagccaccacagctgagaatatgctgtgtctaaccttaagctggcatgtctcagagtctcactcaaggcccatggcatgctacttgagtatcacggctggttattcaggatcggatggctctttaattcagcaggtgatgagtcctaccgtgactgagtcattcccttcaaggcaacaggttctctttgggcgtagggtgtacctagaaatgtcatcagtggaaaagttttcttccctgtcttttagtctgggtgaacaatgtagtcatactaggtaggatagatggtcaggacccacagtgttctaagacccaaatcctatgctagaccagacattcctccctatgaagtttacaaaagaaatatacrcagaggacaaagcaaggcggaggaacaattctttttttattaactgaagcttccatctaagccagaatgattgtagtgtacactcctacttgcaatgtatgaggctccttgtatcttctcatctctgccaacagttaggattatcgaggtttctaatttttttttttttttttgagacagagtctactctgtcacccaggctggagtgcagtgacaccatcttggctcactttaacctccacctcctgggttcaaacgattatcctgcctcagcttcccgagtagctgggactacaggcacacaccaccatgcctggttaatttttgtatttttagtagagatgggttttcaccatgttggccaagctggtctcgaactcctgtcctcaggtgatccacctgccttggcctcccaaagtgctgggattacaggtgtgagtcaccccacccagcctagctttctaatttttgtaatatagattaagttctattaattgcttttttaatatcatttgcccatttttccatcagggtgactgttctcttgttgatttacaggaatttcttatcttctatctaataatccctttcctaacagttttacaaacatcttctctcattttgtcatttagtcatttgtctattaactttgtgtggcattcatagaacaaacatttttaattttaatgcagtaaaagttgtcatacactttatgggtttttaagtttttccctgtcactagatcacaaagatattctcccttgtaatcttttattaaggcaaatctttattaagattttattaaggcaaatcttttgttaagttttgccttttgctaaactttatgatgcgcattcttcattgattaagattatcgtctggtttctctcttctaagtctatttctgatgttgaaccatccttttattcgtcatataaattctacttaatcctgatatgtcattattttaaaaatacatgattggattcacttaggtaatattagggtagtattttttgtatttttttttttttgggacagagtctagctgtgttgcccaggctagagtgtagtcacaccatcgtggcttactgtatcctctgcctcttgggttcaagtgattctcctgcctcagcctcccaagtagctgggattacagatgtacaccatcacacccagataatttttgtatttttagtacagacggggttttgccatgttgtccaggctggtctgaactcctggcctcaagtgatctgcatacctcagcctcccaaagtgctgggattacaggcatgagccactgcctggccaagtgtagtatttttatgtgtcatgttaaaatggatctttgatttttttgttaattcagtgtttagaatcaagattataataaattaatgaaatgtcttggtcagtttctgagagtttactgtttttctagaacagcttgtgtaaaacaggaatgaacccttgaaatttggtagaactcattgtaaaattgtacctgctgtttttcagaaggcaagatctttgctgttttaatccctattatactaattggtctgttcagattctctatcagttcttgtgccagttttggcataatttaatgggaatttatccattcaactttattagcatgtagatattcctaatgctcgttatattctgttatcatttcaaaaatctcctttgtgtctgtacttttgtattccttttcattctatattttaattatttgaatcttcttttttctttgataactcttgctcatcaagggtcttatcttattaatcttttcaaagaacaattttggttgtgttatttttctctattttttatttttattttttgagacagtcttgctctgttgcccaggctggagtgcaattgcgtgatctcggctcactgcaacctctgcctgctgggccctgcctcagcctcctgactagctgggattacaggtgcctgccaccatgccctgctaatattttttttttttttttttttgtggtagagccaaggtttcaccatgttggccaggctggtctcgaactcctgacctgaagtgatctgcccaccttggccttccaaagggttgggattacaggcgtgagccaccacacctggccttttttttcctctattgttgatgttttgtgtatctttgatatttgcccttaactttttaatttaatttcttattttccagggatgttgcttttttgccctttccccaaattcttgagttgagtacttagcttattaattttaacttttcttgttttctttgaactgtttttaaagctacatatgtacctctaaatacttctttagctctattctacagatttttatgtccagtgtttttattattattcacttttaaatgttttcttttctttgtgatttcttttgtaactaggttatttattaaggctatttaattctgtattttgctattttttgttaatgtttaattttattgtcagagtataggatgtctgtatatttaattctttatagtttatggatagttccattatagtttattatattgtctatatttttaaatattacacatatgctttgaaagaaaggtgtgtgtgtgtgtgtgtgtgtgtgtgtatatatatctccacaaatttgatttataattatattgttcttcccttcatagtaagctgtttattattgtgtgtactttatctgtcagtttctgagagggatctttaaaaatttatgtctgggggctgggtgtggtggctcacgcctgtaatgccagcactttgggaggccgaggtgggcggatcagttgaggtcaggagtttgagaccagcctggacaacgtggtgaaaccccgtctctactaaaaatacaaaaattaggcgtggtggtgcacccctgttgccctagctactcaggaggctgaggcaggagaatcacttgaacccgggaggcagaggttgcagtgagccaagattcataccactgcactccagcctgggtgatagagtgaaaaaaaaaaaaaagatataccttccatttaaaaatctgtgtctgtaaattttgatgtatttgtatttcttacattttgatttatttgtatttcctacagtcttgtcaattgtagcttgatatattttgaagttgtgttgttatatacatatgtgtatgctagaatatacctagatgtatttttgtatacatgcatatccatatatgtggataactatttgtacccatatttatcatcagtatttagtgaacatttacaatgtgctaggccctttctaagcactttgtaattaattctcattacattagttaatccttagaacatacctagtatagtgtctattttaggaatataaatagtatctatctcaggaattccagtagtttttattcccaagatgcagaaaagttatgcagttggtaagtatactttaagatcattctaattgatctggaatagggctaagcattggtattttgaaagagctctttagagattcaaggattctgctacatactyagcattgctgctgtagaatcagccctaggcttgtcctcccaactattacattctttctcccctaataaatagcaatatatacaatacaggttaaacattcatagttctctaaccctgagtttaataattcaatcaagaatcattgctggatactaaaactattgagataaaggttttggggaccaagatattcacatggactcaaagtatcatgccacagttgacttactaattaattacactgggcagaatgtccttttatagtggacatatttggtggtcaccagtttaaccaactgatcaagcttagcatcattaattgggatagtctgacattttgtaccttctgatgggatgcattattgaatatcattgtctgtgaagcattcatgctaaaaatgtttcaccggaatcaagcctctagccctaacttccagtctactggaaatacaggggatattggaataagttaaatgacaccaagggagaaataataagattaaatccaatgccatgaaaagcaaggggagttgttctagtgaaacaaaaagcaagagagacataactaaaaatattgtgtgaagcttggttagaacctgggttggggaaataatatggtagcaacaattggggagatttaaatttagagtggatattaggtgacattttggaattaccattaattttcttaggtgcgataatgatattgcagagatataggagaatgtccttatttttaggagatactggctaacatggttggggtgaagtatcctgatgtctttaatttattttgaatggttcagaaaaaagaagaaacgaaactatgtggttgtgtgtgtgtgcaaacacacgtgcatatacaaatcaagagagaatgggtgcaaatgtagcaatatgttaattggtgaatcaataggtgttcataatatcactgtttcagctttttagtaaatttaaaaatctttaaaataaaacattgggtgaaagagaaaaattgctatgttctacagttcggtgtggatttcaagagstggcattgctcatcccatctttggccctgaagtaactctaaagcataaaataataattgcttattcaatacaaatatagtcaggactgctgttttcagctgggtcttttttctaaaaattacttttattcggccagtcacaattttatttcccattaaaaatgccagtgtgtcacacaaggtggtagtaaaataaaaatcttgagtaaagatttttaacttatttgagttaacagtggattaagagaaattcttgtgaaaattaatgaagccttcaagtaattttgtaaacatgattgtttttatgaacctcctgtaaaagtcaaacagaatgacttttgtaaaagtgaaacgttcatttgcttgaatgttctgattatttctaataattttgtagttggttgttttgattttctaggtgtaaaataattttgtcttttcctttctaattttgtaccttttatttattaccttatttcattggccattactttaagaactgtgttgcataatagtggtgattgtcttgttccagactttaatgggaatgcttccaatattaaaccctcaagcacaatgctggttattggcttgagaccaagttaaccaaatgtcctcttttatattaaaagtttctgttgggaatagatattgaattctcctcaagtgccttttgagcctctttcaagatgctgtttttccctttggcttgttaacatgatgacatataatattgaataattcttgcattcctcatctgaccatgaccttcatttagtcatggtatgtagcatgcattaacatgtaattcagttgtgtttgctaatttattcatgatttttggatttacaataaaaagtgacattagtctgcagtttcttcttgttttcgtaacttggtaggaagaattggggagcttttctcattgccttggaatagttacaatagcgttgagagtgatcacatattctcaatgattgaagcaattgaagaactcatacttgaaacatgggctagagctttctttagttggcaactttctcaatctccrgtgattattgatttctttaaattttctttgcatgtattttgataattatattttccaggaaaataatacattttgagcacatactgtaatgtattagaatagagctatatgaagtattttcagttgtttagtttcatctgtatctgtgatcataacccctttcaggtccccccccaccacctttttttaacactagctagtgacttaatctgtttaatttttaatgcaaatagatttctgccatttttgtttattataaataatttctactgtttttattaccaaggaatttcttttagatatggtaaatctgagatggtcatatttaattagaaatacagactgaagttcatgatagaggtctgtgaactggaaatgcagtttcatgagtcattactgtcaaattaattccttgagtaactcctggattctgagagttcttttaagagactgtcagaggacgagggcctacctgttctcttttcctgccacctggctttccctccctgacgcagcaggtattgtttatcaaactgtcccctgccctggagtctctataacacacagaaacttttgtgggttaaatttgttttttattgtggtaaaaaaaaatttgccattttagcaatttttaagtgtacaattcaatgtcattaattacattttctgtgttgtgcaaccactaccactatttcccaaaccttttcatcatcccaaacagaagctctgtaaccaataaccatccactcctcatttctcccccaacccctgataactacaaatctacttcctctctataaattttcctattctagagatttcatataagtggaatcatacaatattcttttgtgtctggcttttttcacttagcacaatgttttcaaggcacatatatgttgtagtgtgtatcagaacatcctattctgtggctgaataatattccattatattgtatatactgaattctggtatttttgcttgtttgttttttgcttttgagacaaagactcagagggtctggctgtgttccccaggctggagtgcagtggtgtgatctcggctcactgcaacctctgcctcctgggctcaagccatcctcccacctaagcctcctggagtagctgggactacaggtggcaccaccacacccagctaatttttgtattttttgtagagatggggtttcactatgttgcccaggttggtctcaaactcttgagatcaagyggtccgcctgccctggccccccaaagtgctgggattacagatgtgagccaccatgcccagccacacattttgtttatccatccatgttgatgaacacttgaattatttctacctttggctattgaatagtgaataatgctgaaatgaacattggtgtacaactatcygtttgagtcactgttttcaattctttttatacctaagtcatataggagtagaattgctgggtcatagggtaattytgtgtttagctttatgaggattgtgaggtttttaaaagagggatttttgttggttattaaatacttggttattaggggggttaacagaaactgaaaatgttgatgtattatagaaaatcttgaaataataatgattacatctgttctttattcaaatataactggagcttgcccagctctttttcaggcttttccttttcacttctttctcttcccattttttaaaatcctggagtcattcctacctacttgcctagtttctctttgacacatcaacagacctaggcagcttgggtttcagaacatttttctaacattacaaaggacttattttatagaatatactctgccccactctgcctcttccagctagcaagaarcatcagccttgctaacacttttagcacaaaattgttgggatggaaacctaaatgaaaggaaataatgtctcacaaatgttcatcctgttatctggaaacagggattcccaggctcccaacatgtcagtcgctatgtgtgcctgtccttctcctttgttggaggtgagtgaagacttgaaggcccctgtgcctatcatccccatggcttttccggcaccttttccaatatggtgttcctgactctcttgcttgctctgcagttttagctttatactaggctccctgggcttttttataattcattttccttgggtttactggtaatgaaaagggtctctgagtaatggtatcattttttccttacttccttttccatgctctctagattctagccacttttggactctttcttcccagtccatctactgatcccactctgtgttactttccagatcagtccagtccatgctcatgacaaggtattgactcagggccatatctatttacaattacattacattgccatagaaataataaaattctggccctggtcgggtcctacaagatcatgtactcttgttgacatgtgatactctacccctaatggctcttagtggggcactttatgttatttacaaatactrttttataatactgaatgaaaatggtaaattttaaagggatggaggaagatttaccaagcaaatggaaaacagaagaaaccaggattgtaatcccagtttccaacaaaacagactttaaaccaccaaagatcaaaaaagacaaagaagggcattacataatggtaaagggttcaattcaacaagaagagttgcattacataatggtaaagggttcaattcaacaaggagagttaaatgtcctaaatatatatgcacccaatacaggagcacccagatttataaagcaacctcttagagaccttcaaagagacctagattcccactcaataatagcgagagactttaacaccccactgacaatattagattattgagacagaaaattaacaaagatattcaggacctgaactcagctctggatcaagtggacctgatagatagatatctgcagaactctccaccccaaaacaacagaatatacattattcttattgccacatggcacttattctaaaattgatcacgtaatcggaagtaaaacactcctcagcaaatgcaaaagaactgaaatcataacaaatggtctgtcggaccacagtgcagtccaatagaactcaagattaagaaattcacttaaaattatgcaaccacatggaaattaaacaacctgctcctgaatgacttttgggtaaataatgaaattaaggcagaaatcaggaagttctttgaaactaatgagaacaaagatacaatgatccagtatctctgggatgcaactaacgcagtgttaagagggaaatttatagcaataaacgcccacatcaaaaagctagaaagatctcaggttaacaacctatcatcacgactaaaagaactacagaacgaagagcagacaaaccccaaagctagcagaagagaagaaataaccaagatcagagctgaactgaaggagacagaggcatgaaaaacccttcaaaaaattaagaagtccaggagctggttttttgaaaaaaattaataaaatagatagaccaccagctagactaatagaaggagagaagattcaaataaatacaatcagaaatgataaggggtaggctgggcgcagtggctcacgcctgtaatcccagccctttgggagcctgaggtgggtagatcacttgatgcaggagtttgagaccagcctggccaacatggtgaaaccccgtctctactaaaaatacaaaaattagctgggcatggtggtgcatgcctgtaatcccagctattcaggaggctgaatcaggagaatcacttaaatccaggaggtgtaggatacagtgagccgaggtctcgccactgcactccagcctgggcaggcgacagagcgagactccatctcaaaaagaaatgataaggggaatattatcaccacagaaatacaaataaccatcagagaatactataaacacctctatacacataagctagaaaatctagaagaaatagataaattcctggacacatacaccctcccaggactgaaccaggaagacactgactccctgaatagactaatactgagttctgaaattgaggcagtaataacctaccaaccgaagaaagcccaggaccagatggatttatagctgaattctacaaagagctgctatcattcctactgaaacttccaaaaaattgaaaaaggggacccctccctaacttattgtatgagtccagcatcaacgtgataccaaaacctggcagagttaaatcaaaaaaagaaaacttcaggccagtatccttgatgaacatcagtgtaaaaatcctcaaaaaaaatattggcaaaccgagttcagcagctcatcaaaaagctgatcaagcaggctacatccctgggatgcaaggctggttcaacatacgcaaatcaataaatgtgattcatcagataaagagaactaaagacaaaaaccacatgattatctcaatagatgcagaaaagaccctcaataaaattcaacatctcttcatgttaaaatctctcaataaactagttattgaaggggaacatacctcaaaataatgagagctatttatgacaaacccatagctaatatcatacagaatgggcaaaagctggaagcattcttcttgaaaaccctcgtaagacaaggttacttgaaaaccctcataagacaaggttgctctctctcaccactcctagtcaacatagtattggaagttctgcccagggcaatcaggcaagagaaagaaataaaggtatttaaataggaagagaggaagtcaaactatctttgtttgcattgcagatgacatgattgtatatctagaaaacctcatagtgtcagcccaaaagcttcttaagctgataagcaacttaagcaaagtctcaggatacaaaatcagtgtgcaaaaatctctagcattcctttacaccaacaacaggcaagctgagagccaaatcacaaatgaactcccattcacaattgccacaagaagaataaaatacctaggaatacagctgacaagggaagtgaaggacctattcaaggagaactataaaccgctgctcaaagaaatcagagatgacgcaaacaaagggaaaaacattccatgctcatggattggaagaatcaatattgtgaaaatgaccatactgcccaaaacaatttttagattaaatgctattcccattaaactaccattgacattcttcacagaattagaaaaactattttaaaattcatatggaaccacaaaagtgcctgaatagccaaggcgatcccaagcaaaaagaacaaagctggaggcatcaccctacccaactttaaactatactacaggggccaggcggtggctcatgcctgtaatcccagcacttcgtgaggccaaggcaggcggatcacttgaggtcaggattttgagaccagcctggccaacatggtgaaaccccatctgtattaaaaatacaaaaattagctcggtggcacacatctgtaatctcagttactcaggaggctgaggcaggagaattgcttgaaccagggaggcagaggttgcagggagccgagattgcaccactacactccagcctgggcgacagagcgagactcagtctcaaaaagataaaaataaataaataaaaaaaaataaaaataaactgtactacagtgattcagtaaccaaaacagcatggtattggtacaagacacagaccaatggaccagagtagagaacccagaaataagattgtacatctacagccatctgatctttgacaaacctgacaaaataagcaagggggaaaggattccctatttaataaatggtgctgggagaactggcagaaaattgaaattgggccccttccttacactatatacacaaatcaactcaagatggattaaagacttaaatgtaaaaccctaaactataaaagacctagaagaaatcctagacaataccattcaggatataggtaccagcaatgatttcatgaagacaccaaaagcaattgcaacaaaagcaaaaattgacaaatggtatctaattaaagagcttctgcatagcaaaagaaactaccaacagagtaaacagacaacctacagaatgggagaaatgtttgcaaactatccatctgacaaaagtctaatatttagcatctataaggaatttaaacaaatttacaagaaaacacatccccattaaaaagtaggcaaaggacgtgaacagacccttctcaaaagaagacatgcatgtggccaacatttgtaaaaaaaagctcaacatcattaatcattagagaaatrcaaatcagaaccacaatgagataccatctcagaatggttattattaaaaagtcaaaaaacaacagatgctggcaaggctgtggagaaaaaaggaacacttttacactgttggtgggagtgtaaattagttcaatcattgtggaagacagtatggcgattcctcaaagacctagagccagaaataccatttgacccagcaatctcattacttgatatatacccaaaggaatataaatcattctgttatraagacacatgcatgcgtatgttcattggagcactattcacaatagcaaagatatggaatcaacctaaatgcccatcagtgacagtctggataaagaaaatgtggtacatacacacattttctatgaatactttgcagcataaaaaggaacaaaatgatgtcctttgcagagatgtggatggagctggaggccrttatcctttagcaaactaatgcaggaacagaaaaccaaataccgtgtgttctcacttgtaagtgggagctaaaagatgagaaggcatggacacagggaggggaacaatacacaccggggcctgtcagaggttgtgttgtaggaggaaggagaagatcaggaaaaatagccaatggatgttgggcttaacacctgggtgatgggatgatctgtacagcggaccaccatggtcaccatgtgaccaaacatggcacatgtttacctgtgtaatgaatctgcacatcctgcacatgtacccttgaacttaaaagttggaaattaaaaaaaaaaaagaaaatggtaaatgtgcttttaataagactgcaagatcaacttagattactttctatgtgaatggtaccagcccactgtagttacattgactttgcctgctggccagaagctctaattaacagttatatgtttttgatatttaaaaaggataggaaattaatgatagatgtagttgttactaaaaatacttcaaaatgtgagatcctgggcaaatttaaaaagatcttattaaaaaactgctgtgcttaaaagtttagaaacaactgatatagttcatcccttctgttttacagacaatgaaattgaggctcagagaagttcctgggcttatccagtatcccacaggaagtcagtgagttcattaaagaaaaatacttgtacctctattagtagcagccaatttctagaatagatcatatttttttaaagagcacatcatggacattgttcatctagtgtttgcttcccttttccctttctcatatgtataccgattttcgtctggatatctgcttgttccccagattccttgtactttgggcaaagttgatcccagttgccaagctgggtcttggttggcttatacaagttttgcttagtatacttcattgcctgcaccagtagaactttctgtagcaatggaaatgttctaatctatactgttcagtactgtagccaccagccacatgtgactcttgagctcttgaataaggctgatgtgactaataaatttaatttttaaatcgtatttaattttaaatagctacatgtggttagtggtcactttatgagatgtcataacatgagaccattgcctcttcccataagcccatgacctaagcagtccagtcaggctgaatcctgcttggaattctgtggtgtaagtagtttcctgatggatatgaacaaggcaacacttattccttactgctattagcagctatcttatgacttgctaagtattatacatagaagagtaaagaaccagaagcaaatatgtgctcctacattagatctaaggccattagtgaaccttggatcaactgactctgaagccttgcctacctttgcacttccaaatacatgagctaatttgtcacctttgatgtgtaagtcagttggagttgaattttctgtcatttcagccaagagcaactaagcagatacaaaggcactgatagacttcatgttttatataaggcttttgagtttctgatgggcattgtcatgaacaaattttgtaattgagggagagggcttctttgtggtaaaagatgatgtgaacaacctctagttccactctgctgcttgcttgccaggtaacttggacaaatcaattttcttcttakatcccaaggttttcatggggctggaggccattatccttcagcaaacttcacgtaagtgaggattatgctattttacaactttaaaaataggggcctgagtgggtttatacacacaccaggctttatgttacttgctggggaaagaaaagtgaatacaaagtaaaatctggatactagtcttcgggtgcacttagtccttaagaggagagaccataacagatgtgctctggatcttgcctgctgtagctccttcagtgggaagtccccttactgaactggtaaatacagtctgctcttgtccccagggccttgcttagaccatgagtagactcctgtcccaaggaaaaccaacacattgactggccagtgatccactagatatttttcttcatggcttgagagctctggagctgagatgtcacatggagttagggctggaaacaaagttgttagggaacagaggctctagcaactgtagacagtggcatgtagacaagaggaacagatttgcaggcagaaggagggaccattcagagaggaagggggacaaggtaaaaggaggtatggtagaaaaagggagagaaaaaaagaggacaatgtatttcctgggccttgaagggtgagtagggcttgccaagtgaaagaggatgaagaatattcttggtatgaacagggtcacagagctggatgataggtagagtaatacctatagtgggattagtacaggatgcacagtggggagtctggaaaggaggctagaaaaaaaatgggctgtgatgaggttttgcagaattatctatggctgcttagagctctggattgtgaagagtcatccaaggttgttacagaaaggagacttgtcattagaaaggggagaaactggggcatggctgggaaccattaagactagagatgctggagacaaaaattatgcttcaaaagaaaaactataatacacctgttcctagctgtccttgagtttttcctacagcttggactatgtcctaaattctttgtgggctataagtctccaaatcaaagctttcaaatctttacttttaaaactgggaattgcactgctcattccactactcagtatttactttatagtatgctgttcccttatgcggtactaaaactataggtgacagtactaacacctttgccatgcaagtcttggaagtccagccaggcctgcatgaatatgcttagacagttgcaaagtggttccactccttttatcttagggtcyacacctattcccactatgcctctgatagcaggaagaagttagaatggtcttcaccctttttccatcttcattagccaacaccttaagattaaggtattataaaacccaaaaggagggattgaaaccaccattgcaaaattgtaactgagtcagtgaaagagagctgacctaaccaactccatcttgcctctaacctccaagctatccttgttcattcctgggagtgggctgaaccagctttgggaggaacttagtttacagtttaaaacaaagatgataacaaccctttcccaaaacaaacctccttcttgcctgaagactagattgcctttgtaggactaacaagttaggcacaagattagaaattatggtttaggagtcatgcagctggagctacaggattctgaccctccctaaactctcataagatcagtgcttgagatattttgcagacactgcacttgatggatcagctggcaccacacagattgataaactggcttatctgatcttgtggcctccactcaggaactgactcagggcaagaggacagcttcatttccctatggtttcatctcagacccaaccaatcagcactcttgactcactattcccttacccaccaaattatccttaaaatctctgatccctgaatgctcagggagactgatttgagtaataataagactcccgtccctcccattcccatccccccaccccaaagactagagatgctggaagacctgactaagagcaacagcgctggaataaagaggaaataatagatgaacaagacatttcagaactagaattgacatggttccacggcagatctgatataggacttaggcagagaaggattaattaatgagagtaacttggtttctagcttagcaactgtgtgatgctgatgttctttagtgaaaaaaataaaaaaataaaagaccaagggtaagaaggaccatggattcaggttgtgattatatgttgatttgagtttcataggggacattcaggttatgacatccagtgggcaattggaaatagaagtatagacccataggaagggtggtgagagttatacacgtgaatcttgtcaagctatgggaaatcaatgagattgttgagtaagtggactatgattgaattacccgaagtaatcattgtcctataataccagagcacaacctggaagatacagaaaactcaggcataggggagggtgtttgagaagtaaatctggtaaagattttgaaagccttgaagaaaacctagaagaaaagtatctggaagtgtcttagtctgttttctcttggttataactgaatacctgaaactgggtaatttattatgaaaaggaatttatttcttacagttatggagtataagaagtccaaggtcaaggggctgcatctagtgaggaccttcttgccagtggggactctctgcagagtccctaggcagcacagagcatcacatgcagagggagctgaatgtgttagctcaggtctctcttcctcttcttataaagccaccagttccaatcccatgataacccattaatccattaatggattaatccattcatgagagcagagccctcctgatccaatcacctcttaaaggcttcacctctcagtactgccacattgggaattaagtttcaccatgtgttttggaaagggacaaatattcaaaccatagcaggaagtaagaagaaagggatgattactttcaaggaacaaaggaatgcctctgtttcccttagcaggtgtcaggtgattgaagattttttwaaaaaaaaaagaaaaacaaacctaattctgacaattatttggaatcagtctgtcagccgcttttgcattcaatctttatgtcatacgaatgtattgaaagagaaaagttaaatttggtatttactgaatgaatgtacagtatactcaggaacctgagaatcagctccacgtgggatgttttatgtcttcattctcacttctctcttcctgagattctgaggctgtttgcctgtgaatgatrtggtttggctctgtgttcccacccaaatctcattttgaattgtaattgccatgtgtcgagggagggagttgattggatcatgggggcggtttcccccattctgttcttgtgatagtgagtgagttctcacaagatctgatgattctataagtggaagttcctctgtcgctcttctctctcctgctgccttgtgaagaagttttgccttccactgtgattgtaagtttcctgaggcctccccagcctacaaaactgtgagtcaattaaacctctttcctttataaataaccccatgtcagggaagttatttatagcagtgtgaaaacggactaatacaaggctggcgcggtggctcacacacaggattacagatcctagcactttgggaggctgaggtgggcagatggcttgaggtcaggagcacaagaccagcctggccaacatgacaaaaccctgtttctactaaaaatacaaaaattagcctggcatggtgccggacacttgtaatcccagctactcaggaggctgagacacaggaatcacttgaactctggaggtggagattgcagtgagctgagattgcaccattgcactccagcctgggcaacagcgtgagacttggtcttaaataaataaatraaataaataaataaataaataaataaataaaacagatgaatactattgtgaagttaagcttcaggtcttcagagctcaagaagggaaggctcgagccagtcaagtagctcttcccttttcatccctttggtcagcatatgctgggtttattcagttgagtaatgaagccttttgggtaactggtgttttacccgtgtctttaaggtttatgtattttttcctttgttagagaccctttcatggtcactatgtggaattatccttgcctacaagttcatcctactgtcattgattcttctttggatcactctaaataattcccgttctccttagagaattctcaactaggtttttcaagtcatgcaacaacatgccaagggaaatctttgcctgactaatagacttggagtaatgatggttataacctgttgagatttttaaaaagctattgaagagtctagccaagcctattggctaaaaactgggtcgtgtggctctgaatggggagagggaactgacagctgccctactctggctatasaatgtccgccattaaggacagatcttatttaacattttacaattgaaaactgtccctggttttcagataatgcttaaaacaaacaaaaaacaaacaaaaagaacaacaacaacaacaacaacaaaaaccccacccaactcaaaacattaaagaatgaatatgccacccctgttcctgtaagtggaaccagcygtccacgcttcatagcttttgtctagtcccttgaacaaaagttcagctgcactgtgaagtcccacatctctgctcctcagctagctaaccctcatgtggctgctccccttggctctgacactcatttcagccctgtttcagagcccctttggtacctgcttctgcactttagactactgcacccatgactctgcagttcacccaggcctcattgcaccttttcttccaggtatgaatatgctctctgggccgaccctggtgyagtggggccaggatccaaacctgcctggctagctctgttcacctctccatcagggaagggggatccaacaaaatgtggcagcactcttagtaggacaaaacagtactaaacaagagcttttgccagtcattcttacctcttagtgcttcattttccttatttgtatgaaaccttcataataaatacttgtcttggttacttcacaggttcttacgtaaatcagatgattcttgcatagatcaagtgaggtaatggaagggaaagcaccttaaaaagagtaaagcgtagcattttgttatgggaattttccaaaccattttttgaagcctgttacctcttgaactagcaagtgtcaaatgawtcttcctgcagaagttctcagaccacatggtgtcagtgatgagctttaatgactctctggctccccttgcccaccaggggcctcttccctgcctctccaacctttgctcttgcatctgcccattcagacctcagggccagcctaaccaggctccgtattgttcctgagcactccctttcctcttctgtccttgtgtggctgtgctttatcttttctgacatgaatgccacctagttcgccatctcctgtgaaaaggcctcccattcttcaaatgtaaactgtcattttagatgtgtattaggtatctctcactgtgtaacaaatagccacaaacttagtggcttcaaccaacacatttattatctcacagtttctgtaggtcaggaatctggatagggcccttctgggtcccctacttcagagttcctcacaaggctgtagtcaaggtgtcagttttctgaaggcagactgggraaagatctgcttccaggcttttgtgattattggccagatccagttccttgtgggctcttggactgatgacctcagctccttgctgcctccgctgcctgctccatgggcctctctatgtggccgcatgctttatcagatccagagagtcagctggcacgatggaagtcacggtcttatggaagctaatcatggaagtgacagggcatcatctctgcaatatttcgttggttagaaacaagtcccaggtcccgcccacactcaggtaggggtgatcatacagggcatgaagaccaagagggtgggggattattggggaccrtagtagagtctgcttgtcacagatggttcctctatcagcctttacttatttcttccaaccaartgtgtgatcttttccttttgtgagtcttctttataacaacgtattttttccagtttacaattcatggctggtgtttttacaattgacttaaaaacttttttctcatgtaaccgtttttgctcatctttaatcatccacttgcaaccccacaacagtcttgtatttagcaactgttgtgcagaaggcactccttctttccaccctttgaaactaaagaaggaccaagccagttgctctcatgtttaattcctgagtatttttctccacaatagccatatagcatccattgtaaaaccttcagatttgccaatttggcatcaaaagcagtgactcattcatgtctatgtaacctggctggagtggtccatgttagcctgatttgcacttagagctgaagcttgttaccttgtaaaagagaagcaattttccatcaaagatgcatcaaacattagctgtttctgagtagtgcattgttgtgtttttcctaggggccttcgtggatctcagaaatgatgctatctgtaaaaatgaatttattctcctttaatctatctagcttcttttcccttaattcacttggtagtcctcctgttttcaggtcacaccaaatgatttgaaaaagaggactggctcttggggaagtagcattttaattatttcccttttgtcgagtagtaggctggatatcattattgctgctggagatgttcaagagaatgaaatattgaatgtgctttaagaggcttggaacataagagagatatgatatgtatttcatatatgtgggcttgcagacccaatttgactcatctagtctagcttcccatgctttgaggctagtctctacttaactcgctcagatgacttaacaccttttttattttttgcagttttaatggataactagctagtccttagaagacgggtagagaaacacctgtcggactttagtaaacaccatatttctagtgttgacatgatcacatcacaggaagacgtgaagcttggcctctttcagaaaaattcagatggaagtctacttaaacttggaggaatcattcatctgttgagtaagatgcagaattagtcagttaaagccagctagagatggaagcatataagtgtatgtacctacattttgggtctttggggagccatcagactaaaagtcaattaaaacttcagtagagaaatttaaaagtggtttctcctgggcaagagaaagatttggagcagagagtgctcagggaaaagcagaagagtgttgaagatgtaattaatacagttaatagctgggaatgggaatcagtgcaaagccccatttgagaagaccctgtgagggactccagtttgggcctgaaagccacagtatccaaggctcaggtccaactcaggaatctgaagccactgcatggccagcttaaagaggagggtgaccaaatcttgccaaaatatgtaccacctttcttaatctcttaccaatctgtaaattagaacaatgaagggaaatggggtagtgaaaggatgtttttcctctcttattccttgggtatcagcttcctttgcattcctttattcatcttacgctctaatatgttaaggctttttttccccccagtctctgcccagtttatctactctcagatgatgttatcatagaattcatatacccagcctctaccataagatgtagaaccatatccctggcttgggcagaggacctcattatgcttatgttgcattgtgacaccaaatttgaaatgtgttcaaaataaagttgattgactcttgcagtatctgtcactcaggcataactcttaggaatcatgttttccattttcactcccatcaatgcygtttggattctgaaggtagtgtggcagcatggaaagaggatgaggtgctggcatccatgagatttaggttcgaatcctgccccagccacttccgagctggtcaccatgggcaagcatgttatttggtatgtgtgagcctttagagataagttcccttatctctaaaaccagcatgataatccctgcctaccacgtgggactgttggagaatattaaatgtggtatgcatgtaaaccacctaacacagtgccaagtgcaggtgacgggctcaatgacaagctaccaatggttagtttgaatgcattgagcacagtgcctggcatgttcaaggccgttgttttgggatgtcattcgctttcaggcctcccctggcattgtggaacacagagctctgcacatagtgggtcttctctaccttccctagcactttcaccagatgtgtttggctttgatgtttcagaggaaacaaaagctgacccctttgtgatcccctgcagcttacagccactagatttacaaatggcttatgtctaatctcctcccctcctgcatttatttcgatacaatgaagttggcrtttctctgtccttctgctggagttaacccttcccctgggttctggatcacatcccttcctgtccagggacccctccctttcctaattgtgcccacttcaaccacaccttctttactggttccttcccatcagcaattaaccatgtccaggcctcccttatcttaaaaaaataaaatattaaaagccatgtcatgatttctgtcctccccctacagcttccaccctgtattattccaatccttcacagccagacttcctgagcttcttccacaccctcattcccacagtctgcctcccactcaatttcccaggcacagcattctgacttcacttttccttcattcagattagtctcactagggtcacctgtgaccttgtcactaaggccacactgctgactacactttccctattgaaatactttctttctttgtcttctctgattccatattagcctgatttttctcctacctctgaccacacctcagtttcctttgcaaacttttctacttttgcttttcttaaatgttgatgttctccactattctgtcctaggttctcttcccctctaattctgaacaatctcccagggaaagagtctactcattcatttgctgtctgtacacaggtgactcccttatttctgtttccagcccagaccttcctttctttgaagtgccagatctaatatctgataccttaaactaaaaactgactgaatttatatcctttcttggttgcactgaaatactcttcctgtgatggctcctcatcaatctatagtggtggctcacacgccttagtgtgcactggaatcacctggaaggctcgtgaagctacagagtactggcccgcaaccccagaggmtccgagtctgtaggtcatggacggtgccttttattttgcatttctaagagctcacaggtcatgtctatgctgctggtaaggaagctctgttataaggaaatcaggcagtctttcccacaccctactctacctcatatacctccccacttccccactagcatctaaatattataattttgccagttttgccttctacatacctctctagccaggaccttccattcccttggccactagtctgatttagtgcagtgacctattaactggcctcctgcctccrgtctcacttttcctaaatctgttccctgttcagaaacctgtctaagcttcccaatactttaatcatgtcagccttttgccaccattctcctatagctccccattgcctttgtgataatccaaactctgtaatgtttaactggcctctgcctatctatgtagtaccttctcttgttcctccttactctgcacagcatacaccaggcacacagaaaaatatcagcaatttatatatataacaattactgagtgcttactgtgttttagcccctgtggcactttaacagatattaatttcatttaatcctcccattaactccttagggtaagttacattttacagacaaggaaatgtgacctattttgtaatgctgccattgtcctgtataccagtcctgtcctgccagttgtgtccaaaataacagggttggattcacttataactcgctacaggccaggcacggtggctcacgcctgtaatcccagcattttggaaggccgaggtgggtggatcacctaaggtcaggagttcaagaccagcctgaccaacatggtgaaaccctgtctctactaaaaaatacaaaaattagccgggcgtggtggcaggtgcctgtaatcccagctactcgggaggctgaggcaggagaatcacttgaacctgggaggcagaatttgcagtgagctgagattgcacccttgcactccagcctggtcgacagagcaagactccatctcaaaaacaaaaaacaaaaacaaaactccaagagacaacaacaacaacaacaaaaacattaatagtagctaacaattgttaaaaaatatacttgtgccaggacactacatgtaaacataactcatataaactatttccagtgggcaaaggaggaaattcagagacaaagagtaatttatttgtttggagccacatagctcaagctcataggatctaggtttgaatttagatcttgtgactccaaagctcatgctatctgtcatgcctatggatggaagcagtgaaattatataaggagagctgttgatcattaggcagcttctaaaatttaaaacccatcactgtctataactgaattataaaattttccacaaccctcccaccctaattggaacccacccacatacacccatctttcttccagatcccatcataccttggtgggaagagcttggacgtggagtcagactgggttctgatgcccctctactaaccatctccttggatgaaccctgggataagttagtttacttctttgaattgctggttgcttttcattaaaactcaggatattaacaagcaatgggtttctgaaagaaaaaaaaaccctaagataataatactttcctcatggggttgctgagacaaatgaatgtgagtacccacttctccatccttgtgccttaatgagatagtaccttatccgacagtgccttaatggaacattgggtattattgtaatggcttccttaccatctccttgcttgtgcttacactgtccccctcccctattcttacccccatcactgctccccatctatgctctacactgccacccgaaaaagatttctaagatacaaatcctagggactttccgttaatcgttatggtgggctattagattcaccaggaggaaactrctgaaaaccaaaggcagatacaccctcccactgaaacaactaaaaatatttggatttaaaaaaaatctcaaagcattaaagaactgacgggcattaccaggttaaaattggaattgataagacaytgtaggtttgaccaccagttgctggggacagaaataaggtccagactctttataagaagctggaaccccaaagggctacaccatcagggtagacatgaaacagcagctctcmcatggaaatgcagcccaggttcaagctgactgggtcaatcaaagaatctaaagtcttgaattggtttaaggactggtgcctctggatatctggcaaaatcaagtggaaattctttcaaaagaaaggtttcttcaacctaggcctcagattattcagtgaccagcccataaatataaccaggcatccaaggaaatcatacttcaaagacaagaaccataagaaaccacaaacaacagaagcagctcttcaaaaacatcatcaggtactagaatcatcacagtctaaaaaatgtctatttgaaatcagacttcaaagacaagaaccataagaaaacacaaacaacagaagtggcccttcaaaaatatcatcagatactagaatcaccacagtctaaaaaaaaagtctgtttcccctgtttaaagaaataaaagataactttgaagataactctgaattatgacatagcaaattggaaaagaaaccaaaaaatccttctagaaataaacattaaattaatgaaattaaaaacttgtggatgaagaaaagtgtatgtttgattaaatattttgaagagaaaaagtcagtggatagatttaacagcagattggataaagtggaagagaaagttaacaaactggaagacagtaagaaaaaaattattcagagtattgcaatggagagacaaatagaaaatgcagaggagaaggcaagagacatagagaacagagtgagaaggtttaaataagttgaattagagttctagaagaagatgagacagaaaatgggcaaaggtgaaatttgaagacagtggctgagattttccatagcaggcgagataccattaagcagattagtgactgcaagtctaatttttaaaaaaatatccaaatttagatacaccaggaggaaactactgaaagccaaaggcaaagagaaaaaagcagctggagaaaaaaaagtttgtcttcaaaggagcactagactgaccaggataaccttttctcattaaatataatttaaccatttctcattaaatataattctgatcatattattctcagaatttgcaatggttttccatcactaaaatataaaatagatactcttcagaatgtcatatgaggcgtttcatggtctggtccctacacctcatttatacacacacgkctttcctcctactcagtttactcttgcttgtgtgcctttgcacrctctcttctccctttctaaaatgctccctcgtcmcatycacctagctatttcctactcagcctttccattctcaactcaagagtttagccgctctgtcaaactgcggggctcccatctcattgcccttaggcacactgcttgccagcagtcatgaacagcatgtgctttcaaaatttgtttgcatttttgtctcccttccaacataggagcgagctccctgaggacagagcttgatactccatcaatattcaggatgctcactgggttgactccagcatttcaggaggtcccatgccatttaaataatatcttgatacaggttttcatggctcttttcatagtgcccagttcttgctagtgtggagaacaggtcaccactgtcaacaccagcrtcctgcatgctgtcattcactggctccccctcttcactactcctctttcctcagtgaagctggaataacagtacccactttacccatagtataagttgtaagttaaaagaggtaatataggcgagcatgctgtgaaaattctttggcatcatacattttcattagctctatatcagagtgaaatttgcttaggcctagggattttgtgaagaaaggagcttattggtgctcctgaagactgtccctcccaagtcttgccttgacaggagctagatktggggtcctagaatgatcataagcactcgttagcccagcaagcttgcagcatcacaaatgattattcacagtgtatgttaccttgcccctgtgaggacttgtgttttcatttctacatttcactgaagagaggggggcccataagataagttttcctagttggttttgagagatccagaagggacatattttcatttacaaatacatactgcattcttttcattgaactctttggaaattgtaaatttctgtggccctccattcagagattgaacragcttggatttgtcagctttggacttaaatcactgccattatcttaatttgggttctgattgtgtctcacctagattctaacctcagctttctaagatctctgctaccattgtctcttcattccagggttctatcaaattcatagctctaaaatacatgtgtgatatatagctcttaagagaagaattgccctggcatttataatgctttataggatagtgtcctagcttgtcagtttcattgtctgggcctgtatgttagaaagtatattccgtagagaatagcattaaatcctaaaatatcagtggcttaaacaagaaagaagttaatttctatctcacgtagaagaagatcagagacaggcaggccaagacttgtaggatagctccacagtcttcagctcattctgttgtactgctctgcagagtagaaaacacccttgacctctggcctccaggaccaggatgagcgatcaaggtccagctatcaaatccacattccagcccgcaggattgagaagagagagaaggctgggcctctgccttgtaaggttactcctggaagtcactaacaacacactttccccagaatcttgttgcctaaaatgtaracatgcagggatgtggctgagggatgtggccttttaactaggtggcagtatgcccagctaaaaattggagttctttttactaggaaagaagaggctggataattgggcagtgactagtccctcccacagggccattctaccagcgttatttcccccctattctagttcctccctacccagcactgtgtccccaacctgttaatagctacagtaaatcttttactgggcctttaccatggcaggtccactcacagatctaggtctttcacaagttctggcctttgtctggagtggccttcaacttccttatttctctttggaacatctatatctatatatccttcaaggctcaactcacttcctcagtgaattttcttcattaacagtgacagaacattatcccttacttttgtgtatagcagtgtggtgcactggaagagtttcatggatttaggggttgcatggacttgcatttcaatatcctctctccagcttgggctggaaagtttctcagcatataaactgtttgtaaagctacagcccaggtctgttttctgagttccagaccttcattttgaattgcttactcagtttcttcacttaaaagtctcatatgtgacctatcaaatagaaccacctccgaaatagaattattgatctttaccccttcctcttgtctttcctgtgccataagtgatgccactatcaacctaattgctagtgtcagaaagctggaaataatccttgacttctcttagctgataatccttaagctctcatatgtaattatcaccaagactattcaactccaaaatatatcttaattccatctccaatgcctgcatcacagctccagcctctcatgccttgactattgcagtagcttttaactggtctccctacacccactcttagcctgctcttatcttgccctgggcaatgttgctgtcttgcacagaatccttacccatcttgccgttgtacttaaattctggcttcttatgttctgcaaggcccacacctgacttggcacctatctacctctcattctcatctctagccatgcccattcttgctcactgtgctccagccatgcctcatggtctttgttctggtccttgattgtgtgaagaacttcctgcctttaccctttcctgtgtgccattcctrtcttgggtctctcattctcctcttcactcctgtatacactgtccttatgtctcaatttaaattctttccctgatctctaatctaaatcatatgtcctttcccccttctttttgggattattctttccttcttagcatttattacagtttttattttttttgagacaggggctcactgcgtcgccaaggctggagtgcggtggcacgatcctgattcactgcagcctccacttcctgggctcaagtgatcctcccacgtgaacctctcaggtagctgggaccacaggtgtacaccatcacacctggtggattttttttttgtattttttgtagagacagggttttgccatgttgcccaggctgatcttgaactcctgggttgaagtgatcctcccacttcagcctcctgaagtgctgggattacaggcgtgagccaacatgcccaccctataattttatatttattgagtgattatttatatgatattcccacattagtctatagggctgggatcatatttcttttaacactggatcttcagtgcattaatgtgttcaataaatacacatggaataaatgaataataactgatcttgtgattaaacaatgtagtagagtctcattaaattgacaactttgctaattttttttttttttttttttttttttttggagagacaggttcttgcaggctggagtgcagtggtgcaatcttggctcactgcagccttgaattcccaggctcaggtgatcttcccacctcagcctcctgagtagctgggactataggcgagcactaccatgcccaactaaattttatatttttagtagagacagagtttcgccgtgttgcccaggctggtcttgaactccaaagctctagtgatccttctgccctggcctcccaaagcactgggattacaggcatgagccacccaagaccagccgacaactttactattcagtgtggcaagacatggttgttggaaatgtattaaggtgattcaccttttcaacctggcattgtgtttctttatatccattgactgttatctrtgattctcacctgtaaggctttaaaccttggtttaatttattagaatgtaactttgtctgaacaaagcctcatttctgccaggatatccttctgaatatagaacctgaaaaggtcatgttcaggtctgatagaaaatcatgattgggcccacttctatggcttgccctctctcttaagatgtaatttggtataacattttgaacagccgacttgctgttgttgggatggaatctgaggtaacagtcatttgaagatggagccatcagtgatcatcacagaaagctgtttgcccaggawttaggctgccttggaaacccagtcctctcactgcagtgtcttgattggtagcatttgagaccaaactagttgtcaaatatctaagtagaggatacttattcatggtaattccacgctttgatttttttcctcagttactttgttctgcagagcacattggtgaggtatgttatggaacaaacagatcaacaacttgtgtggttttttttctctctacaattataaaaaatgttctaaaagcatttgatgattttggaatcctgaattatgggtttaaaagaaaagttgaaccttgctgatgtcctctttcactgatagagagggcaatctacgataggaaagtttgtgtttgcttttactttttggaaaacaatgaggattctgcattcagagggcacttcagtaggtagatttcagcatagatggaaaagcaaacagttgatcattcttaaaccccggtaggtcagatcatgtcagtgtttccagagtacgcccagaatggtaaaagttggctttaagctgagtttttgctaaaaggcagccagtcctgaaaaggattgatttatttactttggccttggcaacatctaaatgatgataagtgcaagtttctcttagctctctggagaggctcccacgtaaattggttgtgacccctagaatccagaatccctaacatagttggataagaatattttgtggggaaatctaatgtaacaagtaaagattcaaaattttaaatgtttagaagtgtgtaatttgctgcttttgttcatgagtgtttttaatacttctggtagagagcctaactgcctctttcctcaggagatgtggtttcagtttcttgggtgaatgtgcgttttgtaagttttttaagaaaggaaattaaacattaaaagactttaagtactttactctttatataatgtcactaagaaaaagccaggaaaatcagggttgggtttttaaatttatttatttaataaatataatctattttccaccattttgtttgttatggctggtaccaaagtacttttaaaagttaacatttattatgattttgttttatttcagcagatgtgcataataaattaacctatctctattcttcattttgggctggggcagcatttaacatctagttttttggaatttcgacacacaggctatttagtttaattcaacatagtttgatgctctccagttgtatgatatttatgatagtatgtgaataatgttaagtagataaaatgtggtctgctgaggctgagtgctcagcctgagtataatactggtatgtgacaggtccactggcggcctggggttcttctgtaaagtgagtagtttggggtaactggtatccaggcatctttctagattgaattttaaaatcccactaattgatatgcatctggttgatgactcctcttctctctttatctttttaatgtaggaagagaggatggtgatgcaccggttacaaaagatgagaccacctgcatttcacaagacacaagagctttatcggagaaatccctgcaaagatcagcaaaggtcrttgcctacagattttctccacgtgtccaaatggctttcacctgagctacttgttgaagatctcgtgtgattcagtcaggactgtatttggtcatttaatcagaaaagttagagcagagaatcataaaaagtgaattaaaaaaaaaaaactttaaacatataaatacgaatccatcttcctgcctttggataaggggtcaaggccttttctttgagtgtgggtatgttgattggagttctgtgttatctttcttgcttaaaccacacttgtaatgcagcatttatcactttgagttttggtggagtgagaatttagacagtggagaagcagtatgaatatagactctcttcagatttgtacagtttttgctccaatttttttgttgttaccatgcccatacctaatttaaaaataattttaatgtcttttttagtttttccaaagtattcaatttagttatagaaacaattgtttttatattcctatttcaccattttgcacaattcacttgtattctttaattatagaagctagtgtcattttcagatgtgggatgaaacagctgacttcttttttttttgttttgagacagagtttcactgttgttgcccaggctggagtgcaatggcacgatcttggctcactgcaacctctgcctccctggttcaagcgattcttctgcctcagcctcctgagtagctgggattacaggcgtgtaccaccatgcctggctaattttttgtatttttagtagaaatggggtttcgccaggctggtctcgaactcctgacctcgtgatctgcctgcctcagcctcccaaagtgctgggattacaggtgtgagccaacatgctcgactaaacacagctgacttctagctgtgcacatagctcatagtggcagaaatggtgaagggcaacgtataaagtggcataatggcatgaggctttatgtttcagaagcatccatcagtgtgtttcatatgggaatgcagtgtgcttactctaccaagcaagttgattaatagagtattgctcttgcatactgacatgaggaatttctaaattatactctatatatttgagtactaactgtgctccaggcagcatgctaagtgtgggagattagaatgaatggaaagcctggggatggatctggctcacagacctattttgtttgacctgtgcagtatttaaaaattttgacttcatggctttcagcaaaaaaaaaaaaaaaaaaaaaaaagagtcgtcggtgggcgggggtgggggtgttcacattaaaaattagacttttggcttctcttgtcaaaacaaaacatttggtaacactgggccaaatttctaaatgactgtagtcagagctgartagaggcagccctggaacctgtgttctttgatttgctactgccctccaaacatgttttccctctcccttctcccttttccctatctccctttcttttggataatgtttttaatggattcaaccaaaaattacaaggcaaacagcacttgcctgcgaaacttatgctatggtagagtcatttccatgacaattaacattatatgaattgcaagtaatgtagtaatgtcagcctactttatacgtttccgtgctgtcaaacattaaaacaagaaacaggaatttccagttcagacaagatggcatagacctattttttcttgctcctcccactgaggataactgtaaaccctggaaaaaacaagaggcaaccaaaggagaattctgaaaggtgaaaagaggaaggcaaactagttatgtcagtactagagaaacaacataacagcagggacctcacaacccccaccaacaacagcaacaacagaaggtggcccaggcctagtgtttctgaatgccaacctagcaatagagggtggcccagctagactaattctcacccatatctaacagaaatccctccagcaacatccacagcacctgtaaagagccctaatgaccgtaagtggttaagagaaggggtttccttcctcaccggacctgcagcttctctttcccaccaagagacatcaggtatctgagtggctccaacaagaaggattctagaagtggcccagaaagcctctttgtttctgtgggactgcgactctcrtctacccagaggcactgaacattcagagacactggacatctacccagaaaacaccaggaaaggggatctggccacaacatgcagtcaagtatgggaagcccctgtgttctcacaggcaagagaattttgcttcttcacccagagacaccaagcagctgggtggcattagcaagggagatctggtcataatgggtgtgtggtccaggaagcctctttatccttgtgggccagagacttccctctcccactcagaaacactgggcagccaggtagcaccaataaaggtgatcctgccacaacaagaaacccaaaatgggaagcctctttgtccttgcaggctggagatccccattccatacttagaccaggtggcctggcttggggaatttcttgccacccacataggcagtaccagtagagaccagcgggagccccagtgataccatataaaccaaacataccaagatagcactgcaaaggctattttccaaggaaattgtcattgaaaytacagcccacaaaagtaggtcaggacctgcatgttaaaccccaacagggtgtatgactgccttctaaaataaaagatttaaatgagacccagagtgtcttaacatgataaccaaaaggtccaggatacaattggaaaccaccaatcatatcaagaaccaggaagatcacaacatgaatgagaagacaatcatctgatgccaacactgaggtcttgcagttacccaacaatgatttaaaaatagccatcataaaagtgcttcaataagcaattaaaaactttcttgaaaccttggagaaaatagaaaatctcagcaaagagttagaaattataaaaaggccgggcacagtggctcactcctgtaatcccagcactttgggaggccaaggtgggcagatcaccttgaggtcaggagttcaagaccagcctgaccaacatggcgaaaccctgtctctactaaaaaaatacaaaaattagctgggcgtggtggcacatacctgtaatcccagctactggggaggctgagacaggagaatctcttgaacccaggaggcggaggttgtagtgagctgaaatcgtgccaccgtattctagcctgggtaacagagcaagactctgtctcaaaaaaaaaaaaaaattatataaaggaccaaatgagaagtatagtcctgaaaagtacaataacagaagtaaaaacactattggataggctcagtagtagagatgacacagcagagaatcagtgaacttgaggagatcagtagaattaacccaatttgaacaaagaaagtatagactgaaaaaaattgaacagagcctcagggagttgtgggacaagaagaagattgaacattcagacaactggagccctaggagaggatcaagagactgaagatgaaaggagagattgtgcagaatggggacaggtgaaaatatatcttcagagaatttaaggttctagcaaaagttgtataacaatgtataatgctgtccatctgtacaattgtaatttcttttctgatcaactctataccttgcgtttaaggttagagaatactggtggctgaaatgttgcaggactgagggtttttagggtggggttagtggaaggaccagaagataaggcatttgacagcttgggtaagaggacttgaggtgatagaatatggtggttcaaggccggatgcagtggctcacgcccataatcccagcactttgggaggccaaggcgggcagatctcttaagatcaggagtttgagaccagcctggacaacatagtgaaaccctgtctctactaaataaacaaaaattagccaggcgtggtgactggtgacacacacctgtggtcccagaaactcaggaggctaaggcaggaggattgcttgaacctgggaggcggaggttgcagtgagccaagatcacaccactgcacttcagcctgggtgacagagcaaggtctccaagaaaaaaaaaagtgtgcatgtggtattggtattgtgtgtgcgcacacacacacacacacacggtggctctgggaagggaggaaaggattcgaggcttagacgtagataacagacttggagaacaggcaagggttaaaggtgctagaagtcttgatgtggtgaaaaagcctgtggagtgcagcactggagaacaagcgagctgtgtggtggattcatcggagaggaggtgttggaattggaatagttccagatgatgctgaggtgtggccatgaggacaagttgctgaaatcaaatagaagtgaaggttgctggcgttgaagagatagggaaaggtgaggacaggatgttgactaagttactcacctggatggacgtgggagggccagactgtaagccaggtttcacagagtaaccaggaggccaggagatgataataataagatggggaccacctgaaccagaagagggtgcacatacatgcatgaggctggaagagtaaaggtctgggtgtggcagtgcagcatgggaaaacatggacacccatttcagaggctgtatgtgggaaaaggagcatcctcttcctaaatgggctggggaaggcagtccttaggagagacagttacatgcaagggagtggcgaaggggggtgtcccacagccttcttgaaagagggcacagcagtttgtttaaaatagctgtttttcagggaagaaggaagagttaagaggaagaaagtagagcatgttttgggactgagcttgcatgagaagacgggtgccctaaggtgctttcctgtggggtagtagctgggagtgactgggggagaggtgtggtgcactcaattggtttggaggtttcctgcagacaggctgagattccacatggagtcagggacatagagaagagcagcagccagctcaactgcaggctgaatctttgttcaggggtctggtgggatgtcggcaagctctgaggaagggatgagcctgcagactggctacggtagggaaaggaagcacttcaggaagaatgtgttgaggagggggtggtgagggagaagactcactttctcagagaatacttctctcttgatggaaatcacatgtgtatgtggtggagtggtggcctcaatcttcatctagtcaaattagagcttggrcttaatcttggaaagaaggaagatcaaatatttctcctttcagctattcaagacataattaagagaagtaatttatgtctgataacccttttacttttgcaaaaagcacctaccgtgttgtttgtgtgagatactagtattgttcatgtgagaaaaatataatgtgaaacaaatacctggagctgtacttccctgctggagtcccacatgtctttataagacacaggtcatggtaataaaagcactttgatttaattcatccatgtattgcataatttttcttggatatgtatgcctactaggtacttcttacaacttaaatatagattactaagtcacagatcatcactgagaggcacttattttgacctagaaaaactgctggttcctgctagttgatcaaattataacctgctgacctctcccaagtgtaattcagttctgcagataaacaacattgactatatctttggtgtttttaggtggtttacatcttggagaaaaaacattctcgagcagcaaccggcttcctcaaactcttggctgataagaacagcgaactgtttaggaaatacgccctgttttctccctcagaccaccgagtgcctagaatttatgtgcctctcaaggactgtccccaggactttgtggcacggcctaaagattatgccaacacactgttcatctgccgcattgtggactggaaggaggactgcaattttgccctggggtaggtgatctctggtaggaaaaaccacaggtcacaggcagaactcagtttaggtggtctttaggtaaactttttgtgtattttaattattatttctttattgaagcacggtttctggtgtattttggtcctgattcttcagaagtcactcttagctgccacctcaactgattgcctgtatgttccttgaattaccaggcagtcacattcttgtttttgttttttggcgtaaaacatgaacattccgagcctctacttatttagttatgtcatgtgtcctatttgtacttgtgtaccacagataattcattgcatcaaacaaccagtcctctccttgcagatgctagtgttaaaccatgcaaagtctaggcatattcaggagaccccaggctcctttgctttaaaatatgaacatgaaggtatatttaaatggcattctttttcggtattgattttgcctgtggcattaaaaactaccctattgtaagaaggaaaagggtatcatgtttttgtggatgctgtcagagatcaatctaacttaaatatacatgacatagtccaggagcatcatggatggccacttcattttcatctgaagaaactgctggacccagttgtttgaccaaatgctatgcctattttcttcttagaactggtattcatattgaaagaaaagcagtaagttttagctatgttaagtgtttattatagatgatgtctggtttatgcttcacaggaaatgactataaaggtatacaatctagaaaagagcctgttgatttacttttagtctagtttaatgacttgcttgttggtcatctaacttgtacaggatgcaccctcctgggaatgtcctatgggtaggagagtcagcactgaatggatggctacaatgtgctgcttttatcaggtttattctatacttagcttcttatgcctagcaaaataagccaaatcaaatgtgtgtgtcatatgtaagagtgtttcatatataagaaacactaccctgtgccactttttcagttatatgaagattggtgtgatttaaatgatctcatagctacttaggaacagttgtactttctttttttcctctcaagtggtgtgattgcaatgtcatcatttttaagcctaactaattatccaaaagtgatgtcaaccccttgagccctaaatagtccttcttacaagcttgcccgtttctcaccatcaaatcaaaaggcccagtaacggttgtgccacctggtcctgttgattgtgcagccacactctgtttggcagtaaaagaggaagactttcacatcaaaccaggaaatccagccttgttttttatctgcctttctgtcgtatcccattgtgtgtacttgattggactacttccttagttttcaagttgtaagggtgtagtcaggaaatcttcatagtatgagtttctcttattactttcatggccttataggtattttttaatttttattttttttatagctgagccattacttcatcaggaacccttttcttgaaggtaaaatacaacaaaaagggagtcaggtctttgaagcctcaagcacatttgctggatttaaagaaataatatttaaaaagtcacatattaatcatgtaattttcaaaataaaaaatgaagataatcatatttagatggaaacatcatgctttttctctaccttcttaatataaggatataaaaattgtcatttatggaaatatgccttttaaaatctttgtgaagaagagaaaatttattttaagaaataaaacatggtaggttttcctgatgaatttctcaaatgacgtctgttgtatgaggggtgagggctgcagctgttgagtatgttggtggtcgccttgccattttgttctggttatccgttactgatctttaagaactgaggtcactttttcttaatcagaacatgctgtgctatgactgcctaggtttcctcccttatctttgccaggctttgaccaggagtgtgacggtaatacctgctgtgggtgcgaaagtgttatggttagcttccacataaactatccctaaaaatcaagtttagctaaggtggcttccttctcaatttgttcccaactcctatacctctctccttaaaagtatcggacttcctttgcctatgtaattgcttctaattattcaagttcaaagtcattttcctcttctgtagttacatttagttcaccagrctggttttgatccaactatgtgtaaagcactatgctatattatctgagaaatacaatggtaaacaagttatggattcgttacttaaggaacttatagtctaatgcaaaaggatttttgcatgtatatatcatagcgataatttgattctaagaagtgtaatcccacttgaactaatttaaataaaagtagagattaatataagaagctggtgattcttttaaaaaccagagcaggaaatggaggaagtctcatgagaaaatcagaactaacaaggcaacaaaggaaccacagcttctctttcacccctgtgactagcccagccaccacacagtatcttttctttacccctttttgcacatgagctgtgttattctgcttctctctgcacagtagtcttctacctgcacaacagcacacgtggccccaaaatggcactgccagtcctatggcagttacatactaaagtctagatcataatacagaatttctatggtggaaaatcttactggtctagcttgaggcaggtgttttccctcgtcagtagtttcaagcagaggtgggggtccagagtcccatccaygactcacacccaatttgcagcgctgtgggactcctgggaaagagcgtggataaaacagatggcttgaatggcttatctctttgagttctacctacagtacaaaacagaatgttctaagttcttccatagaatagaataatttgggggaatttagaggaggtaggtaaagggggaaatccaggatcatttcttataggacagaggcctctttgctaaaagatcactctgactgagagtaaagaatagatgagaagggacatgcctagtagcaggaggtcataatacacaattgcagtaagacagatgaggtgggagaacctgaaataaagggttgcaatggaggaaacaaaagaaatgaaaagattcaggggagattaagaaggtaaattctcccagatgcgatgactaattagaaatagggcatgagggagaaggatggaatcttggatgaactttcagggctctgactagggggagtgggtggatgctgatggcatttaaccacaatttactgggagccatctcagttccttctgtggtcttcactatcgaaaatcaaacttgccatttcccaagctgagtgtgtatgttcatagttccaaacttttgcacattacacttcctttcctaacagtggctttctccttcctctagtgtttgcttggtgaaatactcaacttttaaactcatttgtccactcaaaaaaaaatgttccttgactcacaggcctcccttctggtgctcccatagcttctattagtactattattatatttctcatctgtttggtttgcaattgcttgtttgttttacttggccatgaactcctttaggacaaggacacttggtgaacatttgctagctggtcagatgagtagatggaaatggattgatgaccccaatgtcttgagccaggttgactaggaagatgttgcaccatgaatcaagctagaaaacacacaaggagtaatttggaacagaaaatgatgagaactaaggttctatgacttcaaagtccatgcttgacaatggcatacaacaagtataaaaactcaggtggagaacgccaaattgagaaggcacagatatttaacagaaggattgaatagaatgcacacattaatagaatatatgatgttagtagctttggaaggatccttaggtaggacatggagcttggcctcccctttgctgtaagcattgcttctctgacaccctagtgctgccttggggccaccatttaggggcagctcaaagagtattacaacattggagacttccagttgttataaagttattttctatcttgttcttagaattgtcatgagagatctcagttgaaccttgttcacctctctatacatcacatcgcccacatttttatgaatcttgttctgtaatgctatcaaaacccaagtgaacccttgctagcttttagggatcactgttttttgttatacattacaacatatttagtacctttaatatttagtactacactctagtccaggataattaaaaagccacattggtttcttcgctggaatratctgcaattacataatcagatttacagttttaagagcttcccaacctcttaaatcatctttccctttagaaactcttgcagtggaattcatgcctatattttctcagccctttgggaaatctggtatcctcagtctagagtttacagttccagcttctctttccgggatgtcttgagcgtagagatagcatggtcactttctcccagatttgtcatggtttcttcttgactatttaagggtaagtcttgaataaaatggaaacgttttayagcagctaccgtgaggaacttaatagtgtttcttggcaacactgaaggctagctgaagatatgtgacatgaatcgacctagagcaaattgacacatttatattattttatcaagcaaagtctggtggttttgaggggtggaggaggaggaggaaaaatgaataggtcattacaggctgagaagttcttggttgaacatgggattgcctaggcttaatgggaggctgtggaaatgagaaacagagaatgggtcacagtgctgctggctttaatgagtgtgaaggacagcaggttccattggagcagatgacggagtgaggtgaaagcagaggaagggaaattctgaccttagaggactgtggtagagatgggaagtagggggtggaggtctgttctggtatcacctttgtctcctagcttttcaccttgtggtggttgttagccagtcagcaatatttattgacccatggaagcaaatacttttacattccattcagttttgatagatactcagtttcttacagggtagataggaattgaagaggtggtcattaaattacattaaatacattgaattgtaattagtaggaaaattaaaccatgactagattgatagaaaaaacaaacagaagaaattagtttgtttcattgaagcataggctccaagattagcaaactgaaaaataactgtatccaatctttccctttgcaaaaggaatatttcacctttttgagagcatgttctttaaagatagctctgagggagaaaccaagttatataatgctatggactcgcattaccagatctatagagtttgtatgttcttttcaaggggtatggacctggccggctaggaggcaaaaagcaaatcaggctgaggagggggctctttttttgtgactgttgggctccacctggtggcctgtaaggatcagctttggaaaaagctgtgtcttcaacactgagaaaatcctggtcaaggcagagcaaaagttaaaggaatggaggagaatgatcctgatccaggcttaggttaccaaattgttcctttccttgatgagcactgcatgcagttttggcacttcttccaaagtcgccatcttcaactgcaatttctagtgcaccttcttgaaaatattatgatgttagaggaccttagataaccatcaacctcctcttatactcattaaatcctttcagcttcctctttgctttcttcatatcaacaccaattcactcttaaatttcaagaccttttcttaaataactcagtattgttgactcttacttcttttctccatgcttttatctattttcactgataaaaacaccgttcctgaagtccctattccttaagtgctactttctgctgtgtcatagtamtgagccataagaagcgaaaataactcgttccctctcctgattatagaaaataatacataaaatatacagccaaagacaagtgtatttgccacacttcgtttttactttgtattgttggaagtttgggccctcggtatagttgatgtttgattgttccccacttgtacattctcagggctgtgatgccattatatctgtttgcatggagtttccaacattggaccaacatgtatgagagyatgtatttaagagtagtaatacgatagtggtaatcactgcaagagtgcatgactgtcttctaaatatcgtctagttgtaagactaggagtttataagaatatttagtagaggaaagatgatgaatggctgagaacactaatcttgactatttaatgttcctgttttctttaaggcaaagaggccaatttgaaggactttcttgttatatttttttctgtctgtagctggtccctttcctcagtacgtttttaataggcatatcacccaggatagtagatctgatgcttatttatatagaatgtttatatgtttcccaaggcccccacctatcatatgtaggaagttgggaatattgttgcagtgccattcagattaattttacagtaggactcagttggaatgtcattctttgtgaatggcagcagtattcatggaggagctctagtgaagaaaaattgaagtggtgatcattataaataactctatggaggaaaactttctctcttacaactattattgaaatatcaaattaacaaacatttctaaattttattttttccaaatacatacatattgaatatttactgttaaatttattcaaatgtgtactattgaaaatgaaaatttcccagagtttcacccccggaaacgatcactattaaggttttggtatacatttgactaaaatattgttttaaaaatatttatcaactttaattacaaagcatatttcacaggaaaaagaatatatgtaacacttctataatttttgaaacctaatactaaaaccaacccatgaactcatgaaccagattaagaagtataacatcaccaatactgttcaagttccctgtctgttctcctgtatcctaaaccataattttttccccagaggtaaccaccatctcaaatatactaatgaaaatgtatttaaaaaaaaatttacccatatttataaccctaaatgttattttgttttgcttgtttttgaacctttacaaaataccgtgttatatatattcttctatcatttgccttttttcatttaacatgtttctaaaatatactcacatatttcactcattttagtcgataatatttccattttctgaaatataccataatttagcaatgtacatttgggttgaacagaggattttgctcctgaaaacgttccagtgctcattaactaaagtttttctagactctacttaaaaaggaaattactgaatcatacataggtacatgtttaactttacaactttctagccaaaccattcccaaagtgattgtacccatttttagtcctgccagcagtgtgtatgcagttccattgctccacattcttatttacacttgttagactcatttttgccagccaggtgggtaaaaatagtgataatcgttgggtgatttttgttatttttttcctaattactgatgaggttgaacatctttccatatactcatggtcatgtttcctcttctagacagtgttttcatgtttttacccatttttttaacagttaattttttatttagataattttgattacagaaattgcaaaaatggaacagagagttcctgtatatcttttaacctatcttctccttatgtttacatcttacatgaccatggaatacttatcagaagtaagcagttaatcttggtatgataccaagtataggtcttactcagattttatcactatttccactaacattctctttcagttgcagaatctgggtccagaatcccgtaatacagttagctgtgtctctgtagtctctccaatttgtgacatttcttactctttacttgtccttcacgaactttacacttttaaagagtactggccagtgattttgtaaaacgtttctcagtttgtgtttgtctaatgttctctcatgattagatcnagattagacattattgggaaagataccacagaggtgatgtgcatcttatcgggggcacataatgtcagtaagtaatactggtgatgttcaccttgatcacctggttaaggaggcatctgccatgattcctaacttactacttttttcccttgtaattattatactgtatttttggaaagattttttgagtctgtgtaatattctgtttctgcttaatttcacccattcattttagcatacattggtgcttttacccatttttaattgggctgtttgtcatttgatttttttggagttaaaaatacatattccagaaagtaatctttttagcagtcactgatatggaaattatcttctctccagtttgtgagttgtcttttcctgttattaatggtatcttctgaagaatagatgtttgaagttgtcttttttgtttgctgccagcatgtagaattacagttaatttttatacattatcctatatccagccatcttgccatatccccttattcatttcagtacttgagatgtaatttcctttggctcttctatgtagataatcacatcattggtaagtaatgagagttttatttcttccattctaatctgtatgacttttatttctttttcttatcttgaattggcaactcacaattggagaggaggtatttcccacacagtaactgataaaagttcagttttgaataaaagcaatagtagcaggcattttttttaattcctgattttttgatgtgttaataagtttgctaatgtggcagctaattatggtaggactggataatttactgaagtacttatctttgagttttatttgtttttgccatcctctgttttcttagctttcctttggcatttcaaggaagaatagtatgcctctctaataggtacaaagcattaatttgtttatttacatattcagtcaccaacatgtgttggacaccaaaggcatacaagtctcagtggtacacagaaataaagaaatgtttattctttttatggatgatcccccccatctattgataaggaagaggcatacctaaagcaccatgacacagctagaaagtggcacatgcaagaaagaggatataaccaaaggatagggacagtactgatgaggcagatccactctaggagacagggatggcttcctggccttgctgctatattccatgaagatgaaatgatctgggtatatgctttgtgggcctagttcaacatggaagttataaagggagcacctttaggatagaattatgttgcctaaggaagggccatttatggtattcttatgctctagaacccagcagttccatgtcagtgtgtagtgaatacctctacaagatctatgatgccaacagtactaagattttatttttggtagtaagagctttacattttctgttgcagagtgaatggagggaaagggaagtttgcttctcatggatgatctttttaaatagtttgtagtaggatgcttttagcagcaaattataaaaatgcctgactcagagtgacttaataagagaaaatattatctcatatagtgggaattcaaaggttgtgcagctgcagacccagtaaagtcagtgactggatgatgttatcaggttgccttttgctgtcctcagcaatccagtggtggtttctctatggttgtgaagatggctgccagtatgattaggctacctgctttcttgatgacatgtgacacaaaaagggagaccctgtctgccaacaatgctattgactacagtcaccaggggaggccatacactgaatttattagaataattagtatctgtcactggagctgaaggtgagatgtgtttcctgtatgaaaactagatttttgtgaggaaggaggaagacagaagtgaatgttgggtagcaaaccaatattgggcactctagtttttgttataattattttttgtataatttttaaattaaaaaacctccaactttgtgatattaaaggaagcttagaaaatagattaaaaagtcactcagaatcctctctcaaataattaacaccatttgtccctttcagcattttcataaatgtttttacttagttaaatcatactctacatacatcttcaaaattctttttstgaaatacataaaaaattgaaaaatatgacatggtttagtttatcatttatctgttgcttgacatctaaattacttttactccttttctgctccaagatttttaaaataaacttaattttaattaattaattaataaataggaatggggtcttgctgtgttgtccaaacaggtcttgaactcctgggctcaagtgatcctcccacctcagcctcccaaagtgctgggattacaggcgtgagctagcatgtccggcccataaaaataaactttatgtttcagaacagatttagatttacagaaaattgtcaagatagtacagttctcacctgccccttctctcctcctccaaaactagtttttttctcttaaccaatrttgatacattattaatggaggtccgtactttcttcaaactttcttgtttttaaaaatctaatgtcctttatctattccaggatctcatattacatttagttgtcttgtctctttagattcctcttgactatgagagcttctaagttatttttgaaggacatattttaatgcagaataggatgaaatgtggtttttaagagaatcaccagatattttgacataacattgaatcatagttgtcctaaagcagctgttatcttttcagacagtaagcagaagacagaaactacttagaaagttgtaacatttgaactacattacataaaagggaaagttactttcatgattcattttaaatagaatttacaatgaaattaaatttaaaatataaaaataaacccttctgcaagacaaatacacaatgtaaaagtcagttccctagtagaatttggctttgtttacctaccaaagaattctggttttcaaggtgacagaagagttcatgactaagtagacaggataggattctcttttctcttctcttcccttcccttccctcccctccctttcctcccctcccctcccctcccctccgctcccctcttttctcctctcctctcctctcctctcctctcttctcctgtcccctcccctcccctcccctcccctcttttcttttgacggagtctcactgtgtcgccaggctggagtacagtggttcaatctcggctcactgcaacctctgcttcctgggttcaagcgattctcctgcctcaacctcccaagtaactgagattacaggtgcgcaccatcatgcccagcaatttttrtatttttagtagagatggggtttcaccatgttggccaggatagtctcgatctcttgacttcgtgatccacccgccttggcctcccaaagtgctgggattacctgtgtgagccaccgcacccggccaagataggattctttytagggcatctaaggcccccaaagcatgagctctttcagcatgctgatctgttagatttttatctgccataagctgtccagtctatgctgctgtaaaatagatctccaatgaaagtccgtaataaatttatttaaataaggaacttgagaaatgttctctggaactcgtaaaataaatgttaattactactaataggaacttggagtcattgatcacatttggaaaccataactaaaatataattttgtctttatgagccatgttgtaatttgagtaaacaaattgagactctttggactcagagtataacctggtaaaacattgtgtcagaactttacaaagctccaaaaaagatgaaaaattttttttctccttaattttctttcttttttttttttttttttttttttacacagccttcttaatctacacatatggcaagctaataattccaaaaaaataatttctttcctttgtagccatttaaaactaacagctagaaatatttcttcttccaattattaaaaataagctgtttctgagtcagtgctgactacatttactgattgaagcagccaactccaaatataccatcttttagtattgacacttaaaataaaacttctccccagaaaaagagttctataaatgatggctgtagaaataggcactgtccaggcagttgttttgtggaagtagtgttgttattttctggtgttttccaagtcatctcagatggtgcgtgaaaatgagatgccaaagaaggcttaaaaaagataccctgcaccagcttcagaatgtaagcaaatctttcattccagcgcttaaaagttttttttttttttttattatattctaagttttagggtacatgtgcacattgtgcaggttagttacatatgtatacatgtgccatgctggtgtgctgcacccactaatgtgtcatctagcattaggtatatctcccaatgctatccctcccccctcccccgaccccaccacagtccccagagtgtgatattccccttcctgtgtccatgtgatctcattgttcaattcccacctatgagtgagaatatgcggtgtttggttttttgttcttgcgatagtttactgagaatgatggtttccaatttcatccatgtccctacaaaggatatgaactcatcatttttatggctgcatagtattccatggtgtatttgtgccacattttcttaatccagtctatcattgttggacatttgggttggttccaagtctttgctattgtgaatagtgccgcaataaacatacgtgtgcatgtgtctttatagcagcatgatttatagtcctttgggtatatacccagtaatgggatggctgggtcaaatggtatttctagttctagatccctgaggaatcgccacactgacttccacaatggttgaactagtttacagtcccaccaacagtgtaaaagtgttcctatttctccacatcctctccagcacctgttgtttcctgactttttaatgattgccattctaactggtgtgagatgatatctcatagtggttttgatttgcatttctctgatggccagtgatgatgagcattttttcatgtgttttttggctgcataaatgtcttcttttgagaagtgtctgttcatgtccttcgcccactttttgatggggttgtttgtttttttcttgtaaatttgtttgagttaattgtagattctggatattagccctttgtcagatgagtaggttgcaaaaattttctcccatgttgtaggttgcctgttcactctgatggtagtttcttttgctgtgcagaagctctttagtttaattagatcccatttgtcaattttggcttttgttgccattgcttttggtgttttggacatgaagtccttgcccacgcctatgtcctgaatggtaatgcctaggttttcttctagggtttttatggttttaggtctaacgtttaaatctttaatccatcttgaattgatttttgtataaggtgtaaggaagggatccagtttcagctttctacatgtggctagccagttttcccagcaccatttattaaatagggaatcctttccccattgcttgtttttctcaggtttgtcaaagatcagatagttgtaggtaagcggcgttatttctgagggctctgttctgttccattgatctatatctctgttttggtaccagtagcgtgctgttttggttactgtagccttgtagtatagtttgaagtcaggtagtgtgatgcctccagctttgttcttttggcttaggattgacttggcgatgcgggctcttttttggttccatatgaactttaaagtagttttttccaattctgtgaagaaagtcattggtagcttgatggggatggcattgaatctgtaaattaccttgggcagtatggccattttcacgatattgattcttcctacccatgagcatggaatgttcttccatttgtttgtatcctcttttatttccttgagcagtggtttgtagttctccttgaagaggtccttcacatcccttgtaagttggattcctaggtattttattctctttgaagcaattgtgaatgggagttcactcatgatttggctctctgtttgtctgttgttggtgtataggaatgcttgtgatttttgtacattgattttgtatcctgagactttgctgaagttgcttatcagcttaaggagattttgggctgagacgatggggttttctagataaacaatcatgtcgtctgcaaacagggacaatttgacttcctcttttcctaattgaataccctttatttccttctcctgcctgactgccctggccagaacttccaacactatgttgaataggagcggtgagagagggcatccctgtcttgtgccagttttcaaagggaatgcttccagtttttgcccattcagtatgatattggctgtgggtttgtcatagatagctcttattattttgagatacgtcccatcaatacctaatttattgagagtttttagcatgaagggttgttgaattttgtcaaaggctttttctgcatctattgagataatcatgtggtttttgtctttggctctgtttatatgctggattacatttattgatttgcgtatattgaaccagccttgcatcccaggaatgaagcccacttgatcatggtggataagctttttgatgtgctgctggattcggtttgccagtattttattgaggatttttgcatcaatgttcatcaaggatattggtctaaaattctcttttttggttgtgtctctgcccggctttggtatcagaatgatgctggcctcataaaatgagttagggaggattccctctttttctattgattggaatagtttcagaaggaatggtaccagttcctccttgtacctctggtagaattcggctgtgaatccatctggtcctggactctttttggttggtaaactattgattattgccacaatttcagctcctgttattggtctattcagagattcaacttcttcctggtttagtcttgggagagtgtatgtgtcgaggaatgtatccatttcttctagattttctagtttatttgcgtagaggtgtttgtagtattctctgatggtagtctgtatttctgtgggatcggtggtgatatcccctttatcattttttattgtgtctatttgattcttctctctttttttctttattagtcttgctagcggtctatcaattttgttgatcctttcaaaaaaccagctcctggattcattgattttttgaagggttttttgtgtctctatttccttcagttctgctctgattttagttatttcttgccttctgctagcttttgaatgtgtttgctcttgcttttctagttcttttaattgtgatgttagggtgtcaattttggatctttcctgctttctcttgtaggcatttagtgctataaatttccctgtacacactgctttgaatgcgtcccagagattctggtatgttgtgtctttgttctcgttggtttcaaagaacatctttatttctgccttcatttcgttatgtacccagtagtcattcaggagcaggttgttcagtttccatgtagttgagcggctttgagtgagattcttaatcctgagttctagtttgattgcactgtggtctgagagatagtttgttataatttctgttcttttacatttgctgaggagagctttacttccaagtatgtggtcaattttggaataggtgtggtgtggtgctgaaaaaaatgtatattctgttgatttggggtggagagttctgtagatgtctattaggtctgcttggtgcagagctgagttcaattcctgggtatccttgttgactttctgtctcgttgatctgtctaatgttgacagtggggtgttaaagtctcccattattaatgtgtgggagtctaagtctctttgtaggtcactcaggacttgctttatgaatctgggtgctcctgtattgggtgcataaatatttaggatagttagctcctcttgttgaattgatccctttaccattatgtaatggccttctttgtgtcttttgatctttgttggtttaaagtctgttttatcagagactaggattgcaacccctgcctttttttgttttccattggcttggtagatcttcctccatccttttattttgagcctatgtgtgtttctgcacgtgagatgggtttcctgaatacagcacactgatgggtcttgactctttatccaacttgccagtctgtgtcttttaattgcagaatttagtccatttatatttaaagttaatattgttatgtgtgaatttgatcctgtcattatgatgttagctggtgattttgctcattagttgatgcagtttcttcctagtctcgatggtctttacattttggcatgattttgcagcggctggtaccggttgttcctttccatgtttagcgcttccttcaggagctcttttagggcaggcctggtggtgacaaaatctctcagcatttgcttgtctataaagtattttatttctccttcacttatgaagcttagtttggctggatatgaaattctgggttgaaaattcttttctttaagaatgttgaatattggcccccactctcttctggcttgtagggtttctgccgagagatccgctgttagtctgatgggctttcctttgagggtaacccgacctttctctctggctgcccttaacattttttccttcatttcaactttggtgaatctgacaattatgtgtcttggagttgctcttctcgaggagtatctttgtggcgttctctgtatttcctgaatctgaacgttggcttgccttgctagattggggaagttctcctggataatatcctgcagagtgttttccaacttggttccattctccccatcactttcagagtgacaccaatgagacgtagatttggtcttttcacatagtcccatatttcttggaggctttgcttgtttctttttattcttttttctctaaacttcccttctcgcttcatttcattcatttcatcttccattgctgataccctttcttccagttgatcgcatcggctcctgaggcttctgctttcttcacgtagttctcgagccttggttttcagctccatcagctcctttaagcacttctctgtattggttattctagttatacattcttctaaatttttttcaaagttttcaacttctttgcctttggtttgaatgtcctcccgtagctcagagtaatttgatcgtctgaagccttcttctctcagctcgtcaaaatcattctccatccagctttgttctgttgctggtgaggaactgcgttcctttggaggaggagaggcgctctgcgttttagagtttccagtttttctgttctgttttttccccatctttgtggttttatctacttttggtctttgatgatggtgatgtacagatgggttttcggtgtagatgtcctttctggttgttagttttccttctaacagacaggaccctcagctgcaggtctgttggaataccctgccgtgtgaggtgtcagtgtgcccctgctggggggtgcctcccagttaggctgctcgggggtcaggggtcagggacccacttgaggaggcagtctgcccgttctcagatctccagctgcgtgctgggagaaccactgctctcttcaaagctgtcagacagggacacttaagtctgcagaggttactgctgtctttttgtttgtctgtgccctgcccccagaggtggagcctacagaggcaggcaggcctccttgagctgtggtgggctgcacccagttggagcttcccagctgctttgtttacctaagcaagcctgggcaatggcgggcgcccctcccccagcctcgttgccgccttgcagtttgatctcagactgctgtgctagcaatcagcgagattccgtgggcgtaggaccctctgagccaggtgtgggatatagtctcgtggtgcgccgtttcttaagccggtctgaaaagcgcaatattcgggtgggagtgacccgattttccaggtgcgtccgtcacccctttctttgactcggaaagggaactccctgaccccttgcgcttcccaggtgaggcaatgcctcgccctgcttcggctcgcgcacggtgagcacacacactggcctgcgcccactgtctggcactccctagtgagatgaacccggtacctcagatggaaatgcagaaatcacccgtcttctgcgtcgctcacgctgggagctgtagaccggagctgttcctattcagccatcttggctcctcccccctccttaattttctaaaggtccaataactggtatgacaggactgttttaacaactaatatcaggtccatcacttcacttgcttccttttgtcctccctcctcctcaccctcccaccactccattcatggatctagtgctcagcgccagtctttgtggaggaatttctccatctcttggtacacctcagttcatcactttgcagtttttcagaaagggcttatgagaactatattccctgagttcttgtatttagaaatctttatctttgaaatccagtaactccactagaatatatttcattggtgattttctgtaattttcttttctgagacttacctttctgtaaacctaaattttctttatttcagaaaagttttcttaatgatcttggaaaatgttttcttttcttcatctctagctccttccttcagttatgccgaaggaaggatctagagatgaggaatagaaaatgttttctggccaggcgtggtggctcacgcctgtaatcccagcactttgggaggccgaggcgggcrgatcacgaggtcaggagattgagactatcctggctaacatggtgaaaccccgtctctactaaaaatacaaaaaattagccaggtgttgtggcgggtgcctgtagtcccagctactcgggaggccgaggcaggagaatggtgtgaacccgggaggcggagcttgcagtgagctgagatcgygcccctgcactccagcctgggcgacagagtgagactccatctaaaaaaaaaaaaaaagttttctattccaaagaatcttagaaaatgttttctattcctcatctctagctctgtatttcaaggatgcctggaactccttggtctgcctttcacatctgtctgttttctttgttatctttttaaactctacttgcccagtttcattttcctcacttttctcaagattttactctatgatccttatggctttcaaatagtgtcagttcttcattaggtatttccagtatgactttcactttctgtgatagttttatcgttcttttctacttatttcctgaggtctaaaaacctagtttttgtttcctttcatgacttacttattccttatgcacttgcatctttgcttcaagctcttgttttataaagcttatatttttgggagttcttgagagtatctttggtcatttctgtggttatatgcttatagrgattgttttgtccttctgccatttctttttcttgctcctttttttccttttaaatgtgggttttttttttaatagaatgtttggatggttccttctactctccctccctggaatctttaaatagtgagttcttcctggactttagtattatatttaaaaaactggacattataaaatgctttttgtctaagtttttagccccttttctattttaggcataagacaatcatttaggtccgtattgtatcctggaggatagcattccaacttcactcactcttaacttcaaggtgagaatagtatggtcactgtgttctaggtcagcctcacaaacactgagactcccaccacatagaagaatttgtttcttttcgtattagtgtagttctctaataaactctatgtggtatatctcatttttatacttctcccagaagctatgtatgctatctaattaatggatggttagttattttatgtaacttttaatactattaggtagaatcagaagaaactgtgttttatatgttaataaatggtcatattggcaattttctgtgcctcaaaataatatattattaacttctttatattgttgttgccattcttgaattattacttctgagtaacctctcagttggcttgagttgcacataagttttttttgggaaggaaagtacatagcatattttctgccttttaatatcagtcagggttcttgtagtctcagattccaattcagaggaatcataattatgtccccagaggtactaaaacctttcaactgtagagatgagcattatgtaggcaaaactaaatattttatgtgtgggtcttaagtgtgatattgaaaggcctgactcctcccttgcattctttcttcccaaaccatgtacamtgcctgtaggatgctaaatcagagcaccaatgcatcctggaggatggcactcccccctcacaactgatgcctcctggttagtccaacagcttagtaagtcagatcattacatcatgccagtcagtgaaatgtatgggctttgcttcttccaaaaggtgaagtccttaattacaaacaatgttgagtgcgataatagcttaaaagatatttcgtaaatctgaggattgtggtgtttacataagcaatataggtagaagaaatgcagatagcaaacctagagtaagtgtctcttttagtggaggaattactgcctttcccatcctaaaagagctcactggatgcgatctgatgtgaagtagttgggggtcctcctggcatggctgtgtatcaggtgctcagagttggttgctgctgctggcaagctagcatcctgcaagaatggtattcaggtcagcattagtgagaagtgaatgttgtggagtgcatttcctgctgccttgtgctttgttcctatgtcccttgagcaagcactgcagcgatggggacatacacgggcgcaggccatcctgcctccacagtgggagcctttcactgtgcactctcatggagcacaaatagttataccctgtctggactcatttcagtgggcccatttcatccacatgtcttttccctagatgcccttgtcaccagtactccaatctttcttctttcaggtccctatccatctggttaaacttgtagtcactgcctatcagcctatcaggttgtccttcctcagctaaagtggaccacggacatagggcttgaagttctgcccactgggagaaagtttctgctatattgtcttttcagagaccatcccttacaatggatttaatgctatcgtgtccatttatgactcatgacaatggagggtcagttggaactaggcattcaaggtactcaaacctttctgcatcctcctttatatcgtgtgtgtgtgtgtgtgtgtgtgtgtgtgcatgtgtgtgttcgggttctctgaatcttactctgtctgatgagtgtcctacttttcacctaagtgacttaatgagaccttaaattcaatggtgtaatgattcatcaccctttcaatttgttttttctgtcttagcctggcagctacaagagattcaagatacttttttgttggacatactaagtccctaactttcagtcttagaaatgaggaatttagaatgaagaatttagagatgaagcatgtaattctttgtttctccccctttttctggctctcgaagcttctcactgtttctgtgagccctttgatatcctttcaagaaatttctttttttcttttccaaacagcactggtcttttgtgcttacaaacaagaacccagacagacagttaaagacattgatattaggagacgaatgtaggaaacagaacctcagggacctgtgagaataataaatgagttagatgggttggaagtaactcagattccattaattttcagaatacaaaataatttttaaaattactaattattacctgtcatcaccagaataaagttgtctttaacctaaacaacattgttataagtattcgtcttgtactcacagtgttgaattcctgtgtccttcaaatttcaaaggttgggataataggtcccccatatcttcagttggaacttcactctagtgaacacaggtaataatttagtcattttgaaaattaatgggacctgagtctttaattgtctgggttcctggttacaagcaagaaaaaccaactctggttgggaaaggaatttattgggaggatactgaagagctcactgagcaaaagacttgaatgacctgaaaagggatgtgaactaaggcagctctggaaagccaagaacaagaagcccaaccatcatcttttatcaggattagtttggctgtaatgccagttattctcttaccaccactcttgcaggacaccattttcactggatgctgctgccaccgctgctatcacgagaagccattctagctgtcatgagtgaatcctaagcagccttttgtctttgtgtttctgtctacacattcaaagtcttgagttgaggcagagtttaagtcacacacagtgtrctggattttggttctcacagagtgagaggaggcttgtataaagagaggccaggcattatgtagtaggaagctggtcacttccatgacggraattgtagtcctttgtcctgcttataggcaacgtgcaattcttcctttccagtttgtatgccccttctttttcttactttatggcattcactagtacctccagtacaatgttaaatagtattggtgaaaatgaacactttgtcttctttctgctccaagggaaagcatttcacttttcaccactaagttttacattagtgctaggattctcatagaggcctttaacsaagttgaagaaattcctgttactcatgtgctgagggcttttatcttaagtgaatgttgaaattttgtcaaatgctttttcttcatttactgagatgattatatgtgtttgttttttgtttgttaatatgttgtattgattgatgtttcattgttggacaaatcttgcattatttggtcatgatgtatcaccttttttatatattactgaattctatttgctaatgaccttgtaagaagttttaaattttctttttcartaactgatatacctttgtaagaattttaagtctatgagaggtattgatctcattaatcctttggttttgatatcaaggtactgctgtcttcattaaactagttggaaagtatgccatctacctctttattctagaagagtttatgtagaattggcaataattctttcttaaatacttggtagaattcaccagtgaagccatctgggtctggagttttctatgtgggaaggtttcaaactgtgaattcagtttctttaatagatacattagataaaatagataataggtagattaaataggaatattcaagtatcaatttattttaattatcctaggcagtttgcatctttcaaggaatttgcccatttcatccaagatgttgaatttattgtcttaaagtcattcattattcccttatccttttaatgcttgtgggatgtaaaatggtgtctcctctctcattcttgatattggtaatttgtgtttttccctccttgtttttcttgatcagtcaggctagaaatttatctgtttttctcttttcaaagaattagcttttgagccaggtgtggtggctcaaagctgtaatcccagcactttgggaggccgaggtgggcagattgcttgagctcaggagttcgagtcccagcctgggcgacgtggcaaaaccccatctctacaaaaaatacaaaaattagatgggcctcagctactcaggaggctgaggtgggagtattgcttgagcctgggaagtcgaggctgcagtgggccatgattgtgccactgcacttctgcctgggtgacagagtgagaccctgtctaaaaaatagaattagttttttgttttattgatttgttttcattattcattcatttttgtttgtttgtttgtttgtttttttgagacagactctcactctgttgcccaggctggagtacagtggcgtgatctcggctcaccgcaacctccgcctcccgggttcaagcgtttctcctgtctaagcctccagagtagctgggactgcgggcatgcaccatcacgcccagctaatttttgtatttttagtggagacggggtttcaccatgttgaccaggatggtctcaatctcttgacctcatgatcctcctgccttggcctcccaaagtgctgggattacaggcrtgagccaccgcgcccagcctatttgttcattttctattcattgattcttgtttcttcattatttctgtccttctccttacctggaatctaatttgttcttcagttttttaacgtagaagcttagatcactgatttgacacttttcttcctttccgatgtgagcatttaatgctgtaaattaccctccaaccactattttagctacttctcacaaatgttgacatgttatgttttcattcaattcaaaattcccttcctccctctctccattccttcctttcctttcttttttgagatagcatctcgctctgtcgcccagcctgcagtgcagtaatgccatcttggctcgctgcaacctccatttcctggatttaagtgattcctttgcctcagccacccgaatagctggaattacaggtgtgtaccaccacacccagctaagttttgtatttttagtagaaacggggtttcaccacgttggccaggctggtctcaaactcctagcctcaagtgatccacccgccttggcctcccaaagtgatgggattacagatgtgagccaccgtgcctgaccccagttcaattttttttttttggagacagtctcactctgtcaccaggttggagtgcactggcatgatctcggctcaccgcaacctctgactctctggttcaagggattctcctgcttcagtctcctgagtagctgggattataggcacgcatcaccacgcccagctaatttttgtatttttgatagagacggggtttcaccatgttggccaggatggtctcgatctcctgaccttgtgatccgcctgcctcagcctcccaaagtgctaggattacaggcgtgagccactgcacctggtccaaaatattttctaattctttttttatttcttctttaacctatgggttgttggatttccacatatttggggattttccagattgctttctgttaatttttctctcatatttttgctgtctggctttttgatgtgttttatgggagagaccacccatttgtggagaaagtactcttctgagtccacatcatatgggaggagcccacaggtcagtctgcaggctgccgagatcataggctggtgggcgggtgcacaagtagactgggctggtctctcttgactagtgtgagaaatggggccagccctgctgccatcactgctgcattccagtggcaaggctgaagattggaatttgttaaaagtctgcttatgaggcaaccacctcccctattcctctttaccactgtgcacataagaactccagcagccaagcatctacccttatttaggaaacagaacctttttcatagaaatcgaatagcctgagagaatgtcctgatgccatagctaaatttcttgcagaaagtgctgagggcggactcttggagcaccctggtagataagtagacttgtacmacagaggagatggccatttttggtctccgcaataccctctacaaaggcagccaaggcccataacacatttcctgttggctgcctgtattcaacgcacaaatttagacttgtgatctgtatgtggcatgacaatgcttatgagaatagagagctgtcaatttggtaaggagtgagatctgccttctgaaaggtggaaccctgttcataatgttagcattgtcctgttaaatgcaattttatttttaatgggccagtgccctaaaatgtgcatgggtgactggtttatggataattttaattttcttctcagtggattttgtgttttctaacttctttgcaatgaacgtatattacttttgtgtttagataaaatattttaaaattttaaagattaaaaactggtagagttgtgaaataggaacatcagaattaatctagtaagcatgacttaacgtacaggcactctgaaactaatgatttaatagcacactggattgatcataatatcaattttgacttctctgtgaagaacaattggaggggtcctaaggaaagccttctggctctgtttctcaagtcagaatgtcaaataaaaaaaggtgaaattacactgtagttaccgatttaacaggagaagagcattactgtgtcttctgctttcccattgccagtgatttacggatgatcatgtttctactggtggaagggcaggagrttttaaactttcccactactttacttttagagaggagacaggtacctatgttccatttgtttgctaacccagttattccgtttctgttctatccataggcagctggctaagagtcttgggcaggctggtgaaattgagcctgaaacagaaggaatactaacagagtatggcgtggatttctctgatttctcttcagaagttctagaatgtcttcctcaaggcctgccatggacaattccaccagaggagttcagcaagagaagggatttaaggtaagcacctgaaaccctttaagaacgtatatctccctttctgccttaactttcctaggggctaggcttagatgttttcatctttccacgaacattcaagttcagttcagttgggaataggtgcttctgtaccacagttggcaaattatggcccacaggctaaatctagcctactacctgtttatgtacaacccatgagctaagaatggtttttacatttttaaatggttggaaaaaattaaaacaagaataatgttttatgaaaattwtatgaaattcagatttctgcgaccataaagttgcattggaacatggccatgcttattcattatctatgttgcttatggctgttttttgccctacaacagcccagttgattagttgcaaccaagaccatatggcctgcaaagccaaaagtagttactgtcagccttttacagaaaaagtttactgatccctgttctagaccattctaacttcaaaagctacagtgcctatcttctcattgccatagatctggtcaagtacagactgttatctagtgagaagtgccttcctttaaatgggcctcttcaggcacagagcaaaggattcaagacttctgtacttggagcctcattttaaagccttacttttaggtctggaatttgttggaaagtactttcgtggtatttttataacaacatcttctttgaagatgtttcttcattgtgggatgttagttcttttctgatatttctcttcagaatttggtttcagtactggcactcattttggatgccacatggagatatttagaaccaagaaacttttcatacaacccactgaggctgtggaaggtttttgctaaggtcatcccatgtcaaagtcttttccaccacacttgctcgcttcatgcagctgaacttatgacaccttcagctctgggtgcctgttacccacctagtttgtgaatactccctctctgtaccttcttactattgtatcttttagtaatttactgcctttttcttttcttattgaggttaggcaaggaaaaggagatgatcattagtcccctttcctacttgttagtatctctcatagaacacatattacatttgaagtcagttaacccatattgcattgctggattttcataataacccctctatcactgaacccctgctagcacatgggtgtgttatctcttcaggggctccgaggtcttgggcccataacattaacctctctgaacctttgttttctcatatacaaattgaggggtttgttttctgaggtcatttcctgaatctaggaatctatctaatgatttartgggaaaagaatgctagaataaatggttgaacattattgtttagtagaatttagtgtagccatgctgcagtatctatcaacattttaaatgtacctactcctgcaccccaaactctactcgaagtgtacaaaaatatatgtacaagaatgttcattgctgtcttgtcataaaagttaaacattaaagacactgctaatgtcyattaataaaggaatggtttagtaacctgtgttatgtcaatatgatagcattccttgcagctctgcaaaaaggagctatatccatgttgactttcctaaaagaatagctataatatattattaagtcaagcaagtttcaaaacaatatgaatatgagcctatattttgtaaagtaatacaaaaactacataaatatacacatatacatatatgtgtgtatacgtatacacatcaaagtatatatgcatagaaaaaggcctggaaggaaataaactgttaacagtgactaccatggagagtggattcagtggagtggtaaggcaacagggaagtgaactttgacttttcattttgcatactgccatactattcaaattattattattatttttaagacagcatctcactctgttgcccaggcgggagtgcagtggtgcagtcatcgctcactgcagccttgaattcttgggctcaagtgatcttctgccttagcctcccaaaatgctgggattataagcatgtgcgaccacacccggctaattcttttattttacttttgtagagatggggtcttgctatgttgagcaggctggttttgaactcctggcctcaagagatcttcctgccttggcctcccaaagtgttgggattacaggcgtgagccaccacacctggtccaaatcttttttaaagtaacttgtataactttaaaaaattataaatgtgaaagtcacaaaatagaagtattccattttttctagccttttagcctactggtaaataataagcatgttagtagttatggggcccaatattgcagtaaattcccctctcatggctctatcttgccatttctttgacctttattgccttctggtttagaccatagaataagaggtccttagtgagaccctgtctctacaataaataaataaataaataaataaataaataaataaataaataaaatattagccaggcacagtggtgtgtgcctacttgggaagctggggcgggaggattgtttgagcctgggagtttgaggctgcagtgagctataatcatgccgctacactccagcctggacaacggagcaagactctgtctaagggaaaaaagaaaagaaaccttgctctgcagaaagcctttgttaaaatatatcttaaatacacacaccacacacacacacgcgtgcgygcgcgccctgtgaaaggatccaaagacagaaggagtttgtagggtgctctctgctattcatgaagtaacaaggattttttaaaaaattacttttgggccgggcgccgtggctcaacgcctgtaatcctagcactttggaaggcggaggctggcagatcatgagatcgagaccatcctggccaacatggtgaaacctcatctctactaaaaatacaaaaattagctgggcatagtrgtacgcgcctgtagtcccagctacttaggaggctgaggcaggagaatcgcttgaacccgggaggcggaggttgcagtgagccaagatcgcaccactgcaatccagcgtggcgacagaacgagactccatcaacaacaacaacaaaaaattactttgggctgggcacggtggctcacacctataatcccagcatttggggaggccaaggtgggtggatcactcgaggtcaggagttggagaccagcgtggccaacatggtgaaacctcatctctactaaaaatacaaaaattggctgtgcatggtggcaggtgcctataatcccagctacttgggaggccaaggcaggggaattgcttgaacccaggaggcagaggttgcagcaagctgagatcatgccactgcctggacgatagagtgcgtctcagtcaaaaaaaaaaaaaaattactttaaccttaaaataggttatccttgcccattatcctcaggattatgtttctaaaattcaaatctgatttattttactcctttgcatttaaattttttctaatgtttcttaatgcctaaagtagtaatgtctgaagtttagaaattactactttaggcatcaagaagtaatatagtaaattaccactaatgcttgtctttattttaaaactatacatgaatttactacattgatagtctattaygtacattataaatgtaagtgaaaatagaaaaataaaaatgtaatgagaaataaatttttaaatattttcattttacttacgaaaagtatagaaaactgtttatatagtaattttacttttggtgaaagcagtatggttgaataatattctttatttattaaaattttactttaacaactaataatatggaaattcagagatctgattctaagttctgtatgttttggtacttggttttgatgattatcataattgaaaaggatatatgtttagaagatgtgagctgtgcttacaaaatcctaatactcatttctcagtcctattcgccaattatattccaattcattttgaaattcagctagtaaatttccatcttttctgatgtcagttcttgtggattcattgaaaggtgctgcgtttttagattaaaaaaatagatttataatctccagttactctttagttgttatctttaaaaactagttaaaaaattcagccaggcacattggctcacacctgtaatcccagcactttgggaggccaaggtggacagatcacctgaggtcaggagttcgagaccagcctggccaacatggtgaaaccctgtctcactaaaaatacaaaaattagccgggtgtggtggcagscacctgtaatcccagctgctcgggaggctgaggcaggagaattgcttgaacccggaggcagaggttacagtgagccgagattgtgccactgaactccagcctgggtgacagagcaagactctgtctcaaaaaaataaaaataaataaaaataattctattaggaagtttaagtctatggatatgaatgtttttgtagtttatacacttacatcattttagtccccaaataatataacaatggaagtatttcaaaacatccatttaaaaaaatgttatctttaaaattcgagtatgttattttgttttcaaaatgcaataattttttttcttattgttaaaatatcacctttaccttgaagggacagattaagcatgtttaattttcctaaagtatctgataggtaacatatgactgatagccattgttttgaaattataatgtggctggagatgaattcatattagacacagaagaaatgtcagtgttgccatttttctagtgttaatgatactactaggagtattagtggtttagtattatcttcaatatatggactttgcagtaatctttttttagccagttgccttttttttgcaaggattagtttagctaaaactagacaatatccataaatccatgtatctgggcatgagtaaagacccattatttgcacttggcaaaagcataggaaccaagagtgccactgtcattgcctttgtgttgcagaacgccaactttttcatctgtacacctcacctaccacctgacccacacatagtgagggtgccagggttaattcatgtagttatgtagtgtcagttaattccttatttttaacacacataaagagaagccataagtgtgtggaatgagctccagtgatgtagttggttagcatgcagtactgtacagcagtaggtaagcatgtggaggtatttggatctgataaccttttccttttctttgactggttttatgatggagtcattcagtttttataccaaaaatatttatggaacaccaaccatgggcactgaggatacaacagtgaacaaaaatagatgtattcactgcccttgtggaactctcagtttggtggcagaagaacatgaatgaaactatyaagcagtagtcaaatgtggaattgtaatgaaggagggggtgcttggtgcaagtgtttgtgatcatgtgatttcttctgctctgaggtccactgctttcaaagagtttttaaaaacagtattgattttcctaggaatgtcaaaagaagtaagattgagtcccagcacatgctgaaaaatatgtgctatattgaataaattaatatacattttrtaaactaataaaatcaaacctttttcaaacatttatttgcacatattgtttatatatagtatatgtcatatatgccgtatatgtcatatatatatatatacatatatgccaagtactgagttagccactgaaaatgcaaagacaaccaagggccagcccctgttcttcaggtagacagattcgtactcagataaattacagcagacaatggcaagtgctgtaatataggtatgaacagactgccagggtcattggtgcatgaggtgagatctgagaaatgagcaggtatagagggaaatagagtgactaaagttgtcttcattttagtgatagtccatgtctgcagaaaggcagtatgttcccttcagactctaagatccttctctaacagggcttgcaagtcctatggtttggtcacttaatcccctgtcctgggtcatcctgcctcagagcctgcagtgttactctggctctagctacataagaacttctacatacccgttyaggtttggtatttgaacaattayatttggaacagaaaagttccatcaatctttaaacctcataatccaattatgtcagtaaaattccagttttttggtccaatggaattggggtaatattttgcaaactgaagttgagagaaatagtgtttattttgaaaagaaaaatggtcggttagcaattttcaagaagttaggcttgcatgaactcctaggggcgatatagccctcctgattggggtcaccatttttctggaccttcagctctagtctctggagagtccctgcttgcatggcctagacctgtagctgtctttagcagggcatctgaggctttaaaaaagaaaagcaacataagtactgcagaaatttgaggatcaggaagataatatgtccaaggaaactgcttaaaggggggttgcaccaraagctcaagaaacccagaagttatttctgagactggctccagttatttcaaatttcattcatattgttttgtttcctttgttgctaaactggaacaggaaaccaaagcctaaaagctcaattaaagtggaaaatgaaaacctaaatattggagggggaaaataccacactaaaccgatctttatgtttctcctatagttagtattattatggaagtttgaatcatgtcacttttcagtaaaactatgagtttcattgaagtggaggtggtttctatagctttttacaagagaacttgtgggtatctatttccttactattccctcaataaaaaggaagcccagtgacctccaccagaccattacaaatgtgaaacttggcacttaaaattgcttgctctaaattttccaattgctttctctctttttttyccatttaatgtcgtcctgccaactagtgattttattattataaacaggacattgtattcacttttaagaagaaatatgaagctggaggtaaaattacaaactgcagcttctcggctgccaaaatagaaaacaatgagctaaaaatactaagcacagaaagggggttgtggtaagaaatattgaaaaatcttcaagatggagctgttccaaagagacagaaatttcctgtcactccaggtaaaaccaaccttgaaatagcaacttgaaaggagagtcatataatactaacctctttcaggtcaacccttttgtgggaaagctttcaaacataactaacattaaatgactaatgatcttgctgttcatcaggaagtccaatatgattaaattgcctttagaagaaggttcccctggtaagacagtgtggtagcattgaaggagcgctggaagttagtcctagttctccccagggcctagctaggtgattttaggcaaaccagttaaatctggggaagtggagagccgtgagcaattttatcttttgtgaaatggatttttgaccagattaggatttttcaaaacatgttactaggtcatgaataggtgtcatgcagaaaaaggatctgtgggcaagtatttttggaaaacagtgtgttaatagatttcttagagtttcttctcatggattatcttgtggaactagtattccttagaatacattttgcaactttctgaactaggtatttcaaacccctctagctctaacagagcatgactctgtatttgaaatgtcttttctgagttatttagagctgtctcattcttggatttgaaagaaaatggtatcccatcagtgattgtctgccgcatttatctgacaaataactatcaactgtgccccaccatggaccacccaggraagataattacgcaggaaattcaagggttgtgctttaaatctcagttcttcgatggccaagggaaccccttcttcccttagctggagggaagcaagattaaattgtttggcatcaaatggggaagctgtcattgtcatttgaaactcctggcagtagtattcctttcatgtaaatcccaactcactgtgaaattacaagaaatgcatagatagtaaccaggatgaatgggccctaaagtagatacacaactggacyttcttaattgtaagtatttagtacttcatcagcccataaaattcatgttgataaatagcaccactctcagaaaagacaaatactcaaagatcaatagatttttgtctgaaccaggaggaaaaatgcctactggcaaaagacaatatttgaatttattccctagaaatatttttatagcactgtagaaatatgagtgcatgggaaagataatttctacatcttctaaataaaatctgtttggaaattatactataatgatatttaaaaatttcattttgtggtatagatggtctaagatttggaataaactggagtatagagataactaaatgtcagggtggcaaagtctgttttttatattgagatattcaaataccacaaaattaatcattttaaattcagtggtttctcgtatattggtagatttgttgaaccatcaccactatctaattccagaacatttttgtcaccccaaaaatcaattccattagcagtcactcctcattccctctccccccagcttctcacaactactcatcagttttcagtctctgtggatttccctgttctgaacatttcatataaatggagtcatacagcaagttgcctttggtagctgacgtggtttacttgacataatgttttcaaggttcatccatgttgttaaatatatcagaacgtaattccattttatagctgaataatattctgttgtatggatatttcacattttgtttattcattagttgatggacatttgggttgattccccagcttgactattatgaataatgctgctatgaatatttgtgtacaggttttggtgtggacattcagttattttgggtatacacctaggagtgaaattgctaggtcatatggtcagtctacttttagagtaattgtgaaactgtttttcaaagtagctgtaccatttgcactccctgtggcaatgtatgagggtctcagttgctccatatcctaacacttgttatctgtatttgtgattatagccatcattgtaggtgtggggtagtatctcattgtggttttgatttgcatttctgtcatgactaatgagactgaatgtattttgatgtgcttattggtcatttgtatattttctttgaagaaaaatctactcagatagtatctattcagatcctttgccatttttaaaatggattgcctttctattgttgagctataagtgtagtttctgtattccaaacactggtcatttatcagatatatgatttgcagatattttctcctacttgtgggctggctatcttgcactttcttgatggtgttcttagaagcacaaagtttcaaaatttgatgaagacccgtttagtctgttttttctttggttgcttgtgtttttggtgtcatatctataaaaaccattggcgaagatcacaaagagttagacatatgttttctttttgtttgtttgttttgagatggcgtctctgttatccaggctggagtgcagtagtgcgagctcagctgcaacctctgcctccctggttcaagcgattctcctgcctcagcctcccaagtagctgggagtgcaggcacccatcaccacaccctgccaatttttttgtgtttttatagagatggggttttgctatgctgggcaggctggtctccaactcctgacctcaagtgatccaccagcctcagcctcccaaagtgctgggatcataggcatgagccaccgtgcctggccaacataagttttcttctatgaactttatactgttagttgttatatttatgatccatttttagttaatctttgtaaatggtgtgaggtatgggtcaaacttcatttttttgcttgtggataaccagttgtttcagcaccataagaaaaacttgttgacaagatgattctttcttcatgaaattgtcttggcatttcttgtcaaaaattatttgaccataaatgtattggtttatttctggactctcaattctgttccattgatctgtatatttgtctttatgccagtaccacactgtctaaattattgtaactttgtagtaagttttgaaattgagaagtgtgattcttccaactttgcttttttttctttcagatttttctactattctgggttctttgcattgccatatatattttaggatcagcttgtcaatttcaggaggcactcaggattttcataagaattgctctgagtctgtagatcagtttggggagcatttccatcttaacactgttaagtcttccaacctatgaacatgggatgtctgtccattaattaggtctttaatttctttcaatgatgttttgtagttttcagtatacaaggcttctttgttaaatttaatcctacatatttattctttttgatgctgttgtaaatgaaattgttttcttaatttcatttccaaattatttattgctaatgtttagaaatacattttatatttatatatatatctggtatcctgcaaccttacaaaaatcatttgttggccgggcatggtggctcatgcctgtaatctcagcactttgggaggccaaggctggtggatcacttgagatcaggagtttgagaccagcctgggtaacatagtgaaaccccgtctctattaaaaatacaaaaattagccaggcttggtggcaggtgcctgtaatcccagctactcaggaggctgaggcaggagaatcgcttgaacctgggaggtggaggcagcagtgagcagagatcacgccactgcactccagccagggtaacagagtgagactccmcctcaaaaaaaaaaaaaaaaaaaaaaattgttagctctgtttttcgtggataccatggaatttcctgtatttagaagttcatgtcatctgcaaatagggaagttttacctcttcctttctaatttagatgccttttatttccttttgttatccagttactcaagctaggaccttctgtacagtgttgaatagaattaatggaagtgtgcctctcttgtcctgatcttgaggaaggaaagcattcagtcattcagttttttttttgtttttttgttttgagacagcgtcttgctctgttgccaggctggagtgcagtggtacagtcacaactcacaattccaggctcaagtgatcctcccagctcagcctcttacgtagctgggacaacagggcgtgccaccaaacccagctaatttttgtattttttgtggagatagggttttgctgtgttgcccgggctgctcttgaactcttaggctcaagtgatctgcccgccccggcctcccaaagtgctgggattacagatatgagctaagcactcagcccagtctttcaatattaattgtaatgtaagctttgggggttttgtagatgctctctatcagctgaaagcttttccttctagtcctgatttattgagtggttttctcatggaagagtgttggattttgtcaaatggtttttctgtctgttgagataatcctgtgatttttgttctttattaatctgtttcattgattgactatcatatgttgagccatcacattcctgggataaatttcacccttgtcatggtgtataatgatttttacattgctagatttggtttactggattcctttttaggatctttgcttcgtatttttaagagatttcagtctttagttttcttgtgataactttggttttatrtgaggataacactggcctcatagaatgagttttggaagagtttgtgaagaatttggggtatagttttttttctttttttcttctagcttttattttaggttcgggggtacatgtatgtacgggtttattatatgagtaaattgcatgtctctatagtttggtgtacaaatgattttgtcacccaggtagtgagcatagtacccaataagaggtagttttttgatccttattctcccactctagaactcatcagtaaagccatctggccctgtgcttttgtgtgtgtgtcggcgatgggtgggggggtggtttgtttattaattcggtatcttttttcttatagatctattgaacttttccatttttaagtcctctgcagtttatcttcctagaattttttattttttatttttagacggagtttcactcttgttgtccaaactggagtgcagtggtgcgatttcaacttactgcaacctccacttcctgggttcaagtgattctcctgcttcagcctcccaagtagctggaattacaggtgcccaccaccacatctggctagttttttatattcttcatagagacagggtttcaccatgttggccaggctagtcttgaactcctgacctcaactgatccacccaccttggcctcccaaagtgctgggattacaggcgtgagccaccgcacccggcttcttcctagaactttgtcttttgcatcttggttatctaatttcttggcataccattgttattagtattcccttataatccttattgtttctgtaagattgttagtaatatttgctctttcatttgttagtttagtaatttgaatctctccccctctctctctgttttggtcagcttagctcagggtttgtcaattttgttgatcttttcacatagccaacttttattttcttcttattctttttatttccttctctttttttttaaattctctttttcatttatttctactctaatctttgttattttcttttttctgcttgcttaggtttagtttgttcttctttggtttcttaaggtggaagtttatgttattgagttcagatctttctatgttttgtttttgtttttttcttgagatgggagtctcactctgtcgcccaggctggagtgcagttgtgcaatcttggctcactacaacctccgccttccaggctcaagtaatcctcttacctcagcctaccaagtacctgggaccacaggcatgtgccaccatgcccggctattttttttaattttttaattaattaattaattwatttatttattattattattattttttaaattatactttaagttttagggtacatgtgcacattgtgcaggttagttacatatgtatacatgtgccatgctggtgcgctgcacccactaactcgtcatctagcattaggtatatctcccaatgctatccctcccccctcccacctccccaccacagtcaccagagtgtgatattccccttcctgtgtccatgtgatctcattgttcaattcccacctatgagtgagaatatgcggtgtttggttttttgttcttgcgatagtttactgagaatgatggtttccaatttcatccatgtccctacaaaggacataaactcatcattttttatggctgcatagtattccatggtgtatatgtgccacattttcttaatccagtctatcattgttggacatttgggttggttccaagtctttgctattgtgaataatgnnnnnnnnnnnnnnnnnnnnnnnnnnnnnnnnnnnnnnnnnnnnnnnnnnnnnnnnnnnnnnnnnnnnnnnnnnnnnnnnnnnnnnnnnnnnnnnnnnnnnnnnnnnnnnnnnnnnnnnnnnnnnnnnnnnnnnnnnnnnnnnnnnnnnnnnnnnnnnnnnnnnnnnnnnnnnnnnnnnnnnnnnnnnnnnnnnnnnnnnnnnnnnnnnnnnnnnnnnnnnnnnnnnnnnnnnnnnnnnnnnnnnnnnnnnnnnnnnnnnnnnnnnnnnnnnnnnnnnnnnnnnnnnnnnnnnnnnnnnnnnnnnnnnnnnnnnnnnnnnnnnnnnnnnnnnnnnnnnnnnnnnnnnnnnnnnnnnnnnnnnnnnnnnnnnnnnnnnnnnnnnnnnnnnnnnnnnnnnnnnnnnnnnnnnnnnnnnnnnnnnnnnnnnnnnnnnnnnnnnnnnnnnnnnnnnnnnnnnnnnnnnnnnnnnnnnnnnnnnnnnnnnnnnnnnnnnnnnnnnnnnnnnnnnnnnnnnnnnnnnnnnnnnnnnnnnnnnnnnnnnnnnnnnnnnnnnnnnnnnnnnnnnnnnnnnnnnnnnnnnnnnnnnnnnnnnnnnnnnnnnnnnnnnnnnnnnnnnnnnnnnnnnnnnnnnnnnnnnnnnnnnnnnnnnnnnnnnnnnnnnnnnnnnnnnnnnnnnnnnnnnnnnnnnnnnnnnnnnnnnnnnnnnnnnnnnnnnnnnnnnnnnnnnnnnnnnnnnnnnnnnnnnnnnnnnnnnnnnnnnnnnnnnnnnnnnnnnnnnnnnnnnnnnnnnnnnnnnnnnnnnnnnnnnnnnnnnnnnnnnnnnnnnnnnnnnnnnnnnnnnnnnnnnnnnnnnnnnnnnnnnnnnnnnnnnnnnnnnnnnnnnnnnnnnnnnnnnnnnnnnnnnnnnnnnnnnnnnnnnnnnnnnnnnnnnnnnnnnnnnnnnnnnnnnnnnnnnnnnnnnnnnnnnnnnnnnnnnnnnnnnnnnnnnnnnnnnnnnnnnnnnnnnnnnnnnnnnnnnnnnnnnnnnnnnnnnnnnnnnnnnnnnnnnnnnnnnnnnnnnnnnnnnnnnnnnnnnnnnnnnnnnnnnnnnnnnnnnnnnnnnnnnnnnnnnnnnnnnnnnnnnnnnnnnnnnnnnnnnnnnnnnnnnnnnnnnnnnnnnnnnnnnnnnnnnnnnnnnnnnnnnnnnnnnnnnnnnnnnnnnnnnnnnnnnnnnnnnnnnnnnnnnnnnnnnnnnnnnnnnnnnnnnnnnnnnnnnnnnnnnnnnnnnnnnnnnnnnnnnnnnnnnnnnnnnnnnnnnnnnnnnnnnnnnnnnnnnnnnnnnnnnnnnnnnnnnnnnnnnnnnnnnnnnnnnnnnnnnnnnnnnnnnnnnnnnnnnnnnnnnnnnnnnnnnnnnnnnnnnnnnnnnnnnnnnnnnnnnnnnnnnnnnnnnnnnnnnnnnnnnnnnnnnnnnnnnnnnnnnnnnnnnnnnnnnnnnnnnnnnnnnnnnnnnnnnnnnnnnnnnnnnnnnnnnnnnnnnnnnnnnnnnnnnnnnnnnnnnnnnnnnnnnnnnnnnnnnnnnnnnnnnnnnnnnnnnnnnnnnnnnnnnnnnnnnnnnnnnnnnnnnnnnnnnnnnnnnnnnnnnnnnnnnnnnnnnnnnnnnnnnnnnnnnnnnnnnnnnnnnnnnnnnnnnnnnnnnnnnnnnnnnnnnnnnnnnnnnnnnnnnnnnnnnnnnnnnnnnnnnnnnnnnnnnnnnnnnnnnnnnnnnnnnnnnnnnnnnnnnnnnnnnnnnnnnnnnnnnnnnnnnnnnnnnnnnnnnnnnnnnnnnnnnnnnnnnnnnnnnnnnnnnnnnnnnnnnnnnnnnnnnnnnnnnnnnnnnnnnnnnnnnnnnnnnnnnnnnnnnnnnnnnnnnnnnnnnnnnnnnnnnnnnnnnnnnnnnnnnnnnnnnnnnnnnnnnnnnnnnnnnnnnnnnnnnnnnnnnnnnnnnnnnnnnnnnnnnnnnnnnnnnnnnnnnnnnnnnnnnnnnnnnnnnnnnnnnnnnnnnnnnnnnnnnnnnnnnnnnnnnnnnnnnnnnnnnnnnnnnnnnnnnnnnnnnnnnnnnnnnnnnnnnnnnnnnnnnnnnnnnnnnnnnnnnnnnnnnnnnnnnnnnnnnnnnnnnnnnnnnnnnnnnnnnnnnnnnnnnnnnnnnnnnnnnnnnnnnnnnnnnnnnnnnnnnnnnnnnnnnnnnnnnnnnnnnnnnnnnnnnnnnnnnnnnnnnnnnnnnnnnnnnnnnnnnnnnnnnnnnnnnnnnnnnnnnnnnnnnnnnnnnnnnnnnnnnnnnnnnnnnnnnnnnnnnnnnnnnnnnnnnnnnnnnnnnnnnnnnnnnnnnnnnnnnnnnnnnnnnnnnnnnnnnnnnnnnnnnnnnnnnnnnnnnnnnnnnnnnnnnnnnnnnnnnnnnnnnnnnnnnnnnnnnnnnnnnnnnnnnnnnnnnnnnnnnnnnnnnnnnnnnnnnnnnnnnnnnnnnnnnnnnnnnnnnnnnnnnnnnnnnnnnnnnnnnnnnnnnnnnnnnnnnnnnnnnnnnnnnnnnnnnnnnnnnnnnnnnnnnnnnnnnnnnnnnnnnnnnnnnnnnnnnnnnnnnnnnnnnnnnnnnnnnnnnnnnnnnnnnnnnnnnnnnnnnnnnnnnnnnnnnnnnnnnnnnnnnnnnnnnnnnnnnnnnnnnnnnnnnnnnnnnnnnnnnnnnnnnnnnnnnnnnnnnnnnnnnnnnnnnnnnnnnnnnnnnnnnnnnnnnnnnnnnnnnnnnnnnnnnnnnnnnnnnnnnnnnnnnnnnnnnnnnnnnnnnnnnnnnnnnnnnnnnnnnnnnnnnnnnnnnnnnnnnnnnnnnnnnnnnnnnnnnnnnnnnnnnnnnnnnnnnnnnnnnnnnnnnnnnnnnnnnnnnnnnnnnnnnnnnnnnnnnnnnnnnnnnnnnnnnnnnnnnnnnnnnnnnnnnnnnnnnnnnnnnnnnnnnnnnnnnnnnnnnnnnnnnnnnnnnnnnnnnnnnnnnnnnnnnnnnnnnnnnnnnnnnnnnnnnnnnnnnnnnnnnnnnnnnnnnnnnnnnnnnnnnnnnnnnnnnnnnnnnnnnnnnnnnnnnnnnnnnnnnnnnnnnnnnnnnnnnnnnnnnnnnnnnnnnnnnnnnnnnnnnnnnnnnnnnnnnnnnnnnnnnnnnnnnnnnnnnnnnnnnnnnnnnnnnnnnnnnnnnnnnnnnnnnnnnnnnnnnnnnnnnnnnnnnnnnnnnnnnnnnnnnnnnnnnnnnnnnnnnnnnnnnnnnnnnnnnnnnnnnnnnnnnnnnnnnnnnnnnnnnnnnnnnnnnnnnnnnnnnnnnnnnnnnnnnnnnnnnnnnnnnnnnnnnnnnnnnnnnnnnnnnnnnnnnnnnnnnnnnnnnnnnnnnnnnnnnnnnnnnnnntatgtgtgtctctgcacgtgagatgggtttcctgaatacaacacactgatgggctcttgactctttatccaacttgccagtgctgtgtcttttaattggagaatttagtccatttacatttaaagttaatagtgttatgtgtgaatttgatcctgtcattatgatgttagctggtgattttgctcgttagttgatgcagtttcttcctagtctcgagggtctttacattttggcatgattttgcagcggctggtaccggttgttcctttccatgtttagcgcttccttcaggagctcttttagggcaggcctggtggtgacaaaatctctcagcatttgcttgtctgtaaagtattttatttctccttcacttatgaagcttagtttggctggatatgaaattctgggttgaaaattcttttctttaagaatgttgaatattggcccccactctcttctggcttgtagggtttctgccgagagatccgctgttagtctgatgggcttccctttgwgggtaaccygacctttctctctggctgcccttaacattttttccttcatttcwactttggygaatctgacaattatgtgtcttggagttgctcttctcgaggagtatctttgtggcgttctctgtatttcctgaatctgaaygttgggctgccttgctagattggggaagttctcctggatratatcctgcagagtgttttccaacttggttccattctccccatcactttcagagtgacaccaatgagacgtagatttggtcytttcacatagtcccatatttcttggaggctttgcttgtttctttttattcttttttctctaaacttcccttctcgcttcatttcattcayttcatcttccatygctgatascctttcttccagttgatcgcatcggccaccatgcccggctattttttttaattttttaattttttaattttttgagacaatgtctcactctgtcactcatgctggagtgcagtggtgcgatctcagctcactgcaacctccacctcctgggttcaagtgattctcctgtgtcaacctccagatagctgggatacaggcgtgcatcatcacacccagctaatttttgtttgtttgtttgtttgttttttagtaatgatggggtttcaccatgttggccaggttggtctcgagcgcctgacctcaggtgatctgcccacctcggcctcccaaagtgctgggattacaggcgtgagccaccgtgcccgggcgcctggctaatttttgtatttatttgtagaagtgaggtttcatcatgtcacctagggtggtctcgagctcctggattacaggcattagccactgtactttttataaaggcatttacagctactccctccctacttccctgattgctttagctacatcccataaattttcataggttgtattttgttttcatttatatctaaatattttaaaatttcctttgagatttcttctttgacgtattttttatttaggagtaggttgtttaatttctacatacttrtgaatttctctaatttctttatgctattaatttctaattccattctattttggtcagagaacatactttgcatgattttagtccttgtatatttattgaaacttgttatatggtgtggagaatgttccatatccactttagaagaatatgttttctgctgttgttggatggagtgagtgttctgtagatatctgttagatctaattgatttatagttttgtttaagctttctattttcttgtttatcttttgtttattttttatctctgttactggatgttgtgtattgatatatattacagttgaattctacatttctcccttaagttctgccattttttgctttgtgtattttgtggctttgttgttagatgcatgtgtgtttataattgtttcattttctagatggattgagcctatcattgttataaaatattatcctttgtctttagtaacactttttgccttgaattctattttgtctgctattagtttggctactccagctctcttttgttactgtttgcatgacacctgcacatgcatacacacacaggcacacacacacatacaattaaatactattaaatagtaatataatgtggcagctctggaaatcatcttgcctcccttcatttccaaggtttgctgttattgctgtttgttctttctgctgttcattttctgacttttttgaactaagtcttttgagtctatgctgtgatctgaatgtctgtgttccctctaagttcgtaggttgaaactctaacccccaaattatagtttaggaaggcagttaagtcaagggtagagccctcatgaacgggattagtgcccttataaaaagaagcatgagaaagaaacctcacccctttcaccatgtgagaacatagtaaaaaggtgccattcatgaggaagtgggccttcatcagatattgattctgctagtttcttgatcttggactttccactctccaaaactgtgagaaataaacgttataagctacccaatttatagtattttgttatagcaactcaaacaaacagagacagtttgtattctttgttatttgaagctactgaaatctctgcttggctagcttagtggtcacctaatgaataaacagagatttccttaaatatttgaaaacagtaagtctcttagcgtttgttaagaggctctgtgtcgactaatacctttaatgcttaggcatgcactttacaactctgccatagccttcacttcctgctgttgcagagcttcagggtcagccagaagtaagagtgtaagacccttcttaagtctttcttgggcatgtgcacagccctatgcatgagtgtgaccatctttatccccaggaatgtgtcagaccttttcacagccctttatagatgcctcattctccagcttttccttttaatgtttttggtcagttcttgttgaccagtactttagctcactgttatcaccatctcagatagctgccatgttaaataaatactgctgaatgtttttgatgaacacccctggggctataaggctgtttgcagtgaacaaggtttgatgaaggtcaaattaagcaaacccggtaaatgggggttttcagggaactgctggataggtcaaataatgacatttctcctgtgatgctgtttttagggtgctgtaaacctgttctkgccactccagtgactgctaggccactggttttcaccacgattacaatgctgttgattttaaggctggagagagagatagagctggaaagggggatgtgggaatatggaaagtaaactttgtaagtaaaactttacaaagttcagtgtccttgttgatatktagccatttttcttgagtaattgcatctcagattgttaaaagcctgtggttaatttccagagttacactaaatttgattttgacagttttgtccagtgttgttgttacttatatgaagtagtagcttttcagaggaggyctctactttgcgagtcccactgatgtgactctcaagtcttttcacttttattgcttgagttggagataaaagaagacagtgtcctgcagaaaagctacaagctttcctgggaaaataacagaaagagtgaaaggaagatagaatttgaaaataaggtcgggtgcgtggctcatacctgtaatcccagtactttgggaggtccagtactttgggtggattgattgagtccaggagttccagactagcctgggcaacacagcaaaaccccatctgtacaaaaawtacaaaaattagctgggcgtggtggcatgtgcctgtagtcccactactagggaggctgaggtgagataatcacttgagcccaggaggttgagggtgcagtgagctgtgatcgcgccactgcactccagcctgggaaacagaacaagacactatctcaaaaaaagaaagaaaaagaaaagaagcatatagtagtcagtaattgtgtgggcaaattattcctaagattagtagtgttgggtagcctgacattcgtattagggcaggtcaaaaatgaaatggtcaactctgttgataataggaaaagaggaaaataaatttcttagcttcttatacaatatcctgttctgctttcagcccttcatctttcctcagtcttgctctgtcatagttctctgtcttacctatgccttgcattgtacttcatccattttccagggcccgtcttgaatgctgtgaattttttgtcttctcactctagaagaattagccttgcccttctctgttctcccgaggcagtctgctcacttgccataatgtacctaatttacttaaatatgactctgtctctctgatgggtagcaaagttctcatcaagagcaaggactgggtgttacttttctgtttctaggtgctaactcagtacatggcatccagacccaaataaagtgatcatggaatattcaccaagatagaccatatcttgagtcatcaaacaaacttcagctcatgtgaaaatgaagtcatatagggtatgttttctgaccatatggaactacaaactagaaatccataacaggacaatagtaaaatatctagacacttggaaattaaacaacacacttataaataattcactggttaaagaggaaatcttaaaggaaatttttaaaaaatatgtagaactgaatgaaaatgaaagcacaacatattaaaatatgtgagatgtcgctaaagcagtaccgaggaaaatttatagctccaagtgcttacattaaaaagaaaaaagatctcagcagtgagctatgtttttaccttaggaatttagataaagaagagcaaggctgggcatggtggcttatgcctgtaatcccagcactttggaaggcctaggcgggtggatcacttgaggccaggagttagagacctgcctgaccaacatggtgaaacctygtctctactaaaaaaataaaaacaaaaaaccccaaaattagctgagtgtggtggcttgtgccagtagtcccagctactcaggagggtaaagcaggagaattgcttgaacctgggaggtagaggttgcagtgagccaagattgtgccactgcactccagtctgggcaacagagtgagacttcgtctcaaaaaaaaaaaaaaaagcacgatatgcccaaagtaagcaggaaggaagaaaatataaagataagcacttaagtcaataaaattggaaattggaaaacggtagagaaaattggtgaaacaaaaagctggttctttttttttaaaactttgacttaatttttaaaagagacaggatctcactatgttgcccaggctgttcttgaactcctggactcaagcagtccacctgcctcagcctcccaaagtgctgggattataggcgtgagccaccattcccagccaaaagcttgttcttgaaaaaaattaataaaactgataagcctttagcgagattgatggataaacggaagacacacatcacattagaagtgatatgggacatcactacagatactgcagccatttaaaggataataaggaacatacaaatggtttttcaagaagttaataattcaacatcttagaagagatgagtcaaagactacgaactttcatcattcaaccatgtcacatagacaatctgaatagtcacaaaactattaaaaatattgaattcataatttaaaagctcacagaaaggaaatcttcaagcccagatggtttcactggagaattctagaaaacatttaaagaagaattaacagcaatttttacacaatctttgcttgaaaatacaataggagagaacatttcccatctgattttatgaagcctgatacccaaaccagacagagatcatatcacaaagaaaactgtggaccaatatccctcctgagctcagatgcagaagtattcagcaaaattttagctaatcaaatccagcaatgtataaaaagaattctattgctattacagaagtgtctaaaaaaaagtgttctaaactatgacctagtatgatttattccaggcattcaagactggttcaacattcaaaaccaattaatgtatcrtgtgtacaaattaatttaaagtggatcgtagacctgaatgtaagggctaaaactagaaatctcttaggagaaaacaaaagagtaaaccttagtgaccttggattggccaaggaagaagtgacaaaataaaaaaatagacaaattggacttcatcaaaattaaaaattttgtgctttgaaggacaccatcaagaaagtgaaagcataaccctcatgggaaaaattgttttgcaaattatgtaggttaatatatctagaatacataaagaactcctacaacttaacaataaaaaagacaattttaaaatgggcaagaattttaagacacacaaatggtcactaagcatataaaaaaaagctcagcatcattgatcattacaaaaatgcaaatcaaaaccacaatgagataccactgtacattcactaggatggctgtaatttaaaaaaatacagataacaagtgttggtgaggatgtagtgaaattggaaccctcttatactgctggtgagaatgtaaaatggtgcagccattttggaaaatagtttggcagctcctcaaagggttaaacatagagttaccatatgacctagcaattttactcctggagaattgaaaacatagccacacaaaaacttgtacatgaattattattattattttttaaggtggagtcttgctctgtcatcaggctggagtgcagtggtgcgatctcggctcactgcaacctccgcctcccaggttcaagcgattctcctgcctcagcctcccaagtagctgggactacaggtgcgcgccaccatgcccagctattttttgtatttttagtagagacagggtttcaccatgttggccaggatggtctcgatctcttgacctcgtgatctgcccacctcggcctcccaaagtgctaggattacaggcgtgagccactgtgcctgaatgtttatatcagcattatttaaaaaatggaaacaggccaggcttagtggctaaagtgaggcagagggaggaggattgcttgaggccaggagatcgagaccagcctgggcaacataataagatcctttctttatttttaaaaaggcccagcactttggaaggctgaggcaggcggatcacttcaggtcaggagttggagaccagcctggccaacatggtgaaactccgtctctaccaaaaatacaaaaacaattacctgggtctggtggtgtgcgcctgtaatcccagctactgtggaagctgaggtgggagaatcacttgaacctgggaggcggaggttgcaatgagctgagatcgcgccatagccctccggcctgggcgacagagcaagactctgtctcaaaaaaaagtggagggggagggagrgaaacaacccaatcaactgttgaatgtataaacaaagtgtttcccctctgtgcagagaagggaaaacatggaatgattgccatgggtatggagtttcttttcttgggtaatgaaaatattctaaaattaggtagggataatgattatacaactctgtacatattctaaaaacttgtgaattgtatgctataaaatgataaattttatgtaacttttttctcaataacagaacagaatagagaatccagaattagatccacacaaatatgcctgactgatttttaacagaggagcaaacgcagttcaatgtaggaaggatagcctttcataaaatggcattagaggaatttgccatacataggcaaataaatgaacttcgatctaaacctcatgccttatgcaaaagttaactcaaaatgggtcatgggcttaagtataaaatgtaaaagtataaaacttaatagaaatgagcatagaagagtacttacaggatgtaggactagagaaagagttcttagactttgacatagtacagtccacagaagaagaggttggtaaattggatctcatcagaattaaaaactttctgtctatgaaagatgctgttaagaaaagaaaaagatgagctgcagaaaattctttctgcagctgggagaaaatatttgtaaaccacatatccaacaagagactagtatctagagtacgtaaagaacctttaaaaccaaagcaatccaattagaaaatggacagaagacatacactgaagaggatatacaaatggaaaacaagcaaattaaaaaatgtttaacatcacgacccattcgagaatgcaaattaaattcacaatatcaatacacatcaatcagaacatctaaagtaaaataatgaaaaggccaaattggcaagaagttctaagcaataccaagtgctggcgagggtgcagagaaagtggatcactcaaacgttgccggtggaaatgtaaaatggcacaaccactctggaaacactttggcagtttcttaaaaaactaaacacaacccggtaattgcactcctgggcatttatcccagaaaaatgaaaacctacattctcaaaaaaacctgtacatgaatttctatagcagttttacatagaatagcccaaatactagaaacagcccagatgtccttcagcagatgaatggttaagcaaattgtggtacatccatattactgaatggtacttggcaacaaaagagtgaactgttgatatgcgcaacagcttggatggatcttcagtctcaagggttacatatgtactgtatgattctatttaatctttttgaaagtacaattttaaaaagtcagctgagtttaagattcagaaaaggcaaattttagaaccatagaacagattcgtagttgccaagattgagggaggcaggacaggaagaaattgggtgcaattgagggatccttgagacaatagtagtgttcattatcttgattgagtggtatttacatgaacctacatatgtaataaaattgtatagaacttatacacccaaatgagtatgagtaagtgagaaatctaaataagattggtgcatggtatcagtgtcaatatcctggttttgatattgtactacagttttgtatgattttaccattggtaactgggtaaagggcacacaacatctttattatttcttatacttgcattttaatctacaattatcgcaacataaaagattctaaaaaatttaaaaggaaccagattaataaagatgggaaagtaatataatgtgaggcacttggaaactttggagcaggtgaagtttgaactcggctttgaaggaggaataggattttagtatgcttttgtcttaatttttaaaaaggggctgagcacggtggctcaacgcctgtaatctcaaaactttgggagactgagacaggaagattgcttgaatgcaggagttcgagaccagcctgggcaacatgatgagaccctcatctttacaaaaaattaaaaataaaattagccagatgtggtggtgcatgcctgtggttcccagctactcaggaggctgagatgggaggatcacctgagcccagaaggtcaaggctgcagtgagctttgatcatgccactgcattccagcctgggcaacagagtgagaccctgtctcaaaataggaaaagagaaagcagttaacatggttacctcatgctccgagaaaacctctcagttgggggatatgcctacgtggtccttgaattgcgtcagtaactatagaccaaggtgaaattcagaagactgagattttgctttaaagaacatgaacgacacaatttttggattgggaaagatgagtaaaatttggatattttgtgcttaggttctcaaaaggagatgagatgagagagagagaaagaagagagagagaggaagagaggaaggaaggaaggaagaaaggaagaaagaaagagaaagaaagagagaaagaaagaaggcaggcctggcattcagggaagaagtctagattacagatacctgtttaggtgcctgaaggtagtagttacaggcaccaaagtgaatgagtatacatagggtgagcatataatctgatgagggaagaggaccaaggatagactgtgaagagctccagaatgtaaagggtggaaggaaatttcttaggaaaaggtggtgttgggggcacagaaaggcagatattagaagagttaaagaaaagacaaaggcaaagttggtgacaagttccaaacaagggtgagttaccctgtgctctgctgcagtgaggtcagctgggacaaagctagaacagaagtcactgtgtttagccatgaagctcttttctttgtcctttggatatctcaagagtcatgtcagtgcagtgagtggagcgaaagccagattatagtcaactgaggaggtgaaaaagtggggatcctaaacgtaaacatctcttttaaggaggtttgctttgcagaggaagtgagagggagcttgaaagaagcagggtcctgaagatatttgtgcaaattggagagatttgagcttgctggcaagtggtgggtgaggagccagtgggcgacatacacatttttggactcctttttggaaattgccttcagagcctgaggcacattttcaacaatgggaaatcttcatctttcgagggtggatttaatttttggaagcagccaagttaattcagagccaagggtggtaaatcaggtgggtgatcaagctggataacacaacttcaaaaaaaattataattataaagtagtaacactgattttcttgtgaagctcatgaattggcttagaaagtaatccttaaaaaatcacaagaaccatttgagcagttgtagcattctctgaatagtaggtgtatggatttgtaactttgaggacactcatttgtgtggaagttctattatatatgaagaaattggcctagttacattgtgtttactcctagtgctcaaatgtaaagttgccatgtagtctttttgcctgagaggtgacttagtggagttataagtttatatatgggagaatcaagagtttcaaattgtgattgtttaaacagttctgtggtcttacagatgtaattagaattcctaggataggagtgttcccacaagcataacagtactttaaatgtgtgttcagttatccctttctatagtcatatttcatcgtttctttttgaaatagagttattttgaaaatattaagtcgctactctaatcttgaatgtctgtcagacctgagacagagctgggcacatagtaggcactcaccgaacatccctctcctgtcttctctaccctagtgtttgttatataccaggggtcacactaagagaaaaatcagttcatagctagtagatcatcttccatggtgtttggccaaaaatatccagcataaagaaaacaaatgtgtacagaagtttgatgtttttacttatctttttgttaatggggtatatatttatataccaaaagatatttttgaaggcttatgttatacctttatatacatacttatcatctcctttaatcattgaaataaccttgtgaaacttgtccttatttttcagataaagaaactgtggctctgagtagtaatctcttgcctgaggtcacatgactgagggggaagaactgggacttgatttcaggtctgcagttttggaatctctaactcacggtcctcatatgtctccaccttcttaaacctatgcccttaattttaaaaaaaagttgattaaaaaaataaatcagaagcacttcatacttcccccttcctcatactgagaaaatagaagttagagcctgtcttctttaagctcctactggctaaaagacttgatagcattgtactttatgtcattctaattaccaaagcaatagtttttaaacttctagaaagtcgcggcaccctccctctgcctccccacacctggagctctctgagctcccccaggggacagtgtggaagtggtgactgtaatgtcctgtcgtasctttcgataatgataaagtgttagagaaagccaggacgagttagccattctaggaaactttccacagctgttgcattaattaagacttttttggtcccaagtaacagaaaccactggaactcacttaagcagaaaggggaatttgttttaaggatgctgtggtgtctcccagaatccaagggcagggaaccagggactgcagtgaggcaagaaacccagaaagacttctttcttcctctctgcctctcctacttcacacactggcttccttcctcccctttactcagactagctcctttgcttcctcctccttagtgggatggctgctatctacagctaccacggtgctctccgggcccatccaaccaaagggagactgatttctctttcctccctgcacactccttccttgtttcccatcctttgtcccaatttccaaattctaggcaaggatcagattattccgttttgactttacatgctagtttgggtgagtgaatgtaaggacagacaacctaatgtgactagcacagttgcattcacttctacctttgggagttttaaatgctgctatcacaggagtgaaatacaagaacacaggttttagaggcaaattctgccacttactaggtatataatcttgggcaagttttagctcctgtgagccctactttctttaataaaagggatatacagataatgtctttctcatgaggttgtggcagagtttaatgtaataacaggtatagtgcttagcacagggtctagcatacattatgcttgataaaatattgcccctttatttctgatgattattaaggcacattgccttaacaaaaagatgtttaagtcatatgaggagtaaaaattttaaactgccttttggttcaaatttctgcttcctcttgcctcttttatgtccccatttcatctatcattgggtattaatatattcataatccaaaggactttggttctaagaaaccccaaaattctctaggaaatagttggaggtcccaaggtatcacccaaagtagtttcacaaataatgttggtacatagactattaggtgaaaaacattcatggctctactagcctttttttccagtgattggagttggaagaccccaattaaagattcaattcacggcgaggcccagcagtttgggaggccaaggcaggcggatcacttgagaccaggagttgaagaccagcctggccaacacggcaaaaccctgtctctatttaaaaatacaaaaattagctgggcgtggtggtgctcgcctgtagtcccagctacttgggaggctgaggcatgagaattgcttgaacctgggaagcagaggttgcagtgagccgggatcgtaccactgaactccagcctgggtgacagagtaagactctgtctcaaaagaaaaagaaaaagaaaaaagattcaatttagtaaatatttgttatctctactatatatatcttagtatatattaataggaatgtatcttgcaaatattaatgtatatagatatatatgctgcttctatgtgtgtgtatatacatgctaatatttgcaagatactgaaatagatattgttggaattaaaaatatgtataatatatatttacataaataattaagagaaacagtcctttcctttaaaaagagtaaagtctagaagaaaatactgtgaatctacaaaaatcatgaattcagggtgttttggcagaactggtttaccaaggtcccatgttaatgaagctaagtcacattaagtaagaatggagaaatagtttgaagccaaatcatggaggatactggatgccaagctgaggattatagttcaaagatagctagaagccagtgaaggtttttgagaaggagagtataaygtaattgtacgttctaagaattgactttgtcctaatagccaagtggtaaaggacttgaaaggcaggaaagaaagagaggagackggagtccatttgaagagagctgctttagtaggaatggaaagtgggctttatgaatttagcgccagtccagggcttggtaaggactgggctgtgggagttgggctgaggtagagagtgtgtgctgggtgacccgcaacctggaagcacaggaggaggtgtaggttgcatgaggggtcacttgggactcctctcctgaagttggtgggagtagagaagtagcactccattcttcactatgttccaattcttgatttggaaactctctgaaacaaacagttattatgagcatatttttgacctagaatctaagtatttaatattaaaatcagccaggaagtcattttcagcctgctatttaaaaacaaaacaaaaaactatagaacaagctctgaatgatacaacagagttttggcccaaaatgagtacttaaaagacatataattctaagcttggctttctccattaatgaaaagaaggacattcatactttcttctgttaaaaattacaaagtcatactcaatttaataatagaatccccgattatcctgaaatacagctgaaatttgttttgttttgtttttgagacactgtaacagcccaatgggttcttcttgcccattgcccagatagagccaattagtcaagacaggggaattacaatagagaaagagtttaatacatgtggagctggctaaaacaggtagagttttattatttctcaaatcagcctccctgaaaattcagaggctagggtttttaaaagatagtttggtgggcaggggctagggaatggggaatgctggttggttgggttggggatgaaatcatagggagttgaagctgtcctcttgtcttgagtcagttcctggggtggggtgcggtggggtggggtggggtaggggtggtgggtgggggtgccacaagaccaggtgagccagtttacagttctttttattttaaatagagatggtgtcttgctgtgttgcctaggctggtctggaattcctgggctcaagctgttctcctgcatcagcctcccaaagtgctaggattacagggatgaacccccactccctgccttgagcatgagccttaggtttgataataataatgttatccataggagcaattgagaggtggggaatcttgtggctcctggctgcatatctcttaaaccattattttaaatcttgctaatttattagttttatgaaggcagtctagtccccaggcaaggggggagtttgttttggggagaggcttttatcatctttgttttaaagttaaagtatgaattaaattcctcctaaagttagttcagcctatgcccaggaatgaacaagggcagcttggaggttaaaggcaagatggaatctgttaggtcagattcttttattgtcaaacttttctcactattagaatttttataattataaattttatactattatacagggtcttgctctgtcacccaggttggagtgcagtggtgcagtcatagctcactacaaccttgaactcctgggctcaagtgatcctccctccttggcctccaagcactgggattacaggcgtgaaccaatgtgcctggcctggtattttaaacatatattcatgttattattctttattttcagcagcaaatttatttaattgtttgtatggatcttgtacacaagtcacttatctctctaaactgagactctagtaaataatctcaatattttataaaacggtgccaggcctgttaaggcctattatgcatcatttatgatgcttcaacaatagtatctttccacatcatcatcttaataaaaaacattcattttgagaatacattttccaggcagttcctttgcctccagggggaatattttgaggccwmccagtgaccataggattaaaagacttgacaggaaagccctagaattcttgaagagcaaggcttttgaaagattcattgttgtggactctccctttgaaagagaccactttatcttgctcctaaacatctataggacagacatagcattttctgaaaagaaattctgggtaatgtagaagaacaaatgtaggtaggtaatctagtatgggtagtgtgtaatgtgaagaatgatagttccatttttatggttgccataacaatcatacagttgtgcaaaaaatgtgtatagcttttatagaagggagctggcaccattgtaatgcttcttctcatatcagaacaactgttttcagatctgaaaaataggggtggcttaacccttccccagttagctcagcatgttccctgagaagtctctttggagctccagggctgttgaaatgcattcaccacttgcatttgcattttagcctgataaatggattgagaattaaggatgatgatcytttcaacagcaggttctgaattcctaacttgggaattcaaaggatgagaaaagaaatacattgttcctcaaatagaaatctaggagagatgtctagacatagtaaattccttgactttgtgactcttcttaattctgtccactagaatttaaatccattaaatgctgtcatttaccccactgtgcttagtctcagataaagtcatattaaaatttggttacaatttctgttttatttttacatattaactatgtcacttctggaaatcaagaagcaaattttaagcgtagtatatttaagtgaaaatatattcacatatattctttctttcactatcgttttcctatttttatatatcctttcctaaggaaagtacttggtacttgactttctcagtcatactaaggagtatctactgtgaagaaactatatcagaactctggatggagattttcaggttgaggatgggaagttttcaggtttggatggggtacctaaaatgaagtcattgtcaacctagtcaaccacagagaaactttttcttgtagagatttgggataagttattacttttgccaaaatacatccagagtttttaaatcttaagataaagtctggaattctggctgggcgcggtggctcaagcctgtaattccagcactttgggaggctgaggcaggcagattatgaggtcatgagattgagaccatcctggccaacatggtgaaaccccgtctctacaaaaatataaaaattagctaggtgtggtggcacgtgctcctagctacttggcaggctgaggcaggagaatcacttgaacccgggaggggaggcggaggttgcagtgagcggagaccgcaccactgcactccagcctgggcgacagagtgagactccatctcattaaaaaaaaaaaaaagaaaagtctggaattaagggtagaagtaggggagatttcaactctcattgaaatagaacttggtctaattgacttgtttggtgaattcctgtccctttgagtcatagctctgcagttctgtgaccttgggcttctttgaccttgagcaagttacttaatccgtctgggcctcagtttccccacccacaaagtgagagtaaaaataacacccaccattgttataattctatccccttaagggccatctctaggaaatagagaaaaaaaagtgtttttaatgagaataagatttctcgtatgttgaagacctctcctatgtttataaaatctgagaagattttatagattgtatagaactttttatactttaactcttaacactttatatttaggggcttaggtatttgatccttctgtggtattatttcctggaagcttacagcccctttgttttgtttgattttaaaacttaatttgtattaattagtattctcataggctgttttaaagtaactgcaatctgatattttaaatctggattataggtaaactactaccagagataaaagaagaaagagatgttcagagagagcttcggatagagagactttctggcctggtgggactcggctgccctcattgcacccttaggcatggaaagctgcattctgaacaccagcaagcctagctataaatcttcttggacaggaaataaaagagtcagagaccaagccatctctgccctgcatacaaactctcttggttgagttgtgcccagtagttcagtgctttcaggtaaactaacttcgtggattctgggcctttgcccaagttcttcttccccagatagcccacgcgttacttctacacctcctttgagtcgtsttcacatgctatcttctcagtgaagcctaccctgtatatcctattcataattgtaatcagtactttcagtgccccttactgyattctaatgtttcttttttttcctccatagcaatgaatttcagcactgtttattttctgtctcctccccgtggaaatctttgtctgttctcaaatgtgtcccaaaccccgaaagcagtagatagccactaaatatttgttgggtgtagcatttcttgtctttctcttgacctctgatatcttcttcacattgatgttctactggttcctacaacttggacttgttcttgacactaagtaagtgaaattttatgaaaaaggctacaattattcacagttataaacagtttagaaaagaaaggaatgggcatatttcttgaaaaaagtcatgtttgaagagctgtatggtatcagagggagtcagctaattctttgtggccatgaagggcctgaattttgaagtttctcggagtcagatttcagttcagtgtgtaaaggtgattcctaacaggtagagctatctaattattgcctaatgatgcagtgaactcttcctctcacctccccatcccagctttcaagatgtgggtttatctgtgtgcttggtttttgtttggggacattcagaggataagatttggagtagggtaaccttccaatttgattattctgtgattctggtccctgaactgatacagagtgatttccaggatttattattaagtgcaaaaagcaaaatgaaaagagaagtaatagtatttgattatttgtgtaagaaagaagagaaaatgagaaaaatgtatctatctatatatgtatgaaaaaggaaaacaaacacagaaagggtaaaccagaaaatgatgaaaataattatttataggggagaggtaagagctgggggaatgatagagatgggaatgagacttcttttgagtatgctaacttttgaaccatttaaagttttaaatattcagtaatataatctaaaaggtggtaaaagcaaaatttctaaaattgaaatcaagcaaaaacaaatgggcctaatgtttttcaaatgtatagcatcagcacctacagaaaaaagaattcaagtaacttttaagcactcgaactatatacccatagtgagtatattctaaggataaaccaccaaagaaatcaaacttaataggtttgttgttgtgagtggtgttggcattgtaattctgaaacagttttgaatatcaaggccattgggaactggaaaaagaaagatataaatatggaatgggggagataagaactttatggtattagatttcagttggggatgtcaatatgaactcatgatttttaaacagcatttaggttgaaccacatgaaattgccagtttttaggccacaaatagtcaaatattaacaatttcatgtgattcaacccaacattttctaactctgctagctgaaagggcctggaggcaatgagcatatcttatgccccatcctggtttctaaatgccattcccaccagaaggaatttgggctccttagggaagtcggtaattataaacctggggcagggattgtacagcttgtgagacttgccacagggatatagaggctcacttgaaagggctcccaccagcctaatttgggaaaatttatgtatcaaaaagaatagtagtggtagtcgtggtaatggattataacacagtgaatttttttaaaaaatcaatgaatttgtaatgacactaaaaaaaaaaattgggggcaggaaaaaacttcttttaatagaagatagccagcaaatgtaggagatattataggattagcaaacattttataatttacaaggctatgattcattcaggcaaaagtcaagtcatctagatgctgaaaccattgaccaaaaggttttttttttttttttttttttgagatggagtcttgtctgttgaccaggctggagtgcagtggcacgatctcaactcactgcaaactccgcctcctgggttcaagcaattctcctggctcagcttcccgagtagctgggattacaggtgccgaccaccacgcctggctatttttagaagagacggagtttcaccatgttggccaggctggcctcgaacttctgacctcaggtgatctgcccgcctcggcctcccaaagtgctgggattacaggcgtgagccaccgtgcctggccccaaaagggtttttgagagcaggatattcacatgatctctaagtctcattctgtaggtttcttattatttacaaagggtaaaaggtagccttaacatacacagttctagctattagcaccttaaccaagtaatccaacctggcagcctaacattttgtgccttctgaaggtatgcacatcatcacctgtgaaaatttgaggccagaatgttcaccatgaatctagtcaagcctttttacccaactttccatttataggaaatacagaggagatgaattttgtcacatttgatttatttctgtctatccctttcttcctccttctgtgaggaaacaatctaataaatccagaacataagacgctttacaagacaactgacctggactcttcagaataaaaaagcaacgttatatttgaaaaacaaaagatagttgagcaagaaacaggctaaagagacataactaccaaatacattgtggaaactttgattagatcctggatcaggaggaaaactaaaagcaaaagagactttttaggaacagtcaaagacatttaaacgtggtctatgaattgggtgatatgaaagtattaatcttgactgtggtgttagtgttgtggttctatggaagaatgcccttagttttggacaatgcatgttaaagtatggagagggaaagtatcaccatctctgtgacatacttcttggtaattcagatgtcaaaaataaacacacaaaacaaccagctagacacaggaagggagggatggaaggaggaaaaaagataaagccaatatggaaaaatgttgaaatttgatgaatcttgatgaagggtatatggatgttcattttactattctttcaactttcctgaaagtttaacattcttcaaatgaaaattaaggggaagaaaatgaatttgaacatattttctgggtttaaaccatggctttcctggcccatcccttgatctctggctcccacagtcccagacccgtcctgtcctttgtcctctgcttcaggatgttgtttttttaaagtataaaaagaggcgtgatggctcacgcctgtaatcccagcactttgggaggccgaggtgggtggatcacgaggtcaagagattgagaccatcctggccaacatggtgaaaccccatctcyactaaaaatgcaaaaattagctgagtgtggtggcacgcacctgtagtcccagctacttgggaggctgtggcaggagaaccgcttgaacctgggaggcggaggttgcagtgagcagagattgcgccactgcactccagcctggcgacagagcaagactccatctcaaaaacaaacaaacagaaaaaaaacatagaacgatgagaggttcattgaaccggtgagtagaaccaatgagtaaagggatgtaacatggcagaacatttcagtttgtttggattaagtttcatcactatcctttaaaaaataacagaacttaataaacacattcacttggtgtagaattctgctaacgcttgagttgacctttctgaggacccgaggttagaaacacctgctccagtgaaaagggcctgcccacagtgctgcatcatttctttctrctggccatatggcctcattaagtgtcactttaccactgagtgtggtgaggctggggaagtggaggcaaatggaccaaggtcactttctgctctaaatagaccatagacttttcctgttgtgaaaaatttgtgttttgtgtctgcttcttagcatcttttgtgtgagtagaagtgcgtgaaacagtattatgatattggcaactaccrtcgaaaaaaagaaaaggcgcagccccactgagcaaggggacagacctaggtttgaatgatgatcccagctctgtgaaatggaggcttagatgaattcagcatctgattgtactggaatgtcacagcacccatctggctgggctctctgcaatggtacaattgggaacacatccctgtgggtgaatgatccagctcttcagttgtttttccttctacagtttacataaaatttgctgatttctatataaactgtgatgccatctaatctaagaaagtgttggactgaaagttttattctttatccacttaaggttatttcttaattttttttccattccttttcacccattcttcatcattgacccagatcctcctccccagaattgcttgctagcacggagacagacccagagtcacggacagaggagggcctctataaattttgctaatctggaagtggtccctgaaccacagtttgtaaaacactgttttatgagaaaagaagatgggatgaagacagaaaaggacacccttggaaacaataacactgtggtgtgaccacaggattgaatgccaggaagtcatgagttctaatcctaaatgtatttcccaagacacagtggcaaaattgagtggaaaagtgctccacaagagccctttggtcgttttttcattcatctgtccatcagctattcattacatatgtgccttcaatgtgctggaagggatataaagacagtccaatctcattaccagacctgatactggctcccagcctgtcacagcgataagacatgtccataagtggccaccaacatgccagagacagtggctgttgccatcagagagaggcaggttgcaggcatgggtagggcgcatgggggagagatagcttctattctttggggctgtgagggtttactggaaaaaagctggcattgcaggcaggcctttaactgcaaggtaggtcttagacattggagattggtagagttaagtagcccactataggaacagcacaaacaacatttcagaaagcagagggtgtagagaagaatttagcacacgagggacatagcgggagcatgcagtctaactggaaaagtacaggttggggctgggtcatgaagggctttaaatcctaagctgactttgtatttttctcggtaaggagttgatgaaggtttttgaccaatgcatgctttaagatgcttaatctggcagcatctgcgaccttggggagaacagtttctgtgatgtggtaggggccatgaccaaaatccagtgaggtgaataatgacaaagtggtgagtaaatgttgctgtggcgactagacagcttcttccagcttaaaggaggtagagatgttaataccttgaggaggctgagggtgcagggtcagaggaagagtgtaagtgacaaaggaacagaaattatttctaagcttttgttatttcytagggttcttggcgaggttttaagggattatagaagacttactcttcatgtgttcattcccagaccaatggctttgggtaaaacacaatcttagaagttttctgtctctttaaaaagttcttctaagcccttcagtcacgtgccttcagaaattttggttacataacattgctctgaattggaattctgcagcctcatgaactggagtctcattctttccctcccccacctggcactgtattttctgcgggtcagggttaacttctttctaaccattgttgtggaactctttaaatatttggtctcacaggttctaaaagctggcaggccaggctgctccctgcaggttgtgagaccaaagccttccagaaaaggagccagtaaaatcccaagcatgttaactgagtgtaacagctgcacagtgcaccgcctccatcaccctcaaccccaccgcacggggctgggctcccaagtgctgaggccagcagctcctagccactgcggcttgcaagcagaaggagccctcatgcagcacatcgtggcaggctcgtaattgcggtgatgacaacagattaaatcactggctctcagcactgaggactggggtttgtcagggtcactcaccgttcctttgcttctcccaattttccatagtgagagaggaagcttggagtctgctgctacagtagaaatactttctgagagccctctgagttttgctgtcragaggttcgttctcttagtagtctaggctgcatctttctgtcttccagcatcccctcaacacatgattctggaatgttgtaatctctcaatatacatatgtatttagttataccttgcttttatccaaaaatatttgaaggcagtttacatatatatatatatatatatataaaatgcagtgaattttttgttgttgtttgttttttgagacagggtcttgctctatcacccaggctagagtgcagtgtcgtgatctcagcttattgcaacttctgcctcccagactcaagcgattctcccacttctactactaactggaagtaatagtagactactcctacttctcaggagtagtctcctgagtagctgggactacatgctcatgccaccacaatggctaatttttgtatttgttgtagaaacagggtttcaccatgttgcccaggctggtcttgaactcctggactcaagcagtctgcccaccgcggcctcccaaagtgctggaattacagccatgagccaccgtgcccagcaagtgtttttttaaaaattaggaaatgaggtaaaaggaacacgtgagtaggaaaattaggcacagccaggataagggttagttcacaaagtgcaaactataaataaaatctcctagaggcaagttaggaaggttttctgagtttcctagcagccaaagcaaaaaggaaaactttttaaagtttatttattttattttgtacagcagacagttcatatagcataaaaagggaagccatcaaggataaaatttgtgtgtctgtaagatacagattgtcacaagtagagtgtttccttatactgcatcaacttcccccataagtgtactctataaaaggatactacatggtcaaatgggcccttgttctccctgcttccctacagtgatagcatagtcatttggttgacttcttgcagtgtcccttggggtaggcttggtggcaaagccccaagtaggacaagggcaccatgggaggcctgtgcagggcatttcagtgcagttcttcgcatctccaaaggtgctcccttgaggaatcttggttctgggagatgctgtcccacaaagaagtgccaggagcaaatgagttggtcaagaactgttgataccggcatattaaaggctcctcgaagtcctacagttaagaaatcagcccagtatttcccaaactgatttaatcataagatcttttttaaaaaaattaaaacacttaattggcacattcagaaacgttgatctaaaacaggggtcagcaaacttcctgtgaagggtcacataggaaatatttcaggcacaattaaaacagctgtctgtcacaactggtcaacactgccattgtatagaaaaagtgtggctgtgtacaataaagctttatttgtgcgtagtgcaatttgaatttccacaatcatttttgtgtcacaaaatagtattcttcttttgattttttattttttagtcatttaaacatgcaaaaactgttctcatcttgcaggtcactcacaaacaagtggcaggccagatttgaccagtgtagtatggtttgccaattcctgatcaggaataatgtttggatggcttatctttccagcaagcaagccttcctgagtactgtttgtcaggttccattttaatttagacttttatgtttctggtttaagagcagatttttaaaaagtgttaaaggtaatagagagttggtttgagtccttacaggctagtctaggatttttcttagaaagcagttgtgggggctcccaaagaagacatttacaaactaacaaagtcttacacggtcacatatggtgggatcaacttcaggctggaaatgtctaaatgggaattatcattcatgcactggatccatagaaatgaaagtctcaaagcamccagagacgtttaattttaagaaattaaaacttcctagtcaaccctccaagtaacctagtaaacgatggcttcccacctccaaccaagctaatggagttctttttgattttgactaggggaacatttttttggctttttatgatgtcattatgataaaagaagaagacccaaacattcctactaccatgtctgactttttagtttcagttataccagtattttttattgagtactcagtgtatataaaacatttggttagattttatgggagatatcaaaaggagaaagaagtggacacttccttctttaccttgtgagccaagttcaagatcctcatcaattacagcccattgctgtggtgccaggtctgatttcacctcctgggcacttcctattaccatcaatctgttcattcaacaaacatgtctgaggtgcagcctctgttcaaggctctgggaacacagccctcggagcacgcattccaggagatcagtgtttctcttctcctctggcactcttgcttacaacctcttttatatagtggaaccaaaattacttctgtatatcttgaggcttcaaccttcatgttgcctacactgtgtgtgactctcctcgaaatatttagagggagagtgggtctcctgattaatcaccctttctgggatctgcactctaaatgctctcgttccctccacctgaatggcacctacctttccctgccctattttcttagtgtccagtagggacacagtttttaccagatccataatcttaaagccattaactatattaagccaaatgcatcttgtaacaaatgttacaagatagctaaatatatgtacaaacaatatatttacaaacaaacaataatacatatctgatcaattgttttttgattaaggaagattctctatagttttgattttttccatttacaaaagtaatattcaattgcagtgaaaaattttaaaaatatgaaaaagtacacattaaagggaaaaaaattaatccataaatctagcacccgtcgatcaaccctatgaatatttaacatatatgttttactcttcttgatttgaaagtcacatgaattttttaaaaaaatagtaaacattaaaattgaccttcttttgctgtatgtaaaattctgtgaattttaagacatgcatagatttagttccactccccctgctgcccccgcacaagcgtacctttcccagttctggcaaccactgatctgctctctgtcttatctctgttttcattccgttccgttcctctcctcttcttctcctctcctcttcttatcccctctcctccccccacccttttttgtttttgtgtttgagaccaagtcttgctctgttgcccaggctggaatgcagtggcacaatcttggctcgctgcaaccgccacctcccgggttcaaacaattttcctgtctcagtctcctgagtagctgggactacaggcgtgtgccaccatgcccggctaatttttgtatttttagtagaaacggggtttcaccatgttgsccagtctggttttgaactcccgacctcaggtgatctgcccaccttggcctcccaaagtgctttgttttctttttgagagtggctcttttcacttagttcaatacctttgagattcatccaggctgttgcatttatgaataatttgttaatttttgttgctaaatactgttccattttgggggtataccacagtctggttatccatttaccatttaagattactttttgggttgggcatcgtagctcacacctgtaatcccagcactttgggaggccaagttgagaggatcccttgaagccaggagtttgagatcagcctggggaacagagtgagatcctgtttctacaaaaagttttaaaactactcccagtgtggtggcatgcacctatactgtcagctgcttgggagtctgaggtgggaggattatttgagctcaagaggttgaggctgcagtgagccatacaaaaaaaaaggttattattattttttaaacatttgacatttctgaaattctgaagtatcttaaaattaatgtatatatttaatgtggtggggtttttatttctccaaaagctattacagaattgatggcgcatcttataattaatactctcttaggatggaagtattgtggttaggattagagagggctgttgggagttactaggagtagggtaagtggacagttaagagtcggatagagaaaggtcccaagagcttgtggcaggccagcattagagcagcttggcagcctctgaagacagggtctcgctctattgtccaggctggagtgcagtggcccaattatagctcactgctgccaaggaggttttgaacagaggagcaacaccagggaagaagtctttaagaacaaagcctgtcttaccatggttagtacaagtatgggcaacatcatcagtgttgatgaatgaggaaaagacagagaaatggtggcagtgcactgctagtactggatgragtggaggaagaacctaggaagcagtgagcaccgactagagtgtggcatgggggcagaagggcagttgctgcagaataccccaatctccaggcagtcctcgggcaggaaaggctggaggtatggagagccaaggacagctgctgccaagatctttaggtgtttacatggtgggaatgggtggattgagtcaggcatgctatatgggaaactgtaaaacagaatgagaatgtctgggagtttcacagggtaagagtgtgatgttcgtaaggatattgtgcaaagataaatgggcacatggtgtacttggtatgagcttggttgaaatatataattattctgtggaaacaaactgtgatttgtgctgtttccaggtagacttctattatggttaactctacggcccaaagtttttttgcgaagcttattgttgggtcccatccccctgtatcacaagtcactggagaaggatattttaccaaagtgtaaattgaagagtaatttaccaaagtaacttgcccctcttgttggccaactcttcttgagaagcctcgttcatggaagcagcctgattttcacccactcacatctcttctggcttggggtgaaggagaagtaggtgccagttcacacagaggaagagaaagtcactcacccatttgtctcttctcagtctcacatttaactaaagatctcattctcgtagaagttatttttcactttccctaacagagcacatatgcaaaattcactgttctttaaagctgtactatggtggggtaaagttgctattatttgtggcattgctaattgtttcttcactctttcctagaaaagactgtatcttcaccattgacccatcaaccgcccgagacctcgatgatgccctctcctgcaagccactcgctgacggtaggatggaaatttctatagcatcttgggtagcaggcagtctgcatgcctgtgtggttagcctggctgccctgtgctgcctaggcagcatactgtgcaaggctaggtttgcttcgtgcctgaacttgccataggcctctgagcctttacaactatgtgaccttaagattgtgttcctgtggtgacattggtgagggtgagaatgagaaatgtcctcccactagactcttcttgggcttcagaaggggcaacagtgagtgctaaagaatgaattccaagccttggcccttcagatggttccagtgttggtgtaaggtatcacagaaagaaagcttgtaagggctctgcttgggagagacatagggttctttacctgaatttaacaccaaataacgtgattgaaggggtactcttcaaaggcatgcttctcggtgggtagcaggaacaccttccctgagaactgcctctctagggctgagctggagaagcttgggctactcccagtaggttttcatctatccagcaagttgagaaaggcaaactgataagggctctttaaacattcttttgggatgttactgagcaggtaaaagtgggattgaggctagttgtctttggaaattatagttggaggaagggaatgcagcaattgactctcaaagaaaaaatgtgtaggatatgagaaaagtgaacccttccaatccctcctcctcctccacctccccctctccccctcccttcccctcccctcctcttctcaacagagtcccactcttttgcccaggctggagtgtagtggcatgatcatagctcactgcagcctcaatcttccaagctcaggtgatcttcccacctcagcctctcaagtagctgagactacaggtgtgtgccaccaagcctggctaatattttgtatttgtggtagagatggggtttcaccatgttgtccaggctggtcttgaactcctgggctcaagtgatccatccacctcagcttcccaaagttctggcatcacaggcgtcaaccaccatgcccagcacccccaatcccttttctaatgccccagatgtgctgcttctagtttttacctacttcttgcccctctctagggtggcttctgggtgactgctttggctttggtcatcctcagagatggccttggcactaacatggcctttgacatttgcccaatgtggacatccacccttgcagtttcagtctgccaccaagcgttgatggcctagtggcctagtgttttaaaacattgcaaagatgttcatatttcccactgacacagaacgccrtaggttcagtatgtaatctcttctctactataatagatggggaagcttagtagatagaaggctgagagatagaagacattgcctaagactggttttatcttccttgaaactatgggcaagattgctcaatattttctttttaaaaattaattaattaatcgatttttagagacagagtatcactctgtcacacaggctggaatgcagtggctcattgcagccttgaactcccaagctcaagcagtcttcctgcctgggcctcccaaagcacgagccactatgggattacaagcacgagccactgtgcygagcctcaatattttcaactaaagaaaactgaaagaaacaagagaaaaggtcccctggaaattttagagaaattatatctttttaaaatccaaaattgaagcagcctacttcaaaaagcaagtactggcttgatttcttacattcttagcaatctctgttgcatgcagaggcttaggcatacctgctcggcatatagacaccacttccctgagccacagtgtggaaagtgcccctaggctgaaagccaggtgaccgtggacctcattcctcatatttgccttacctctaggttcacacctctactgtttgtgtaatgcttagacacaattgcttcatttgttttgtccattttcatagttgataatagcagacggatacatctactacctgttcctctgtctcagctggcctggaaccctgcaccttgcagggtctccagggagcaggcacatgtcctgccgtactcactgcatacactgtggttttatgtctagggcccaagtgtgtcagcagaggtttcataaaggaagtggtcaaagatatgataggaaagatagattggggacaaactcgggacaaattttcagaccaaatagtgttttttgtttgttggacaatggaaaggcaagcagatgttgttcagcaagagagcrttcaaaaagaggaaaataatttagcattgcaaggaaaaggagagaaactagaggctggggaatgagtcagagaaatattgcaatagttgtggacctggactagatggtagcaaaatcaatagggggggttggagtgggaaggacagatgtgagaaagggataatgacagaagaatctatggaaatgaatgttggggttgagggagaggagtccaagatggtgccaaggtttcaacctggatgactgggagatggaacccrtaagttagaaatgggaatcaggagtacaagctggtttgggagagagtatgttggcatggagttgtctgtctgatgttatttatgttagttgctgcaaattctttgtaggggagctgaggtgtgtataaacaagctaaatagatgcagtccgtggaactatatacaaagagcccgggaggagaggaagcaatgcaccaaaatgcagtgatttcattcgaatgatgggatcataagtgattttttttcctttctctagttcccaaatttttataatgtggcaataatagttgtataatgaaaaaattttgtaatacaaaaatattatgaggtgccagaaatcacaggccgctcagtagcctactgcaccaggtgatcagataccttccatccacttagtttttcttgcattcctgaggagcagtttggcagagcagcaggaaaaggacatggaaaaggagtcagggaagactctgaaacggcctgagttggtcaggcaaacagttttatggtggcacttctacagttggcctttgtgacaacagtttytgccagggccatttatccaaggagttgaaaagggaaagtcaattccagtttggattggggtgaggttggctaagttcaggttgaggtagttaccagttcatgtcaattcttgcttagggggaaaaatgttcaatgcttcaaaaaacaaatagtgttttctcggtctatttatatcatctgtagttttttttttttttttttttttttaagtgtaaagtttaactttcctttggtttcattaaaattatctgaatgaccattctgtgaaaagcagacaaatataacatacctagtccttactttcccttttggtagagttcagatgtactcccaggacttgttaccagtgtctgtcaggtgagacactccagtgatcaattcagcaaatcacagtgaccacctgtctaccaatagatcataattaggttgcaggcggaggagagggtgccacctatcttcatgaaatctcagcttggaagggattctactggtttccaacctggtaattctccacttttcttatcctaaaaacacacttcaggagaacactcccatgagcattacccagcaatgtagagtttttcacctttgttcaagaaaatatttagtaatgtaagtgaataggagtggcgttatagtgataacccagaatctggagacagtaaatcgtgtgcctcagtgttttattattgtacagatcacttgcagcatacctcacagctgacctcaacgctgaagtgtgggaatgccacagttgtcagatcactctctggttttcgaattacctccactgcatccacttatggaatgtccagactgcatttgaactttctaccttagaggcaattcattctgccttaagattgcttgactattaggaaatccttccctgtaatgatctgaaacagtgctctcttcctgtaattttccactcattagtcccatttatgcctctcgggcccctatagaacaaatctagtgtctcatttgacaacctatcagttactagataacagttatcatgtgtcttctgagtcaaaaattctcaacttagcatcctaaatattctttggtgtccagtgggttatgaggtgtgagcccatctcccatgtcatggagtcacttctgcttttatgaagtctgaagtacatggctacctgtatccagactgcgcctccctggctatcagggcctactctctccttgccagttcctccttattgggcaggactgggttcagagtaacagctacccattctsttcaattagtcaagcattgtggctttgccttagtctctgagggaaaattgtcagcctgacaagctaggacctttattcgcttttcgttgattcaggctcccagcagatcctgcaggaaattgaacttcacttctccagcatcttgtttctctaaagttgtattctctaacatgtactctgctgttgaacttacagggttaccctagcccggccttagaaatgaatgaatgggaatggggaatgatggttaatgggtttcagtttctttttgggtgacgaaaatgttctggaattagataattgatagttgcacaactttgtggacataccaaaaaccactaggggaaaaggagtgaatgaataaatgaatgagaagaaataaacatatccacttatccttgaggctttctggaaattggagtttacaccttaaccacagtttagcagaggtctttatggaatgcccagctggctatcatagtcacatccctcgtgtccatctctcctccttgctgctttcctctctgaaccatgaaactacagccccgggtgcacagccctctgctctgctgcccgctcacatttcccatccccacagagtgcagccctctgactcaaaaaaagaagggtctgtcccactatctgcatagaaaatatttggttaagttagaacagcatccagcctaaggggcctctggggtggacattacctactgtgctcaaggaagcaccagtcttcctgcctggattgtctctgcagcctgcctggttgcatgacattttttggggaggatggagcagacagctttgttcctgggagcccatagcaataagggaatagagtgaragtytaggagcagtgcctgtaaggatttcagagaattcctaataaactctctggctccccaaatggctgtgtttgtcacctgctgagaatttcctatattgactgatcacctttggaggcagtgaggaagtaggagccagaaattcttgtgtccccctgtgtgccaggctttggctagaaaacctgagggataggatggggtggtagttgttttaaagagcaaagggctgagatgaagtcactggacctgctactgggaagaaacgggacatgtgagagccctggggcttctgagtgaaaaggttcgtgcatgtctytagcagccaggccagaccctcttcctgggctcttttctcacctctgggaagactcttccccagcaatcattcaccccagcccctttacatttccctttgccctgcttcctcctcttgctgtaccacctgaagtctccctcatcctataaaaccttcctgtactctgctccagctctagaactttcacttgtgtctgtcaggacaccttggaagagttgtctttacttgctgttgctttctcacttcccgttgctttctcacttcccgtgtattccttatcccttttacagtgtggcttcagaatgctggctgcaacaggttgccccascctcagttcactaagcatctctacagcacttggctctttagtctgctattcctccttgaaattcactcactcttccttggactcaaaggaccctgcctgctcttggctctaaatgtgggcttttcttctccagtcgcctttttaactcatctttcactgcccagcccttcaggcatcagtgcccctctcatgctctacaacctttgcacttggtgtcccctgtgcctggtttcccctttccctgcaaagccacatggctgacctctccctttcaggtttgattggtcaccttctccgtgaagcctccctagccattctgcctctgattccacccctctcacctagccacctttccattttttttttctcaccactcatcacttgctaactaacataggtcaaaggtggcttttttctttgcttttaagatgcaagatatttgatatgtttatgttgagaactaggagatgacagagaaggaaaagttgaaaacacaggcatgagaagagttgatcgttttgcagggtcttgaagaagaaggtgggagatgaatcagagcataagtggaaggtaaggccaaggaagaacacctcctctccttcctcccctcccctcccctcccctcccctcttttgatggagtcttgctctgtcgcccaggctggagggcagtggtgcaatctctgcacactgcaacctccccctcctgggttcaagtgattctccttcctcagcctcccgagtagccaggactacaggcgcctgccaccacacccggctaatttttgtatttttagtagagatggggtttcaccatattggccaggctggtcttgaactcctgactttgtgatccgcctgcctyggcctcccaaagtgctgggattaaaggtgtgagccaccgcgcctggccacaacacctctttctatgagacagagaggcaagacatagttgatgggtccctgctgatgagggatcacacctggccatacctgcttccactgtgaagtagaaagccraatgctgctgagagggctgacggagtggtgaaggagatagtctgagtgggaaaaaacaacacagactgcctttcccctgctgccaccctgcaacaatcaacacagaagactgctatgaccaaatacttgggtgcttttttgccatacaccaagcaagcaattagttctgcagcatatgccagcaggttgtcctccaattcagttctgatattctccgcctggagatagcatcagattccaaagattgagcacctggtcccacaagactgcctcacgcttctgatgccaattgcaggctccagggtggtttactggtgattctgactgaccagctataagtttgggatcctgcaaccccctccttgagtttcataaatttgctagagtggctcacggaaaactcagggaaacgcttaagtttagtggtttattataaaagatattgcaaaggatccagataaacagttgcctagggcgaggtatgggggaagggatgtggagcttccatgccttccccaggcatgccaccctccaggaacctgcatgtgttcagctctccagaacctctctgaaccctgtcctattgggccttttatggaggcttcattcgataggcatgattgaagcatggacacccatgtagaaatgtgattgggcaaaaagcgtttgatctcagtgacagactgaatggagaaacccagcaaggcctgtgcagatgcttcttggcctctctgtgcagcattccctcttccaggatatagggcaggaccccttttaaaatggaagtcttccaacccacaatcaggcaaggtaggtcagagaacattttaatgggaagaggggaagattagagtcctgccttggggagaaaaagaagcgggtgaaaggagggcaggagaaagtcagagagawtcagtggcctaaagctctccaacattttaacaaaagactgtaataagggctgtaggagtcataagcgaggaaccgcggatgaacacgcatgctcacacacacatatatgtccatgtcaygtgcacatcacagatagtatagagaactgaccaggaatccatcagacaaagcattggcaaacactgctcaggtatgtctgggtttgaatcctacaaagtctggaggataataagatttttcttcagtaattctcascctccgaggtgtgggaacagaggttgcagkgatccattcttggaggtttcaggccgggtgtggtggctcacacctgkaatcttagcactttgggaggccgaggtgggaggatcatttgaggccaggagttcaagaccaaacttgggagtttcctgggagggagagctggaggggcagcaggacaagggtccctctgagcctgtttcttctccgcctcttgcttttatgatggcatcagctgrcgtctaatcaaccaaggttttacaaagtaatcttggaatcacatttgattccttttcctctccagactgttgtcatggtcttttcagtaatttccctccctcctcactgtctcccgtccaccttgctgtctagttatctttcctacgtggcacgcacaaggaccagatcatgtagcttttctgtttgaaaacctgcttgtacctatgggttaggtctgcagttctttagcagacctttgttaccaaagccctgtaagatgagtcctcagcctcctctcctgccaccccacttcccagcgctgcttcccttaacacacgcacagtgggggctggtcactgcaggctctgctgatctcctgtgccctttcctgcctccaggcctctgcctgctcctttccctctgcttacaaggtcttgcctccctgcctccttctgtcagatgaaatcgccttctaagaacaacataaacctccgcagaactttcctttcctcctagcagaatgcattgtttctgtttctcctaccagcaagtattcttcatgtcttggatatagcaataaccatcattacttctggatttaattcccttttttgcttatttcctaagagcagggtgttccttggatatctctacttcctgagtaccttggatatctctacttcctggttgctaccctgcattttaaaattgtttggtctagtcagatctagccaggcaacctattgcataccttcagtgtttcactcctttttctggttcttgccttgcccctttatttccatgtacttctgtccttgttttgtgggttgcctgtgggtttatatcctgacatataagtctcatccactttctctcctaaaataagtctgtttctttggaattgggcatacctttcccttattccattcaagtgtttcactccatctgtcatgtctcagtggtacctataagatcactgggtttatcttatgttcatgctgctgttacttcagctctgtgaattggcccacgtgaggctcacttccttcctcttatttccttgccaggtgtcttgcgtggtctgcactgctcttcccttttcatccctacaggcttccacagcaactcatgtcttcattttatcttgtcatttcctccacctccctcctgcctgtatccttgctattttcaaattcaataagtgctgattttctgataaaattaacttcctgaatgaaccctaacatggtagtaaaacaaaatttgtgatctaaaagccaaatgttttttccctttagttatattggcaaatagtcttactagttaagaaatgcctttaaacaccaagtacagtgctagctgcagtggcttacacctataatcctagcattttgggagaccaagataggaggctcacttaacgccaagagttcaaaaccagcctgagcaacgtagcaaaacccagtctctacagaaaaatwaataaataaataaataaataaataaataaataaataagctgggcatagtgatgtgcgtctgtagtcctagccacgtgggaggctgaggtgggaagaccacttgagcctgggggttcaagcctgcagtgagccaagatggcgccactgcactccaggctgggcaatacagtgaggctgtctctaacaacaccaagtatctcttggtgttgttaaataataaataaataaataaacaaacaaacaccaagtatctcttcagtggcagtgctcacctataagttgggagaaatagaaatttgagggcggggtgcgatggatcatgcctgtaatcccaacactttagggaggccgaggcgggcagatcaccagggcaagattcgagaccagcctgaccaacatagtgaaaccccatgtctactaaaaatataaaaattagctgggtgtggtggcacgcgcctgtaatcccagctacttggaaggctgaggcaagagaatcgcttgaacccgggaggcataggttgcagtgagccaagatcgcaccactgcactccagcatgggtgacaaagcgagactccatctaaaacaaaagaaaagaaatagaaatttgatagtataaaaatctaagtattcctttggtagcagatagatcttaatgccatgttggtgagacattggaaattagagtttatttttaggctgggcatggtggctcattcctgtaatcccagcactttgggaggctgaggcgggtggatcacctgatgtcaggagttggagaccagcctggccaacatggagaaaccccgtctctactaaaaaatacaaaattagccggtgtgctggcacatacctgtagtcccagctactcgggaggctgaggcaggagaattgcttgaatccaggaggcggaggctacagtgagccaagatcgtgccactgtgctccagcctgggtgacagaacaagacttcatctcaaaaaaaaaaaaaaaaaaaaagtttgtttttaattttcatctcttgggaatgtagttgggaggttaaattggtatatggagataatgccaagggaccggaattcagaaatcaggtgacagtttaaaaatgaaagtcaactttatatgtagattttaagcatcgttttttgttaaattaaatggtgcatgtagatcttatttttaagctacatatgtttatgtttccagcagctaacagattaaactttcctaattaaatgtgaggtgcttcccatggtacagtcttcaattttcaggaagggcatccttttgaaatgcagcatttcaggattcagctcactgaagaggataaaatctgcgctttgtattttagaggggaaccctgatcactcatcagtagatcttggaaaagaaaaattccagctgggcacagtggctcacacctgtaattccagcactttgggagaccaaggcgggtggatcacctgaggtcaggagttagagaccagcctggccaacatagtgaaaccctgtctytactaaaaatacaaaaattagctgggcatggcgggcacctgtaatcccagctactcaggaggctgaggtgggagaatcagttgaacctgggaggtggaggttgcagtgagccgagatcgcaccagtgtactccagccggggtgacaagagtgaaactccgtctcaaaaaaagaaaagaaaaattccacttcagggcaattttctgcttggatacatttctgggttttgtctctgacatcttcatgatgcccagtgcttcgaatgctgttactcctatgttcctcttccatgcgaagtcatttcatttcttttcttttttttttgagatggagtcttgctctgtcactcaggctggagtgtggtggtgtgatctcggctcactgcaacctctgcttcctggtttcaagcaattctcctgcctcagcctcctgagtatctgggattacaggcacacgccactgtgcctggctaatttttgtatttttagcagaaacagggtttcaccatgttggtcaggttggtctggaactcctgacctcaggttatccacccacctcggcttcccaaagtgctgggattacaggcgtgagccaccacgcccagctttgtgaagtcatttctaatccccattttgaaatgctgaatattttcctcttgcagtattttatgtctcaggcagatcccaggcaactcaagtacttgatctcagtcaaaccttatttttgtagtagggcccttgataatgaacctgggaagagaaatgggaaattctgtagatctgtcagctcataaggaaatgcatgtcttcttcattcatctggggcactgacaagtgaacaatttttttttttaagactgagtcttgctctgtcgcccaggctggagtgcgatggcgcartcttggcttactgcaacctccgcctcccagcttcaagtgattctgctgcctcaacctccctagtagctgggactacaggcacctgccaccacatccagctaatttttgtatttttacaacatggtttcaccatgttggccaggttggtctcgaacttctgacctcaggtgatccacccgccttggtctcccaaagtgctgggattacaggcgtgagccactgcacccagctggtgagygaacaattttaactgtccttgttgtatgatcattttttactgaattgtaccttgactcaaaaaatccaaataactgaatagtcatgcgagggctctggcatggaagtgggcttctgggatgcttgccaatgagttcctttttgaggacacagaatctaagtggaaagattaagtggagaggcagctccaccctctaagtcttattcctatgttccattcaaatcttgctagcttgatttctgtggggtctgggctttggaaattctctttttcatggatgtctcagtgcaccttgttaaaccgaatttggactgttgtgtgttcatcagcttccagctctactgattggttccagtttccttgctcatgaaagccaagataatctggcacccaccagtcaggcatcctcaagtatctggcaccaaggtaaacctggaagccagttaagaagtcccagtgatccaacacactcactgcttgatgagagacagttgtggtacaccagaaagagcactgcaataggagcaggagaactgggttcttgtctcatctttgcctctactgcatcatggaaatttgggcatttctgtgatttctctgaaattctctttcctcagctataaaatggtggtttgaactagacagtttctcaagtgtcttccagttccaaattattgagtatatgaaaaactaaaagagctaagcttcatttatgcctattgttgcgtaaacacaacttagctttaaaaatatttacagtaactacctcaagttgcatatacttctgatccttttccacaaaagtagtttgtataacaacaaaatgagaagggacacagtccgtattccagaggagagaattaacctcttcttacctcaatgttccctgacatcaagggggataataatatctaactcagaattatggggaagactaaatgagataatccctggcacttagaatggtgctagacaaaaagtaagtgtttagtgaaagttattattaatataaaattagaaagattaaaatttgcatgggccacagtggctcacgcctgtaatccaacactttgggaggacragatgggaggattgcttgagtccaggaatttgagaccagccttggcaacatggtgaaaccccatctctacaaaaattacaacaattagctggatgtggtggtgcacgtctatagtcctagttactcaagaagctgagaggtgggaggatcgtttgagcccaggatgtcaaggctgcggtgagccatgatcgcaccacactgtcctccagcctgggcgacagagtgagaccaaaaaaattgccatggaattgtagtaagggttatgctgaaataataaatgttcagctgctgctcagaagtcaaggtaagactagaatagagaatacagaaacagacccacatatatatacaaccacatggtttttagcaaagatgttactgctgtgtagtgaggaaaagatggttttatcaataaatggtactagactggttggatatccatatgggggaaaaattggttttgacccctactttataccacacataaaaatgaattccatgtggctcatagatctgagtatgaaagtaacacattagcacttctaaagataacataagaaaaataaccttatgaccttggtgtaggcaaagattttttaagtggagcacaaaaagcataagctttaaaggaaaagactgataaattagattttattaaaattaagaacatccattcatcaaaagacatcattaagattgttgaaaagggtgcagtggttcatgtccataatcccaccactttggaaggtgcaggcaggtggatcccttgaggttaggagttcgacaccagcctggtcaacatggtaaaaacctctttctactaaaaatacaaaaattagccaggcatggtcatacacgcctgtaatcccagctactcgggaggctgaggcatgagaatcatttgacctgggaggtggaggttgcagtgcgttgagattgcaccactgcattccagcctgggcaactgagtgagactctgtctttaaaaaaaaaaaaaaaagaaaaaaaattgttgaaaaggcaagccacagagtgggagaagatatttgtaatacatatatccagcatatgactcttaccaatatattatataaagacttgaagaggcacttcataaaagaagataaccaatggtcaaacacatgaaaatatcttaagtccagggggaaaatggagatgaaaaccacaataagatactattatgttcccaccacaatagctaaaagtttttaaagctgacaatgttagggagggtgtggagcaattacaactctcatatactgctagtaggagtctaagttgccacaactactttgggaaaccattgtacaatatgtaataaagctgggtggattcataactcatggcccagcagttttagtcttaagtatataccccatagaaaggtgtatatatgtacaggaacgttcatagcaccatcactcataatagcaaaaaaccaaaaacaatctaagtgcctgataacaataaaattaataaattggggtatactcttacaatggaatattatatagcaacagagtgaagcaaattcaaaacacaacatgatgaatatcaaaaacgctgtgttgagcaaaataagccagacaaaaaatagatatataccatatgaatctagttatgtaaaatacaaagaaaggtgaaactgatcagtgattatatagaggtcagaaaagtaattatctttggtgagtgtaaagactgggaggaggcatgagaaaagcttctggaattctgcatacattctatttcttggaactgggtggtggttacctaagtatatttactttgtaaaacttcattgaactgtatgcttaatgcttgtatactttatgtatttcatgccttaataaaaaattttattttaaaaaaatgaaggagtacaaaaaaaatggaaacaacccaaatgtgtctgcagccaatgaatggataatttaatatggtatatccatataatagaatattattcattcataaaaagaaacaaagtacacgatacaacaggggtgaaccttgaaaataaactaggtgaaagaagacaaccataaaagagcactttgtatgattccattaatatgagatgtcagaacaggtacatctatagagaccagaaatagattagtagttgcctgcggctgggaaggttgggaggaagtagggagtgactgtaaacagatatgggctttctttctggggtgatgaaaatgttctaaaatttattgtagttgtggttgcacaactttgtgcctatactaaaaaccattcagttgcacactttgagtgaactgtgtggtatgttaatgaaatctcaataaagctgtcatgaaacaaaaagttaagagatactggtaactgtaataatgattgaaacattgttaatcatagtcagccttaggaaaaggctgcaccaccatatggtcctttggtatgataggtgagcacattgttactggagtcagacaatgttctaatcctggctttgccatttactgactgtctgacattgggcaaatcatttaacctctctgagtctgaatgtcttcatctgtaaaatgtaaatattaatagtacctacctcatagaacttttgtgaagattattcatttaatcaagaaatagttgagtgtatttatatgccagccacaatgaataaaactattgttatcatccaggagctatggcatctgaagagtcttaactccattttagtgagagaggctacaagtgaacttgagcgtgtgtcatgaggacaggacatctttcccctactataccacatccatatctattacaaaatacaaaagtcatgttcaaggccaggtggggtggctcacgcctgtaaccccaacattttgggaggccgaggtgggaggattgcttgagcctaggagttcgaccccagcctgggcatagtgagaccccgtctctacaaagaattaaaaaattagctgagcatgatggtgcttgcctgtagtctcagctgctcaggaggctgaagtggaaggatcacttgagcctgaggaggtggaagctgcagtgggccatgatcgtgccactgcactccaacttgggtgacagagcaagaccctgtctcaaaaacaaacaaataaacaaaaacaaaaacaaaaaaaaacccaggaaattgagttataactaactgatatatggacagctcagaaatagaaagtgaccagtagttaaaagactacttgacaaggttttcatttcaacaaatatttattgtttctgtaaaggaattactttcagtcatgttgaaaatcatactatgtctacttacttgttctacttgtcaaaatgtttgttctgcagaatgaatgtgtaatcttttaaaattaaattgagagcgcttgtagtctacaggtgttgaaaaagaagcaagtatgagtttgtcaagaacccgatgctgaggggcgagtctccataatgcagtggttaggagctccagttttggagtcagaccttgacacaaggtgtctgacctccctgggtctcagtgtctttatctgtagaaagagatgcgtctcatagcattggaagattaaatgaattaatataatgaagtgctttaaaaagtaagcagtcaatatgccgttattatgagaccaccagtatggtggattctcataccacaggcatacataaattatgtatataatttcttgttaacttttgtgacgtcttggggaktcagaaatggtttccctttcatgcaaataaattaataagtgaaactgagtgattggatccaaaagagctaattgggcatggtgagaaaataataacccaaaaggtatctccagtgtgagagaaaagccactaagggtttttgtcaccggaatataaagcagtgagcttttgcctttcagaattctaggtaaatatgaaagttgtttcaatttctgatgtaaggaatgctgggattggattaagcagttaacagttaacgtttagtttataggcattttaatacacatagttgttttatatttctttaaaacattgaaaattatatatctcttgtatatttggctggtagagactagtaattatgtcttgttaatagagggactatttttgtttgtttgtttgagatggagttttgctcttgttgcccaggttggagtgcgatggtgctatcttggcttacggcaacctccgcctcccggttcaagcgattctcctgcctcagcctcctgagtagctgggattacaggcatgcaccaccaggcccggctaattttgtgtttttagtagagatggggtttctctatgttggtcaggctagtctccaactcctgacctcaggtgatccacccgcctcagcttcccaaaytgctgggattataggcgtgagccaccacacccggctgggacttttaaaaaatagaaaagtccacaaatgaatgaaaatatgctacaattctgtttttagacctagacctgggggaaaccattctgctgggattccacacacgcattccctgcacagcctcagacataagaaagactaggtccccatgctggccgtacgtgccgaagcccataaaagagatgacgacacatgccatgacctgctgcctactgtagttacatttctggcatgaaaatagttgtttcctgttcagaaggagtatgcccagttctctgctacttcatttactaagttcacctttatagagcttgcctgcaaagtgctttagtcaccatartccaccaggagaattgaccaataagctggcatcaatttactgcctcctgctcaggctggccrgtagtgctgtttcttggtgtgtgctgggaagtcaagaggtacacaggtggctggggtggacatagcattttgttggtgtgttttattctaaaaatccaagactctttaccaagtaacacacttattattcaagaattaaagtttacatctaagcaaaaagaaaaattcaaaatcctatcactcaaaaccattgttaccttcttcatatatttttctccagatattttaaagcagggtttgcattttttattttatactttttatccttattgcttttcctgcctttgaaaactgaaaacattacaaaagtgtgtaacggatgaaggaacaatccctgtatctgctgcctctaaagatcatcactgaggacatttttattctgctctttcttagcagtaaccttcaacttctgcctctattggctcgttgttgttttaaaactttgagctagttttacttaactggatttgtccttttcaaacttttttcttttcttggcttcagtcctgcctcttctctttttttttggatgaagaattttgaacatgcacaaaagtagaaggaagagtataatgaaacccattgttcccatcacctagcccctgtatccctcattccacagccagtcctgctccattcccaacccacctgtaccccagcccttattactttgacctgctcactttgtaatgaccttctagggtccttcgcagtccctagggcttcactgtcttttggctttgagtaaggaccaagtgcctgccctgctgctctcagagcttctctggagcctgtgctctgtcccaggcttgaccggctgacctgggctttccccactcactgctgaaaagcctggaaattcccagacgttgagtgcgccagcctcgcaagttcagctcctcattctctttcctgttaatgaagaaggccattgctcaagtcatttggaagagaaaaagtggaatttactacctgggtgttcctcatmcatgctgttcatataaatttaaacttagatgcctgagaattacattgaacatgacaaaaattgctgtgtgggcagtttagttgagtacttgcagattgatagagcccttagtaataatgaagggaaaaggttcttgaasctgctctgttccagaagatgagctcaccagttaaggagtttgcaactaaaggtcctcattaacctcttgctggatggcaaagaggaaaaaagaagaagaaaatccagactcttcaaatcctgacctttggggagacctaagaagtcatcctatgctaccccctcctcatggtgggttcctgcatttcattcagatttacttaccccagatttttttttcacttcagcttctcttaagtttgtaaaatatcctcaaaccatcaccacgtcatggccatggagtgctgccatggcttgctatactggtggtcagcttttgtgtaagattacataacgaataccacatggaactggaagatgccagcgtttgagttgtccctcttacctagcaacccaatcagtgtttctcagagggaatgtgcttatcccaagtaaaaggtggagtttattgtgtggccacaaggtgatccaagcccaattgagtctgtctccaaaattcagtaggatcatgctaaggccagggcccgcatcctggctgcatgagctgccctaagtaaggcccctcatcgctggtgccgtttgaacagcggaacatccctttcgctcagcccccttggttggattaccctttctgagcttccagaatactgttttctatctctgttgaggctcctatgttgggaaaactggccacagggtcaagaggggtgacccaagccagagcattgtgttcccatcatagactgggtggaaaccaacctgagggacaggaagtccaacatctgttctatctgtcaaggtgtccagcaggttgtacttctgattgtggtcttgaggctctttgtttttgttcagtatgactgcagatggcattaatagagccatggtctgcagagtgggtgaggtggcaaagtgagaaagtgagtatggtacattcaagttacctttccacttagcgctccctggtggcttcccattgcacttgaagtaaagaatgcctcatcctgacccagcagggcagctcttctcagggcccatccacctcactagcctccctgcttccacttcttccctgctttccagccacagctgtgtccctagacacagcaagcttgcgcccaccccccatccttcgctctggctctcctgcctgggatgctctcccccatgtcawcacgtgacatggtcttttttagacccacaggtctcagtctgtttcctcatagacaccttttcattactaatgaactctaaaataggctccagacattcgctgttttattttctccaaagtcctttttactatctaagtaatcttgtcatttgtttgtttgctcattgcctttctctccccactagactggaagcttgacatgagaagggaccttgtcagttttcttgtatgtctacagtgcctagaaaaggactggtacatagtaggagcttagtaagtatttgttgtgtggctgattgaatgaatgaagatggttattaggaagattatgaggtaattgaaagctaaaccatgtggttgtttagcctgaagcagaaaagtcccaggggccatatgctggctgtctcagtaattaaagctggtgctaccctaaaagcacctagccctgcttcactcctttctcttggccagattgctgtcctccaaggagatgggcttgttctgggcacccttatgagccagaactggagccaataagtgaaaactctagggagacatattttggctttaaaagagagaaaaaaataataataattgccactttacctgaggacgtagtgggcttcaccagacagcagtgaattttaagtcacctgaggtatgcatatgcaggcacaggctgggtgctctcttgcagacctggtatggagagggctcagcacctgcatgggcagttaggcagggtttacaatcctttcagcccagagcagcagggcgcctgccctgtattttttgttactttctttttcattcagtaaatgtcaatcamtgcgggcccagccctttccctgcccatcatgctgattacagagagtcaggaggtagttcatgatccgcatgtagtaaatgggggtgaaagagttgagaagctgtaggaagacacagaaggggattgagcctggtctaggtcatcagggcaggcctgccggaggaagtgactttaggtggtagtttgaaggaccagtgggggttgccaggaagaggaatagagagaaccgcggggagacccctgggtgtgagcatgggagccccatcacagtgtcttgggggtgtaactgtcatttaagggataagggccaggaaagtcaaaacatgcacagagcagacccacatgatgagcagttgggttggtatcagcttcttgtgaartggtgatagaggatggtgtgcaggggaggagtggaagaaacaagaccatgggatgggaggggtgggcaaaagccaggccaggcaggccacagaagccaggtctgggctgcgtgctcagggcagcagggcctctggagggtgtagatggtgaggcgacaggcagatttgtgtttggaaagggcactgtcttcactatggaaaatcagtttgagaaatggcagggagagcaataggaggttgttagatatttcttagaagaagccatggtggtcttggccaaggtgacaatggtgggaaggaagacatatgggcagatgtgagagacgtatggaaggtagagtcagaatgattgatcgacacaggcctgagaaagtcccaggtttctttttggtttaggcaagcatgggtatcacttttggtttagtggaggtgatcccacttcctgggacaggaaacacagggagagaaatggttttgctgccagtaggggcttatggaggtatgagtgtgatgtgaccgtgggacagctgagtgacaattctcagtagactttgtatacatcaatctgaagctcagagaagtctaggctggtgatatacaattagaagaccaaagcacagaaatgaggtttgaatccctggaagtagatgagacaatccagagagaaggggtagaattagaagagaaggcagcctggggcagagcacggaggcttggcacgccacacttaagggacacggagaggyagagaaacttgaagaggagcagacatggagcttagacacccagagtggggcccagagctaaggaggagtgtctcaaggtgttggggtggggagggcacagaatcaccargcttcagatgctgctataaggtcaggcctacaaaggtttggattyagtgcacagaggttattagtgacctggacaaagcagttattttttgctgatgaagtatattaaaaggctttccaggcatcacatgtgccttagtccattcaggctgctataacagaatactgtagactaggtggcataaagaactaaaacaacggatttattcctcacagtccttgaggctgggaagtccaaratcaagatgctggcagrtccagtgtctagtgacggcccacttcctggttcatggaacagcaccttctcattgcgtccttacrtagtaraaagaatgagagagctgtctggggtcccttttataaggcactaatcctatttgtgagggatctacctctgaggcctgataacctcccagaggtctgcctcctgatgccatcacattggggattgaatttcaacctgtgaattggcagggagtggggagactggggggagcaaatatctatcacaacacataatattgttttatgtgaggagtgtcctgctgatgtcaagaagagcctctgtcaccactgtgaccactgtccagtctcagcaatgggtaaaagtgaatgaagtgacccaagtctggaaggccttatctcactgctggtaagggaaggccccacctatagtaggtggccaccctggttgtgctcattcctggcacaggcctcttgagtcgttcagacagtctctgtactaccagctaaaaatgactgtaagctagaaatttaggagtggtttagattttaaagagcttgttcatctaattaaatagaactggagttaatggcttagtggttgttctataatcaggccctgctacaagtggttaaggagactgacaacgggaaccaaaagagcctgcaggracaggagtgaacatggctggaaagagtctctgccaggacttctgaatccagagctgagaatgtggcttccttggagttatgagagatagggagggattttgagctgtggcccactgagatgaaaaattgggttgtatcatcttgttctggagttgcagtgacagtttatggcgaggggtaataaaaggagcaaaggatctgaacccaacctggttttgaatctgggatttctcactttttagccaagtaactggaaaagtgactgaaaaactctctgcatctcagataattcatctgtgcaaaacgatatgcatagctgtagtcaaagttagcttgtgtgtgaagcccctagcacagaggagacatttaataaatgttcactcctgctatctgtattattattgttattatttttcttcttcttgagacggagtctcactcttgctcagggtggagtgcagtggtgtgatcttggctcactgcaacctccacctcccgggttcgagtgattctcctgcctcagcctcccaagtagctgggactacaggcatgcgccaccacacttggctaatttttgtattttttagtagagatggggtttcacccatgttggccaggctggtcttgaactcctgacttcaggtgatccgccaacctcagcctcccaaagtgctgggattacaggtctttattatttttatgatcatcatagtctatgttacatttatgtagttgttatggatcacaaaacactttcagatgtcctcactgattgcagttcagcttactgccatatacttgagttatcacacgggtgtatgtatgagccccattagaccgagagctccttaaatggatgggtccccactcacagatgtctagtgcgggcataaactagaggatccatgtgaggaagcacttcccctaccagagctcttcagaaagagagcaggtggcttcaagaagatgtcagcttcccactcttgaggatatagcaggggccacctggcagggacactgtggggaagtggctgcactggttggaaggctggcttcaaagagatggtttctgaatcccgctttataatctatgttttaattggatgaagcagttctcatgtcccgtcaggttcattcaaaggagtgtttgtactcatctaagtttgtggaccctaggcaaagtgagccaggcccggctgcccgggggatccttcctctctctgctctaaatgctctttaaacacacaggctcacctactccctggcagatgaaagttttaaatttaaaaatattttaaaagaatgctttcatatgaaagccagtatcttttaaaatatcaaatttgtcttaaacattttggcagcatatgccatgtgacttttggatttatagtttctctttcatagaatraaaagttcagtgccaccacctcaagagttctgcaagttcacattatgtaaacatatataataaaatatttacttagggtttccataaaaaagatccaaagcagagaataagagagcttctctttgcyggtttcagaggctctgctgggaattctgaatgaaatttaagcctcttgaatatgttttgattggccttcttcatattttatctcctgtaatgaactctttgtcagtttgtcaattttgactaaggacagaaagttcatgtgcagtaacacagagactgaatttaaaattatggtttatatcatgatgtaataatcctctcttttgtccttcagtcaatatttacctgttaggccaatatattataatgctgacttcaaaagaagacactttattttaccttctctaagtgttggttttagatacttgaaatatcaaaactggaagttgagccatctgagactcttggctgaattcacataaagttcagttcctcgatcgcagggcaggtttcactgctcccagtgacccagcgacacagctgcgtgcctgtcagaatgaggcrgctaagcttggagtcatgctggttcctctcagctttccagacagccctctcctctgtgggaaacagatctgttatgttaccccatagcagccaggatctcttaagtggacttaagtattcctttatgtattacagctacaggattgggcggaaaaacctgaagaatgccctgtaggaaggtggtctctgagtgtcacaccagatgaagaatagggaatcttaaattcttttccttgcctgaaccccttttttcaagcatcccacgtttaagcatttttccattttaaaaactgagggaagaattatcccccagtgaaggagtaggaggataataagtagctacacagtttgcagataaaatgtgtgataccttaggactgatcattcaggttaccaaaagagcagatggtactgtgttaataagttcttctaagccaacttgggtatgagtcaagactctgtcagtgagtcataatggaaagggaattgatccactcattaactgccaagtccacaggtagactagtttcaggctcagctggatcctgaagttcaaatgaggtcataattcttcttttctttcttagactattattttctgtattggcatgattatgtagcatagatgtttcctggcagctccaggtttatgtggtccttagtgcctrggatcccaggagagagaccctctttcctgaagttcatatcatttatcaatacaacaagttgtattgttcaactgaagcaaattcagcactatgcttgtatcttccatgtgcttctctctgcccattgtatatctttaaactgtatacttattttattttattattttattttttcgagacaaagccttgctctgytgcccaggctgaagtgcagtggcacaatctcagctcactacaacctctgcctccaaggttcaagcagttctcctgcctcagccccctgagtagctgggactacaggtgtgtgccaccacacctggctaatttttatttttagtagagatggggttttgccatgttggccaggctggtctcaaactcctggcctcaagtgatccgccagccttgacctcccaaagtgctgggattacaggcatgagccaccgtgcccagcctatatacttattttacatgtatactctttttttgtaattggttcattttctrtattttcatacacacatacatgtatatgtatgtacgtatgtatatactcttgtatgtatgtgtatatttttattttcacatacactatatttgataggtgatttacagtatgttcaagaataaatcttaagtttataacctaactaccctccctcatttaaggtacagttctaacagccttggtcacctgaccaactctctggtaaacctggtagggagggcagggcctattaaaagacagctccaccaggaagggaaggagcagttctaaaaggaaaaagaaagtgggtcctttaccagagggaaaagacagaccgactgttgattcattcattcaacaagtacttcttgaggacctattatgtgccaggtactcttccaggccttgggtaacagtgaacattacacaaaaggccttatttgctggagcttacatggtagggagagagacagataacaaacacacaagccgatagagatatgccgtgatatctggtagtgatgagagctctgaagaaagaccacggtaagcctcaacaggtgtggagtacgtgctttacagtgcagatggaggaaatggttgggggcggggtggtggggagttggaggagacagacaggtggaggaaatggtgggaggggggtagaggaacctcttcttgtttggggattctctttcagttgacccaaataaagtaaggaagattttgataggcagatcctgttaagactatcccaagcataggaaaaagtatgagccaagccaacatctaaatggcttgagggaagatctgttcaggaaatggaaagaggtttcccatgacagctacatacagagcatgtgaaggatggggctgaggttgcttggggtgtgaccctgtaaggacatgaataacaggctaagagtacctttcccagacccacatttagaaagatcacagcaaagtgtggagggccaggtgaggggggcacagaggcgaggtagggcagccaggtgtgggctraatagggcaatggccagagggaatgggaaggaagggcagagctttcagaggcttcatctgtaggatttggggattaattcacttctagtgacctaaaaggatttgttcatcacccagaatgagccatatcttcttatgtttactcaaagataagaagcctttagaaatgggaaacatcttgggaaagtggttaatcttgtttattcacaagaacaatttcatcatcttttgctatacaatgaggaaagtgacagtagtgcgggtcacagagggaggtggccaaggaaggaagcaagcaagactagatgtgtcacctaactgcaggtcctgtggcctctgggagtgacatacattctaggaaaggactcctgggagagaatgctgtggccttccacgccagcctgatagtccttctcgtgcatttacaggcaacttcaaagtgggagttcacattgctgacgtgagttactttgttccggagggatctgatctggataaagtggctgccgagagggctacaagcgtctacttggttcaaaaggtaaaaatccatctctagtttcttttttcttgctttgtttatttgtttgtttccctggaagagtgtgtgctctctgttattacatgttctcyggaaagagaagccaaaggaagacacaggtgttcatctgaggcctcatcccagagtggccctgctatataagtaactgacagatactcagcttcagaaagaaaggaggcaaaatacctgctttcaaacgattgttctaaagcagggctcggcaaactcagcccacactagcgactagtttttgtaaggttttattggaactcaggcacatgcatttgttcatgtattgtggctgctttcacactacttcagcagagtggcatgacgatttcctattactgtaagccctttaaggaaatgttttcaacccctgttctaaaaggtgggagccaatctggtcctgacctgcccattacaagatagctatgggagtctccgagatggaaaagcgaagggagataaggaggagcctgagcttttccctctcatcctgactgcaccactcttggttagttactaagtgtctacagacctccctagactcatctgtgaaatgaagggactggacagattcatctcaaaacatcccttccattctgtgtacttggacctggcacattcaataggtaaccatgagaatccattcctttaacacatatatattgagcaccaattatctgatggtcactgcagtaggcctcagagaaaggggttaataagagaccaagcatgagtaagttctgccctccacactgtggttcatgaattctgccaggtttctttctcttctttcccttctctgatcctctgctcatttgctcatcttccttcttcggccatatctggacttccacttcctttctagctttttaaaatttggcagtccagtttgggattctgcctatactagcttgagccttcctgcctcccaagcccatgccctaggacatgattctggtatttgctcattgactgccctaaggtcagaggaatatccccaccatccaccctagaatgcagcaccacaggtgcattstagaatttctgggctccacttctagcaaagtgcctacttgatgttcacaaaggtattggcacttctggagcaaaagctatccaggaaagcccaaaagtttctaggatttctggtatttaccaagtgttactgagagttcctctcatgttttcaacttgtccaccctgaaaactaacctctcaaaagggaagagaccagtctaggctttgagtgcagccatatcctctaggggctgaagatcctgttgcctgtggcccaagtttagttcccccagtgtagctgagcttatcagttgacagtgatgtcttccaccccatggtggaaatcaccttgtctgagaccctttgctcctgctacaaagggagctagcctagatgggctctcttgtcccaaaggaaagccagagctgttatctgccatagccgccttcaatatgtggaggcccyacctaggaagacctggcacctcctctcccctgccccaggacagtactctctggatcactgaaacctagaatatttgagcaaaaccctagctccacctgctccaggagacttgtacagccgatttcttcagaagtacagctttgcctaccattcacattaggtgatcagaaccaccatgtacgtgttttctgccatcccagaagtgagaatagtgaatagagaggaagacagagttgatcagagccaggaaattctgagtcagaagctgtgtgatcatcaaaaccccattccaggtaactgtgtcatgggcaataggtaatctcaatgcacagtgatgcctgaaagacccagcaccttcagtgaccaattagtgagaatagttagctgtgtcctcatctgagcagggggaattccgtaccagactttgcttgtgtcaaacgtactgtgtccctccctgacctctgtggctggcctaagcctaaatgcaatgtttaagaacttctctttgccccccgacccctcacaatgtctatgacacctgagtccaagctctgagcaggtataggcagcttaagagaatgcagtgcaaacttctgacccacaagtatctctcttgagtacatggggcttcctccctgacccccatggccatgaagccacggccatgcactagctgctgcgctctccttttataaccaggaattacttttcaaaatcagaaaatgaaaaaatcaaattgggttaagtaattaagcatgtttccttttctgtttcctttggttttgtgtttgtcacagttctagaatttctctgtgggactacagagttggggctctgctgctgagttgtgaaagtggggagctgggtggaggaagggcccgcacgcctctgctgcccggcactgcctccagcttggcaggcacaagtggcgccggcccgcaaccttggacagcagcagctgtgcgctctgattcctttgaaccgctgctctgacctttcttcctactcggttttgtttcttaaaggactgtgtccaggaacttttctgctgttttcactttactttgcctataaaggtcttctgaaaagctggatgagctgtgtttccgccctccakattctctgctttctcacttggcacaatcatttctcccagcttcatcacacaggggaaggggggctggggttccagttcatttcccatctatagggaatgtggcactgatttcattcagatctgtaagtgactgatgccagaactgcaatcttagctccttatctaaactctaattgggggattaacccatggagtaggacagtatacagtgtaacaggtcttgggtccaawtaccacctcactgactttaaatgaaattctttttgttgagattttgctcacagtaataagtatttggttattcttgttaacaatagggtataatcaggtggaaatataaatttaggtagtgtccatttaaatatcaggaaaaaactttttgacaaaagatgattccgttagataggggacacctgcccacctgaattttggtctgtctttctcagaaggacacaacatttgctcagttaatgcctctcaactgtcttctctgggagataaatataatgtaattgcmaagtttaaagtaattttagaaaataagcmaattaagctttaaaagtaaaagaaaacctaaacagttgaaacctaaacctaaattttctgcctattggcccaagcattcatgttattttaggtgcgaaacagctcaagtgaaagttcgcccataaatctctacgatattttattggtactgctttataatagagatcaaagattgggattggaagcctgtcttaatgtagagtccaaagagttttaagatgtttctttctgacaccagcaggttgtcagagtgttgatgttttgttaacgtcaaactgtgtagcaaagagttgatcaaattctgaattcatggaagtgttgatatggaaaagaaaactctttaaacagagatgttggctggcaagtgaattaatctatttcctttaagttatttcagtgtgtaagtagggagctagctgagtgtaccttgttgttaaaacctcgaagtcctcggagaaaagggggaaaagtcaccaattctcagactgcagatatgggctgcgatggccaatgggttatcgcactgaaggcctgagggagtgtgggtggggagccagcaaaggcctgggctgaaaggggcagaagaggccctgcaacctctccaggtagtggagaagcccctatgacttggctkgtgggcatctggctcccacatcactgctagtccttcctgctcctccttgcctgaatgattgattcttcccttctgtggccctttgtgttggtcacagggctgtcctggctaacctgctgctgaacttggccagcctgcccactgtggctttagcagatgtttctgctctctgaggctaatataaggttttatagtcttgttggtacccccacccagctgccttgggcagtggtgtatttacccaaatgataaatttctctctactctctcaagacctggtccagaatgcttagaaagtcagtgtcctatcatcactatcccttttctccacggccagctcttaagctctgccctgactcaactttggtcctggccccaaagcatgcttaagaggasttagcatccttcaagccccgtttccttttctgctgcctgaagtgcttatcagtcttcctccacttggtatttattgagtaccagctgtgtgtcatgttcgagggatgtaaagatgagacagattctggtcttgccctggggaagcagaggaggtggacaggtagcaaacacttgcaatgcatcaggctaccttcaggtacagaagtgccccaaaggtgaggaggtgttagagaagagagaggggttgtatctgcctgggctggtggtgggagaggagcttctgcaaggtccaagaaggcttcacaaagcaatcgtgttttgaacagtgtttcacattttgagtagaaaatttctagatagacaaaaatgggcagagagggcattccaggcagaggctagaaaaagcagagaacattcaaggagcagtatgcagtttggaattcttggggtgtgagttgtagagagagccacggatgaggttacaaagagaagcctggagtggtaggcgaaggagctcagattttgagggcaagtagggaagtgatacggtctccttccaccaagatagaaaatcaccttagcaactgtgtggttgaaggatagtgaggccagaggcaggaaaattgtcatcagtacctgggccctttcccccagtcatatcctcttgaggctctgaataactaccccaacacagagatctttgctcacaaaatcttatgagagtttaccaatgtggtaatgtctaactggaccccaggagaactaggacaatagatgtcttcagcctagtgccaaatggacattctgaacaagcagcatttcagttacttcaaattgtagtttcttcccaattctggcaatgcatatcacacaagaagaagtagggagaagcaaagggcagggaaaatggagaagttagcttcccactgttatctttgctgtcccctcggagatagggtccttctcccgcttccctgtggggaactcttggccacctgtgaccttagccactgaacattgagggtgcaggcttttccaaaaaccttttggccccatggaaccctctaggccctccttcatccacaggacatgcaaaagtccatttactaaattcagctccttagctattgggaaggtaaagccagtgtgtcctaacataaatggaattgcagattatcattgagtggagattagtaagaagatgcagaagtctggagaataaacaagtcttatctagaataatttctacttcagaattgtcactggtttttatctgagagaggaagagagacatatycacacttgaatagtggaaggaggagaggaaaagactcatttgagagcgttagaatgtcagatctaggcttgggaagtgattggatgtagaagggagagagaggagagtgaagaatcacaggcaaatccccagctgtgttctggggacaggggtgaggagtgtggggagacatgggtgtggtgttttgatttttggtggttttgagggaggggtggtcgtttgcttccttgcttatttaacttgggacagagcgctgctcttaacagaggtaggaaatgtagtcagtggaacaggtaaagaagggaggaaaatgctgaactttgtcttctccatgtggagtttgaaacattcatgggacatccagttcatggtatccagagggcattgtagacgtatgtggagtcacaaggccagatggccagaccttggacagggaagacactcgttgtgagatggcaggagacgagggcacacatgtaaagtgagtgggcctgggagaaattggccaaaggaaggagctggaaggttgcttgcaacagattgagtctgatgatctcagttttctctgtgaagaagagttgaggttttctgctgagaaagattgggaaggcagtcaggtaagaggtctgaggagaatagtaacattttgggacctcttctgaggggcgtggggaaggagctaacaaagagaggtgaaaggcctgccaaccctcatggaggtaagaactaagacagcttagcaactcacctccacacggcccagcagttttctctgtcactgctcagtgaggacttgcagaagtaggaaagggcgattataagatcgatcatagggtttgtggagctgggatagtagaagtgagggaaataaagaaccttgaagaaattatccatgtggttcacactgcatarcaaagttaatgaggacaagacaggataagactggggaaaaggatcaaggggtcagggaatgtatgaacatttgcacagttctaatgatagccaggagtttcccagctcctggagagacctttcttttccagtcagacatggtgttccacacttatcaccctgacccagaggctctcaggaaccatcgcaggcctcatgtagctgacctgggtgcatggactgttgcgccatggtccaggtgggtctccccctgacataatgggacttggatttgagaaagcagctgatcagaaggggctgcctgcctctcctttccagccctcctccacagggatcctgctgtgcctggggttgtgggagagcacattcacagtgaccctggcaggaattaggccccatttatgagaggctgtgatgtgccaaaccacaaatgtgattgtaacctcttaattccttttcctttgaaacatagaggaataaccatctatttacaaaactatatatacctaaagactgttttctatgagaatttcgtctgaattctgctttaagacctggtaaatgtcttttataaaaaatacttcttaaaaattaaatataattatactaaccaaaaagttttaaagttcagctttttcatgagcacttagattggtaactgaccattgcagtgtgattaataaaatgtcttctgtgtaagatataggataccacacagtttttatagcctgcacaaccactgcatgtgctggtaagttttaggttagtagccaaaacagtgtagcttatacttaaaatactagttgtttatgaagttttttttgtcaagatgtttaaatataagtctctagtatatttcataaaatgttttatgtgatgcagtaaacatagaaaaaaagaggtggtccatctcctgggcagaagccagtcagttgtctacacactggaagtgcctaccatgcatcaggtgtagagagagacaggagtgaggcctggcccttgctcctgaggtttcagtgtctgtggcactcaaggcacctgaagaagcaattaggacagtgttgtaaatgcagcagaagagcagggaggatggagtaagtggctgactgtgtaggatggccccaaatcctctttgaaagaacaggggaggtgtgtaaaacacagcacacactctgcctgggggattttggataaaccttttagcagtggcaatgagctgaatctgaaaggatgtacaagagtttgccagatgtaaaatgtccagaaaggtgttccagaaagagggaccagcacaagcaagagctggagcagcacacagacaggtgaagggggtgcagtgggaaggcccatgtgactggtgttgccagtgccccgggagagggccagggcacaaagctgaaggggatgcttgagcctggtgacagtgcaccttggataccgtgggctggccagtgagctgactttcactgagcatcttcagtattgttctaccaataagaagaccaagactcaaaattttactaacttgcccaaattgtacaagaagcggtgggcccaggattagcccccaagtctctcaggtggcaaagcctttgctgtctttcctgcaccatgctgctgctgagtctgcacttcactcactgtaaaaaggtctttagaccttrttgtawttttttaagtggtgaggccctttttgcaaataatatctgaaccccaaattccaacatatagaaacagatcaggttttcactaaataattagcattcatttatttcatatttaaatgtgtaacacacaccaattaatgaaaacagtgactttgtttttaataagctcatttattttggaatgcttgcagttgacagagaagttgcaagggtagtaaagagtggtcccatacccggttcctccaygttaacatcttacgtgactacgcttcatgtgtcctaactcagaaactgacattggaatattactawtagctaaactccttactttatttggatttcactagtttttccatcartgttttctttctgttccagrktctagttctggcccaagttataatgactttcttttgacaaacactaaatatgaagttaggaattataatgcattgtcagatgctcagctttgtgacttaaagtaagatactgccgtgaacacttagaagacacactaactatctgtacaaaaggcattaagccctggactgatgtcattgcaacaagcatgctgggtggctgagcagccagttaccaaaatacagttgatagaacgaactgttaatgcagcccagaggagaacacaagaatgcatacccagcaaacttgatgtagtctgtcttagctcaggctcctatagtaacatgccatagcttaaacaacagagattnnnnnnnnnnnnnnnnnnnnttgagcctggtgacagtgcaccttggataccgtgggctggccagtgagctgactttcactgagcatcttcagtattgttctaccaataagaagaccaagactcaaaattttactaacttgcccaaattgtacaagaagcggtgggcccaggattagcccccaagtctctcaggtggcaaagcctttgctgtctttcctgcaccatgctgctgctgagtctgcacttcactcactgtaaaaaggtctttagaccttgttgtatttttttaagtggtgaggccctttttgcaaataatatctgaaccccaaattccaacatatagaaacagatcaggttttcactaaataattagcattcatttatttcatatttaaatgtgtaacacacaccaattaatgaaaacagtgactttgtttttaataagctcatttattttggaaatagctaaactccttactttatttggatttcactagtttttccatcagtgttttctttctgttccagrttctagttctggcccaagttataatgactttcttttgacaaacactaaatatgaagttaggaattataatgcattgtcagatgctcagctttgtgacttaaagtaagatactgccgtgaacacttagaagacacactaactatctgtacaaaaggcattaagccctggactgatgtcattgcaacaagcatgctgggtggctgagcagccagttaccaaaatacagttgatagaacgaactgttaatgcagcccagaggagaacacaagaatgcatacccagcmaacttgatgtagtctgtcttagctcaggctcctatagtaacatgccatagcttaaacaacagagatttattttctcccagttttggaggccagaatcccatatcaaggtgctagccaattcggttcctggtgatggtctcttcttgatttgtatatggctgtgtcctcacatgggcttttctctgtgcctactcatgcagagagagacttgtgtctctttcttgtcttataaagtcaccagtcgtatttgaccagggcaccaccccgtgtcctcatttaaccttacttacctctgaaagaccctgtctctatatacggtcacactgggggttagggcttcaacatataactgccgcgggggggggggggggggggcaaaaaaaaaaaaaaaaaaaaaaaaaaaaaaaagtccctaggatagcccaaaggctgagtaggtgaaatctttatcattcaaccacgagatggtatcatcttgaagctttctccattttgtgcactatttttaaacaggtgaagatgtatcattttataaaacacttgacatatacaagaaaatgttaaatatttggattacattctaatgcatcacaaaataagttagcaaagaaaatatagtattgtctgaactgatggtgcaaaagtaatggcaagaaaaaaatttcaaaggtagttgtctgtaaaagctgttagcgaaggctggtaggaaaagttgttaccagagttatcaggtagtcattargtttcatacagatgttaaaagacatgacattctttagaaataccaaacaattgccaattatttgttactggtgtgggccatgagttctagaatttactattccataccaaagatatttactgtactaaagtagagtacagttgcagatacttcacgcagaataagaagccgctggggtttgttctgtttctgcccgtaaagaaacatagtttgctgaatgtccctcaattacagcatggccaccctttgcctatcacttctcagttacctagcatggggttacagtgttatccatgctcaacactgcaagccaaagtgggccatagtaagtgtgttgagtaaatggctagtactgctgatgtttttagttagagaggtggggtggatggtcctgccattaatcaagaaaaatatgggaaaaggaacagatagtggtagatgggagagagtttttgaagtawtttcaggagatacagatagagatattcatttcatctttggaatagtaggaaaaaaaacaagtaatattttgggacaactgcaagtcatcatttgaaagtaagctgaaaaacagtttttaattaaagagtatataccgttgactcagtttattatggaacagaaagatcaataaggagaagaaataatttaggcttaaaaaatgggaaaatggataactagttgatcacaatgtttatctaggaaacctggatgtatgatcctttctgttttatcactctagtgatattttattgaagtagtctcttaatgttccaacatgtaatttggtaaattacggtatattcagttactaaaacattgattcaacaataacaatagcttattttactttaacaaaaccctgtccagagtttacactcaacccttgggctcttaagtatatgtataattcaactggagtgcttatatccaaaagcacaagtacttcttgagtctggagcttcaggtttagtagataatacaatgtagctattttacattgcttgcattgtacttttgtcttcccttaccagttctcctcactttcccagctcatattcctatttgactctagaggcgcatggaaaagtatacaacagtgtggtctttctgcagagtctttgggaacagagccacctccatcttcagcttgctctggaaaagctgaagctgttcaccaaaactctgcccactgggcttctcctaagcgggttggagaaaggtgctcatgggcctgtgctctatttacaggtggtccccatgcttcccaggctgctgtgtgaggagctgtgcagcctcaaccccatgtccgacaagctgaccttctctgtgatctggacactgactccagagggcaaggtaacaacttacacgttttctttctccacttacctcttttctgttccatgagtcatgaagcactcaccatgtgcctggcactggcttgggtgccatggtggtaagacaagggaggtatggagtagccatcatagagaaatgtcagagtccctgcctcggaagagccgttggccccacttagaagccaagactgaccttaagcacttagaacaggcttcttgtctgttatcaggtgaaggaagaaattgagtaagcagagtgatgccggggaggcttatgcaggagacagggtgtaagtgggattgaatgaggattggcaaaggcaggaggggcagcccagcctgcagttaggagagcagagcctgtttagaggaggacattaggtaaagtgggaagtttacataggtggggtgaaatcaaactggagaatcacaaatgaattgtaggtgttagggttcctctgaagtgtcatgagaaagctgattgtagaaaggtcagtggtgcatcgtcatgctggatgattggagcggtgaagatgaattagcaaggtagtgctataatcawggcacaaggtggtgaaaccacagaccaagaacagaggagagaaggatgtcagcaggggtttctgggcataaggaaaaagatgtctgtgcctgtcgtcgggatgtgcctatgcgtatcatagggaacggcaggagagagatacatgaaagagaaactagtcccctccctgcaaatgtaacaactccaaacattcagaagtagggtcgtgattaagtaagccctggtgccttctcagtggaatatatgcagttattaaagttgttgacagagaccatggaagaacatgggaagtgtttatactgtaatattaaatggaagtaaaaaaagatatttaattataaagaggttccaaataaagatagaggatcaaatacccacatttactttcattccctcccaaaacctcactaaaacaacagtaaaaggatttttttttttaaagacataaacccacaaggacaaagagagtgggagaggagacaacagcaacaaaattttggaatctgggtagcagatggatgagtgtaactgacttagsagtcctgagaaagctgaatcctgagccagcaatagagaaagccaagaaacaacccagtttatgcagcagaaccctaaacaattcagaaattgacagtaccagataattctagaaagtgggggaggggtgggggagagtgaggctaacaacagtattgaaagtttatttttaaaaattgcccctcctrtaacttagtggaagatcagaaatgtgttctctagacagggtaaagtaagaggtgtctgaactagaggacatcaaacatgcttgatggcagtgacaccttgggggagattgagtgaatgttggcatactgaacgttaagagtgtcagctttctttttgctgccagccccagaattctggtcgccaggcctatatccatgagtcgggacatgggaaaatctctgaggactctgaatagtgaggaataaaaacataaagatactaaccttaagagtttcccaatcagcagcccagctgtctttccctacagtaaagcttacagacaataagcttcacccgcacaatcagagctttttaggatttcatttccatatatgaagagacaacccgagggaagcttctaatgtgaaatagggaggctattactaatgcattgattcaacaatagctttattttactttgatgaaaccctgtccagagtttacacttagccctagggctcttaagtatatgtgtaattcaactggagtacaaacaaaacaggaaagaagtaaacaaacagaaaatgaagtaaacaggaaaaagtaactagaacaaaacacactagcagggaaaagaaattatcacttatatctttagggaatttttttaaaaaagaaggtagctgtatcacaaaatcttgatactttaaaaaggaaacatttggagggaaaaaaagagctcttgggaattaaacacaggttagaagaattaaagattcaagattcctactgaaaggtaaagttgaggagctgtcccaagaagagacagaaaagacaaaaaattagaagactagtccaagatatacaatatctgttcaatgaccgttccagaaatagagaacaaagtaaacagaggaaaagaaatgatcaacaaaataattttaggaaatgccccattcctggaagatgtgattttccatattgaaagggcacactgcctagcacaggggtggaggcacatcatcaagacacatcattataaaatttcagaacactgtggacaaagaaaaaaagacatacgataaaatcggaaatcagaataacttcagacttttctaccacaaccctagaaattagatgacagtgaagcaaagctttctaatttctgaagaactgtgatctccatgccaaaattctgtacccaacgaagctatcaataaaaagggtaggaaaggacattttcagacatacaaggcttcaacaaaaatgtccatctcatacaccctttctcagaaagccaccagaagatgtgcttcaccaaaatgaaggaggagtaaatgaagaaagaggaagacatgggacgcaggaagcagataatccaatacaggaaagaagtgaaggaatcacttagatcagggctggcagacttttcctgtaaagggccagatagtcagtatccctgtcacagctactacactgtccttcaggtctgtcttaaagaagatgctaagtgccaggtgtggtggctcatgcctgttatcctagcactttggcaggccgaggcaggtagatcgcttgaggtcaggagttcaagaccagcctggccaacatggtgaaaccccatctctactaaaagtacaaaaaattagctgggcctggtggcgggcacctataatctcagccacttgggaggctgaggcaggagaatcacttgaacccgggaggtggaggttgcggtgagctgagatcgtgccattgcactccagcttgggcagtaagagtgaaactccgtctgaaaaaaataaaagaaaaagaaaaagaagaggacgctaagctggatcctctcgtgggcttctacattctgtctgttagaatcagttgttttggttgatgtgtagatatgtagctggaaaagaaaggagcattttaataactttttcagataattgtggctattcatttttgtactacaccaaactttaatagtttctcaaaagttggttgggccaggcacagtggctcacgcctgtagtcccaacactttgggaggccgaagcgggcagattgcttgaccccaggagttcgagatcagcttgggcaacatattgaaaccctgtctctactaaaaacacaaaaattagccagatgtggtggcatgcgcctgtagtcccagctactcaggaggttcaggtgggaggatcacctaagcctgggaagtcaaggctgcagtgagccatgatcacgccacgcaatcccagcactttgggaggctgaggcaagaggattgcacagcctgggcaacataatgagaccttgtgtggatgaaaaaaaataaaaaacagacaccagagagtgagctctctcatctccccaaaatacccaagtctaaactatagtttgtgtgtcagttgttccttcaagtaaaaatggtgttccataaaatgagcaatcagttcacttcacaactcagttatgtaattgcttttcctcaagaccaccagcgtacctctacatgcagcaaaagtgaaaaagacaagcaatcaagggttgagacatcataaaattaataatttttactcctctgtccagagcattcggttgttcgatacgagtatgaggtattggagtgcaatagccacaggtgtgcttgtcggatttgcaccaaggcagccactttacccacgagggcttttgtgccaccagtgtaaatgtcagcacgtggaaaggacaaacactgccttagtatttttatgaaaatagttttaacctcctggattcctggaagggtctcagggatccctaggggtacatggaccataccttgagaaccaaatggacagttggtggaaagtttggggtagattaatatacatagcacacagaaaaaccaagcaaataaaaagacagttattaattccagtgagaataaaaagttgtatagaaaagaaaagtaacacttagtatttatgtaatcataatagtagattgataaaatgaattctgatcattgtcatgtattaggaggattaaggactagaatagttacgtgggcatggtgggggagggagtgtgtatggaagaaaaaataaattatcttctgtagtgaaaagtttgcaaataatgcctaaaaaaaatcaggaagtagcagacaggttatatagaaagttaatatccaaatactcttttaaaagaggtaaaagtagttactcttgggaagtaacagagagggatgggggctgctgtttttcataacaatactttaaaactatttgaactatgtatactttaatatttttattgtgaaaaatttcaaacatacatgaaagtaaagggcacaataaacccatcctccccacttcccagattcaactatcaagacagagtgttttaaaacaaaccacagacatgtcatttcgctcatacatattttagtatgaagctgaaaarattttggacattttcttatataccacagtgccattagcacacctaacagtgactactaatgccttggtgtcattctgaacccagtccgtaatagatttccttsctttctcccatagattttcctgaattgggatcaaaacaagttatacacattatatttggtttttatggctcttaaatatcgggttaataaaaaaaaagcacccttttaaagatttttttaagagttaagaggcaaacgctatctgaaaacagaaggaattatgaggacagtatgccagcaatcatattttggtgggggtgggagcatgcataggggaaaaaatgaatggaaaaagaccagtaggaaataaaatcgaatgccaatagcggttatgtttgggtagtaaaactatgagtaattttttctacttttttgtattttctaatgttttttgaaaacgtgtagcttttatgtttttataaatgcttattttcgtgaaagtttaactaaacagaaaataaaagcccatagaagaaagctaacttgagtcaacagaaaagaactttgagtctgaattttgcctgccaaagtcagacccaagaaataaaaagctgcccaatctaatgagcttctaaaatatgagggtcataaaagaagcactagaaagtggcaaactctgtaactcagttggcctctggggtttctgttggaggtagtgtctggtgcccaggccactggcattagggactagagagcaggtgtgaagtaggcacaggatccaggaggggctgtgggcctcagtgcaaaccaagccagatcggaagtaatgagagtttggactagagacagagttgtagggcaaagcccactaaccacactccttgtactgttggttatccaaacaccctgcccagaccaagcgaccacatgagaggtagacctggttggttagtcctgggatgagtatctcttacccacaatcaagatgcatgaaatgagaggtcagattccagactcacatccaagggatggtccttcctcaagacactggcaaggaaagcttgagtttagcaagggctgggggaacaaagttcggaaccagatgggagggttagggagccagagaaggccaacgggcaaggggtagccctgcatcaagaacccagtgatgaagaggaggatctccgaagcctgtgtggccaaagtctgaggctggttttgcatgcagtggtgacttctcttggcgtaaaggtttggacttagaaggagtcagagcagggccaacagcatcatgccacagctgctgcgtagccaccagtctcacctggagttgaagtggagaaagctctgtatttttccttagtctattggaatggcttactttctggagcaggcatggtcagctatagaaagattgttccaacgttttcttaacgcctactaaatttttttttaaacactcacaagaaaatcttggacaygtatgcattcattaagctagtgctcaggcttttaggtcaataaacgctgaataatttatttttagcatatttctcacatgttggttgtgagagtcttattctctgacttagtaactaagtccttagaccttagaaccttagaatcttagggccaaagatcagaataataaaagaagggtctcacaattgattagctatcctcagtttgygtctcctgtgacatccctgctgtgtgctgtacaggattagtcaggacctggagtgtactatggaagtcgcctatttcagccatttacttaggtcaaaaaccacggggtcattcttgactttggtctttctctcatgctacatctgcatccagtctgccagtgtgtcatcgctgctttgctttctgaatgcctccagaatcagcccccttccttaactaccggcactaatacctgcgtccaagctattctctctcaccttgacagatacagtggcctcctgactgtccttgcagcctctgctcttgccccacgtyatctcctctgcatacagctgtcagagtgatccttctgaatcttaagccttgtctctccattaaaactttccaatctctcattcacaataaaagataaaacgcccccttacaatggtaactttttccttgttcttttctgcctgtcttctgtgctggaaatgcatrgactccagagtcttcctgcaaccagcatctcctctcatgtcctggagcattgctgctcacaggagagaagctgccttttatgtgtaactgagctctctgctgtgctgcaggccccctccccagctccagggacctgacatcagtcaaggttgagtttccccacctgccatcttctcatatccttcaagcctctgccccttccttgtagctgagcagatcttttcctccctgcttaactcattccattctgagaattggacattgtagaactatgttgtgtaccagttggggctttctcagctgaaccttcagtgctacttgggaatccttttattcgtcactaggttccaagmcttttttcttcggttccaacctcaaccttgctttccactcctctttcctttaagacccatcattctcccaagtacctttcattcctccttcttggaaacgagagaggctagccaacttcaactgctgaggtccccctttccacatcaaaatttctctctgccttgccgctacttaggaggctgaggcaggaggatcacttgatcagattgagaacagatcgagaccctgtttctaaaatataaatgaatgaataaataaataaatatttggctgggcatggtggctcatacctttaatctcagcactttgggaggctgaggtgggcagatcacctgaggtcaggagttcaagaccagcttggccaacatggtgaaacccygtctctactaaaaatacaaaaattagccaggcatggtggtgggcacctgtagtcccagctacttgggaggctgaggcaggagaattgcttgaacccaggaggcagaagttgcagtgagccacctgtgaagagaaagcgagcattctgctgggtgtataagtggattgtgtgcaatggtgcttcagtctagatattcatgccttaatcttactgtgttcgtctctccctttttcaggggaagcctgagctttgctyagtgatgatggccctagtgtgaggactggggcttgtggagtagcctcttgtttgctctagccaccccactgcctctgtcctctgcagttactaggaccttccctagcaagtttgcgtcctttccaccacaggcatgacctgcctctctctgctctcttccagcccgtcctctctctgcctagtccttttcagacacttgcttcttggcacctttgacttttctcactgccgggctgcccstactaaggatgattgccctgttttcgtagctctaagaagcagccaaaatccactccacctccctcccaccctccgtcactccaaacagcctggttttgttccagtcaggaaaaggtttctttcttcctcatatttttttgaacaaaatattttgcatacggaagcccggagctcctgcaaaagtgattttgtacctaattatttaagattataagttaaccccacttgcagttttttcagccagagatacatcttaatgargtgctgacatttttcagaggataaatttaaagatacatttgaatggaactgaataattttcaaaggaagtggtcatacttctgtatcaatatagaaagttgatgtgtgtttgagacatacttggtttattttacttcatcatctgcctctgtctaatttatgaccttcacctgaaatggaataaaagtaacactagattttgggtctgtctttaactggatctggtcttggccgccacttaggagtttgtatgacttttgacaagttcctggcctgttttctcaactgtaaaatgggctgaacaatgcactcctcccagatgtgttaaggagattttagaagtagtaggtttaagaatactccgagtgttagactacttccggtcttacttagtacagtaggtaggccttgaattacagtgctgtagtacataattatgtactcctttttcagtagttttttcccagtaataygccttcagtcagtgttggcactgtatttaatttgacattctgaacagtggtattccagagtatgtgcagtaaactcacctgcctacagaagagtgacccaaatcctgtgattaagaaagaaaagaggggccaggtgtggtggctcatgcctgtaatcccagcactttgggaggccaaagcgggcggatcacgaggtctggagttagagaccatcctggccaacatggtgaaacccygtctctactaaaaatacagaaaatgagccgggcatggtggcatgtgcctgtagtcccagctactcaggaggctaaggcaggagaatcacttggacccgggaggcggaggttgcagtgagcccagatcgtgccactgcactccaacctggtgacagagtgacagagtgacagagcgagactctgtctcaaaaaaaaaaaaaaaaaaaaaaggaaagaggaaagacatgatcttctttatgaagtgttttgtttctgaagctctccctgctgtttctactttttccgtgaaaaactctgtccttttgtcttctgccactggctttggttatgcactgggcattgatgtgaatccagtttccaaattggaaagtaatgaggtgttccatacagagaggcctgccttacatactgtgaggttggctattccgaggaccccctccatttggatctttgctttcttgctgcctttctctgtgtcagacgacaacagactcctttcttttctgcttggcgtctgcagaagatggtttcaggccttctttccctggcctagtcattttttagtacatgtcaggtgtgactcccagaagcactggactgtgttaaggcatagtagattcggctgccagaggtccctgtgcctgagcaggaagttcctgatggctcttcaagcttctacctcagcccttcgtgtatttaaagagaaggttgggatggattttcagggttgcaggcgttaaggaagacgactgaagtgaagcaaaacagctatgggaaagtgatcatcagcactgcagtctccaatttggtggtgttcctatgtgctgttaggaagggacatcttatctatcttgactgataaggaaacaaagtagaggtgcccattaaggaaaaaaaaaaaggagctcaaatgaactggtagccaatgccagcataggcggtgagcaggctttggtaaagagtgacaagctgctgctttgggcaagtctcaggtaatcaattttaggaataccttaggattccaagtggctcctggtcagggccagcaatcagaggggtgagaaggagctacagagatgtgcttagagccaggagacgtgggcctgcagggtacaggggtgtctgggaacctcgtggaacttgctgctacgttttatgcataaatatttcagggaggagggcctggagcattcactaagtttttttctgtttgttttgtttttttgagaccgagtctcactgtgtcgcccaagctggagtgcagtggcgcaacttcggctcgctgcaaccaacacctcccagactcaagcaattctcatgcctcacctttctgagtagttgggattacaggtgcgcactaccatgcccggctaatttttgtttttgtttttgtttttttgtggaaacggggttccattgtgttggccaggccaggatgccaaactcctgacatcaagcagtccacccgccttgacttcccaaagtgctgggattgcaggcatgagccaccgtgcttggccaaaattcactagattttgaaagcagttcttgacccatggcttaygtgaaagcaaatgcccgatcagggtgcagtggttgccctgtgctggagcattcactagggaaaaagaccgcagaccctgggaggctgcagaccctgtgacctgaatgctggatgctggagggaacctccagaccacttgtgaaatgtgaaagagaacagtggaatagaactgaaactgacgttccctgagcatgctgaaggcagactgtacagcccaatgtagacgcacaggaggagtgactgggtttggaatgaaatgtagaaaaggaagcaagctaaatcaccaggggaaacccttgagaccacaagaatgaagaggtcatggccctgtcattccagaggaggctggagcagctcttcaggaaatgtggatgtgcgaagaggacaagcctggctgagcctaaaaggggctcttcagactcttctggagacctgcacatggcactccccactgggactgtcaggtggtacctggaattgactctacagttgcttttgcccacagcacacacatgcttcctgagagccaaattcagacctgcttgccacagtggaagatttgtgagattatttgaatcccttatatctttggatagtggtagttcttggaataatatggaaagaatagtttcaggatttttttaaaagaaaagttaaagtcagtgattacagattcaagattcttataagactttgctctggataaaaatgtgagtagttgccaccattcttttcctctaccccatggctgccatttttcaagagtattrattcttcctttaagggagggtgaaggtaccaaagtggtctctccagcctttcagggcagaagctgtattccctggaggctttgtggtgtgaacagcacctgggctgggctcagtccttccccatggggaatgcctacatactcttcaactggctttttcggaaagcattgtctgagagcttgtgaacagaagggttggctggtgaagagcaaggcaagggggatgtctgcaagcccaggttaaaaggtaaaatgttctactcttgactggtgctccctcccttttcttgcacagaaaatacacttccacgcatttatccagagcttttccattctcctcaggccctcaaactccacytagcctcctttgtactttgcctcatgctcaactacatagattggggttctgtgatagtcatgctctcagcttccctcttcttcccttcagggtctcctgccctttccttccttccttcctccccaccaggctgggcttcctctgtccaggatggatggcctccatttggcccaagatcccttttgttctcttgtgtcttcagtcttccttcagtgctggtttctcttctttaccctacaactgccacacagccctctgttctgctcattccaaagcgctccttccctcctgttcttttggaagtggtcatccacactggttgcattgcctccgcttccgatgcccccacctatccttaacctggtgcttcccaggttttttcatgtcatgtcacacacagaagatgttgctgtttgagtagcacyggggacgtgtgcatgaggctgatgggaggccgaagctctggctgccctgggagtaagaagagctagagccctcctcacagcrtctccagaacccatttgcagtacatgccttaaacctttgcagtgtgactctgcccctgtcctatattttcctaaaatagccttcataaacaccaccagccagcaaatgctcaatgccaggagcttgtctttgttttctcctccttgacatccaagtggcattggacatacacttgcggtttagagagactctagggctggactgcctgggttcagttcccagctttgccagtctctagcagtgtaaccttgggcaaattccttaatttctctatgtcttagtttcctcaactgaagaagaggatagcaaaattcctacctcatagcattgttatgagaattaaatagttgccatatggagagtgtgaacaatgcctgtctcatagcaattgctctctgagtgccctgtgttgtctttgagtcccctttcttaaagctcttttctcctgcttttcctaacatcggtcactcctggtttttgtcctgtctctctcagctctcttgttttttctactgttttcattccctggcttctcttctctccttaacatgaaggaggtgttaggccaagcagccccacctcccccaaccgccctttcttccatagacccttccacctccaaacggcccaggcccacatccgaatgcctgccagatcccctcacctacatctctccctgaacctcagacctaggagtccccaaaatgttttaatgtcctttttttgttttaaaagtaatacatatttattatacaaaatacagaaaagtgaaaataataaaatgcacctcagtggtaatcccaccgctcggctggcaccaccactaaacttgggtatatctccttcaagcccagtggttctcagcctgggccagctttcccctagaagacatttggccatgtctggagacatttttgattatcaacttggtagggagaggtgctcctgacatccagtggatagaggccagggatactgctgaacattttataatatacagttcagccccctggccaacaaggaattattcagcccaacagtgccaagattgagaagcctgttctagacttctgtctctacatatgtgccccaaatggaaaagtcggaatgggtttcctctttctagcctcatcytgcttctccacctgtgttcactctttttgtcagtggccccacctcccccttctccctcactccacatccgagctgttcccaagcctgcagagtccctgtctgccacattgttggcagctctctcctctactactctcagtgtcgacattgatgcccactcaccgaaactaatgaaaaagcctccagcatgccttgcctgtgccactggtgtgcttggggaccgtccataggtgtccagtgcccattggattaattccacgccaggtggagactaagctccctgagggcagcagcttccatctctgattcatctgggtgcctagcctgaacctgccaccattccgagcacacagtcagtgctcaataaatctttgttgaatgtgtatggatgaatggctgaaggaagaaaaacctgaaaaacatttgtcctcacaattcccttgtaatctgtccatctttgcagatccttgatgaatggtttggccggaccatcatccgctcctgcaccaaacttagctacgagcatgcacagagcatgattgaaagcccaactgagaaaatccctgcgaaagagctgccccccatttccccagagcatagcagcgaggaggtacaccaggccgtcttgaatctccacggaattgccaagcagttacgccagcagcgctttgtggacggcgcacttcgtttggatcaggtcagtacgtgtttttttagtgtagccaacagatttgactcgtgcctgaacccagcgtggatgagcgcagcttggcaggcttagactcttccttccttctctttgctccaggcaccacactaaaatcatgttctctgaggccggcaggaactaactcccattcactctccaaatacaggatattatgcaaaatattctgtattttgtatgattccacaggtacacgaggcctaatgacatgagccaaggcaaagagtgggtctgtgtgggtggctctgaccaaaacccccagctggtcttccctggtaaggctgtgtccagtctgtgatcctcacctcaggtctctactcaaacctgttctttaatggaggcaagaataggagacacggaaatttaggaggcagctgaccagtatctgatacgaaggcttggaaaaaaagtatttcttcttatacctcatctcccaaaaaagagttatttgtttacaaattccagattaatatctgaagatgcagagaactgaggagactgtagaacagcggtcccattgttttgggcaccagggcccagtttcgtggaagacaatttttccacagaccaggggtaggggatggtttcrggatgaaacttccacttcagatcatcaggcattagttagattctcataaggaacatgtagcctagatcccttggatgcacagttcacaatcgagtttgagctcctatgagaatctaatgctgccactgacctgacaggaggcagagctcaggtggtcatactcactcactgctcacctcctgctgtgcggcctggttcctaacaggtcatggaccagtatggcccatggcccggcagttagggacccctgctgtagaacactggctattgaataacattggcctggattgttattgataactctgaagtctcacagccttgctggcagccctctgggacttaggtagctgtcacttaaacctgcttgaatttccatatctgagagtcggtaactgttaggacccaggatttcttttttcattgcttgtcagtatattacagaggagagactatgttttgtattatggactttttttctccttcatttatatttctcacccaaacactccttccttgcttgttgtgtgctctgggaagtttccacgtgtctgaaatgaggtgggtaggagcgtggaactgttcaccagaccgcctcatgcagacttctttcyctgagcctgtcagctgggagaaatctgaaaggccttgcaaagccttctgattgaagttctgattttatcctcccttttgcaacagacttgcacaaatgcttctaagcaggcattgcaaataggtgctgccctgggcctagggagaagtggctgccattgggaccagtggatgacctgtcctgcctgtgtgtggcagagtcagggtagcctctggagttctcctgctcctccttccccagcctgggctcgggcagcctgagcaggcctgtctgcgtgagaatgctgacagggagacaagaggcagagcggatgctgaagaagacagcagacatggtggaagagaaactaaaggcataggggattacagaatacctactttccttcctttaagaaatcattcatgggagtgtgaacacactctgtttctcatttacaggtggctgcctgattgtcaagtcccaggacactttacagttcttgcttcttagacttctgacctgcaccagcccctttgaaacccacctcctggttctctgtttctctttgtacatctccagtaatgtcctgctggccccctttgcagaagcctcttctgtccaccactttagggttggcattccctgggatctacccaacctttgttctttctgtatccatactcccaccctgagtgacctcttgtgattctaactactaactggatgctaacgagccaaaatctgtctctctatccctggcctccctcccccagctctagtccagccccacaatatctcagccagtgctcatccttccctctgtaaaacgcagtgatcagtgatgcagtaggtggcaccggctgtctagtactgccttctcccttggcccccaccaggggagtggtatgtgtattctcaaacctggctaggccagttgtacttgttgtaattatgcagtttaactaaatatcagggaaaccgatcaaatacgaacataaaaaagaagctgttgtttttataaaaactaagttaaatgttttggaaagacctggataaggataagtctttaaaaattcagttgtaaaacaggggataattacaaaatccattaagcattctgtattcaaattgcttcataaatgtctaaattctcattctttttaaagaaatcaaatggtaacgtatgaacagtgaattgtgagtgtagtttattcagaaaagactaygtagaattccggttagcattccctttttgaaagccttacatttacaaaaaattagtgaatgaatatacatctatataaattaaaacatttagtgatgggtttgtcttcctctgtttgattctcttctttttctaacttctagaataaccaaccaatggctgctgaagcacatcacaggaaagtttctgtcataacgttttagagactttaccccaccagtttgttgcaaagttcagttgaattaagtatatgaaatactgtaaaaactgtagaagactgtcaggtgatcccagctcatatgaggatagggtatagttgtcaaaatagaagaatgatctcagattattgatagataaagatctgttggcatgtctcagaatcagagtcttattgctgaaaatggctttggatatctgtctctattggccttctcaatttatcagttagagagctgaagcccctaaaggttaagtgagttgcttatatgcaagaaattcaaattgccctgtgttcactttgccttcatttacaccatgctgacttgagagagaaaaacattttccttttaagtggaaagaaaaccctccgaagtcctaattaggttccagttaattaaggtttgaaaataagggctttgcacccttggagttgattccttggttccccygaaaacaagtccatggaccccagctttggaaggaggagcacatcaatctcccacagcaaaggactctggtgaggtcatttataaatcagctaaatggccctattcagaagtcactgcatttgttctcctgcccctactgcctgccttgtcctcacaaaaatccatttttccttggtgcttttttgagtagcctactgtttggaattgttctctgatgctttgtttgcctcagaccactatgtccgtgcttttggtggcagtcctttaaaaaataaaaaataaagtccatttaagctagcctcaattagagatgagtctgtgcgagggggtaccatttatttacacatcatgcccttaggttcagaataagcgtgtaaaccacaagtttcacctttccaagaagtcagtttaccatgatgactttccgaatgaatgggggctgagtgtgcggcactagtatggtgattgtttgttgagttagggacctactagttcagaagtcatagcctcagaactgtagagcaacttgaccattgtgtatttgcagttggcaacttagaccggagctgcctarcccatgtctgagttagtgagcctcagccctcagggccacctagtctggccccagttccatgaaggccacctactagcagtcttgtttaccctagtgtgctgtcatatattagcatatgtatatactagttcatatcctagaactgtggtgggaaacagatagggaagcactgccttccaggtgggattacctgctccaaatgtctcctttacctacagttcaacctagttctaaagaggttctaggtacatgaatgactcctttgtttcattgcttagaaagcaaatgcagataccaaatgcattcttgtgctttttggttggatgggttgagtaataccccttccaggtagtttcttctatctccatgttttctgctgctaagttaattcttggacttaacatagatgtttgttttattttatttataacatatgtctctcatttctgaaaagggagctcccataacaggggcccagacttttttatgtttgtagtaaaaggaatcataatgctttataatcatatccaaatcttgagctttgggagaaggggaactgtgggaagtttgctctctgcctggttcttgctcagtgattcaggcccaactaatagactttgagagtaggggtcacagagtcccctggcacttctgcttcttgggacacgaagcctgttctcaggcaccttcccacttaggtcctttacagagactgcctgactataatgtgaagacaaggcctcaggcttcttagccatggcattcagaaaagataccaagggagggtggcaggtgccagaagaatcccattatgaaagtgtcttgggaatattgattgatttttaggaagctacacctactgcctgctggggttctctctctagcctcttcctcatcagtcaggtggcagtacccagaagccactctgtttgagggcttccatgtaaaataagcatgaggtttgcaggaagctgtgcaccatcaygggtcccctgacaggtggttaggtgatgtgagcagttccttctgggtcactgactttgggaattcagaggaagttgaagtagtggtggagaaaacctgatgttaccatcttcccaggcaaattactctcaactccaggagcttcacaactgcatcttgtataaatcctacttggtgcaattttgaaacccaaactgcaggcagtttctttgagtggacttgattgtaaagatagccttgttaatggaaattatttttaaataccctgggacccaagctgcagtggaatgctgttatgtatgaccttgacctgttccagcctttaaggcagggattgacggatattttctgtaaaggaccagatagtaaatggtttaggctttgtgggctgtgcagtctctgtctctgctactcaactctgctgttgtagtgtgaaaacaccagcgttgctttaaatggataaatgtggctgtgtttcaacaaaactttaagaacactgagatttgaattttatatagttttcacacatcacaaaatattgttcttcctttgattatttttcagccatttaaaaatgcataaaccagtcttagctcatgggtcatacaaaagcaggtttggcctgtggtccatactttgctgacctctgcttaaacagccagctagcaattcagccctgctatccagtgagcttttagcagctcatcatcacttcacagggaagccaggctgggtaatggagaacagtcgtgctaagttaactctcaggatggcttcatgcaattaggtaaattattcctttgattagtaccatgcttatccagtccaatgggaggtggggagtagaggaatgaatcagtttagcatcagttcccttattccatttacaggcaggtcgctttaattagcctgaagcaaaaggagcaggggttctcatttcccacttctgcaagctcagcagctcttcacagtcaggtcttcatcccacccaagcccacttgcagagatgctggctctgcctcgtgtaggtgcgctgaaggtggggactgctcatggcaaaatgtagcgctaaggaaactgtgtagcatttctcccccacactgcccccattgccaaatgtagctgtatgttttgttgaatctgtttctgttccttctctccaatacagtcgctttcaagaaatgagcattccagctctgctgtttaatatttgtaccatatatttgatccaaggtaggaaggatgggtacatttatcctgtctggctcttccttggtcttattatttatgttgtcacttaaacacacgaggaagctattgatcacagggttgagtatatttgtagaatcattctgttttcttagtcgtagagcttttctataaataatataggaaaataatgagagagccagcaggccacacagaaaatgtaaagtgatgtgacagaactctgcccatagtgcagtgagctgtcttggagaggaccagctcagtctcaggggttcagggaagattttccagcagaagtagtggggcattaggccttctaaaagacttgagggtctagccaggctgcaaaggcaagcagactgctggtacaagcatgggagggatgagaaatggcagattgttccagggtgtgtggtgtagggtgcrgagagagagaggagctagaggagacacaggctaggccttggagtctgtaggaatgaaccagggcagctatggaatgattttaaatatgtaagtgacatgagcagaactgggttttagaaagagcctcccaaaagtgaatagaatagaggaagtttataatccaagagagaaatgatgagggcctaacctgaggtagggaccgtggggtgagagaagatgatggaccgacccaagagagggaagaaaatcgacaagcctgtagcaaattgactctcttgattagatgcggaggggaggggcaggatcagaggctagggatcagggaatcaggtttccagtttaggcacatggtagtaccacctggggacaccaccgtggtggaggtcgagaagagagatgatgatttccataactaggcctctccggtcccctcttcttcctttaggaaggaagctttatcataaaagtaatatgttctcatgttagaaaatttagaaaatacaagaatataaagaaaaaatcataatcacctatagtcccatcacccagaaataaccatggttaatattttggtataattccttgtgcatttgccccttatcacttcatagcaggagggaagggtgtctagcataacatatgtatagtttttatttatattctgctcttaaatattacctaatgagtttttcctatgtcattaaaaaatcttctaaaacattataatacctacataatattctgtcatatgaatatactcttaaacattcagccactccccaattttgaatatttaaattagattctgatttttttggtactacaaataatagtaccatggccatggccatctgtgttcgtaaatctttgacctgatctctgattattttcttaggacagtcttagaactgtgatgacagcatcaaggatatggatatatttaagattaatactgaaacatattgccacattcccttccagagaggttgtaccaatttatactccttcagtagtatgtgaatcagggtaccttagatggaaacatmtgtcaggagttctctgcstacacrgagctctggcgcactcgcgcgckctctttwtctcgtcyctctctctctctctctctttctctctctctctctctctctctctctctctctctctctctgtctcgtctctctctctctctctctgtctctctcaggtgtctaggtctctgaaatatcccagtggttgtggtcttagattattccttcatctttcatattttattttcatgagctcctctctacaaagagctcaatgtgtcacagacacttctcgttgtgttacttattttaaaaagtacttacaagggtcctaaaatttaaaacagctgaaagaggtggttgacagtatcttgctaaactcttgctaatgctgagactggggaatgacccctgccccaagttaaggtcctttcctctcattagaatccttaaagaaacccattgtgtttgaagtggggctgasaactgttgttgcattctcagatcctcagagaacatttgtaacttcactagtcttttctcttacctcctgcgtgtattacctcttgggcattgtttgagttggtctgacatgaataattataaggaaatccagttgaaaacagaatcgctctgtataatctgtgctcccataagaattgctacacttctcttgaaagtagtagtaaacagtacaggaaggcttctgctagaagttcaaggcttccatttaaacattgacgacttactacttcaaccgtggagatagttctagagtcagcgaggcttgaagaatattagcctcctacattttcccagttaccaattttataataatattagcaaaattttcatttaaatttattcatctcatttataaagtaaatccacagccaagaatgtgtgccctcttagctgttcagcactcaggctatctaggacagcctccgtggaagagagtgggaggaggaagcagtgaggggtggaacaagctgcatccctgagctttggggagaacctgggagcgtgaatttcagccgtcgcgggtgttggaatctcccctttgagaaaaaggaagagacagagattgatttagttagtacactttatggaatcaaggaaagcaatccatggttatgcatcccaaggcatgaacaatagacaaacttgaaaacttgacctaattatatataagcaacactaattacagccacttatgtgtggtggccactatttctggcttgttcacgagtgcataaaaactaatatgtgtcattaagcatcagattcattctgttgagtggctcattattataaccctgaactcttcatgtgcttactctccttgtaggcaagtcacctagtcatttactcatcattttcaaaaattagaaggaatacaggttgcattattctggaagttgttaaaaatacagactcagaggtgatatccsaccagtacaggagggttgcttcctgtgtgttacaaatactgctcacagttctgtgaaggagccttaggcagcagaagacaaactttctaccctcaagctgcttcagcaatttgagaactgtatgtactttaaaaaacaccaataagataaaagcaagggcacagtctcttgaaacagggctgacagaatcgcaaacccgatggttatttggtgggatgggattagggaaagaaggccagtttggagggtgaagccgtgagccacactgtgatgaaagggaaaaggagctgaaaggtatggagtacccacgctgtgagaggtaagggatttatcccctcactcctctctctgagtgctgaacccactgagaaatagtcaygcatatcagactgagattattccatctattactgataccgtttgggttagaaggcaatctaacagaacagcccagaagtagttaatgtaaaaagaaactgattggagtgattagtgagagcagaaagtagccagagacagagagaaccatgtcctctatcagactggaactggggatggcccttgtgcgaccttctctgctaggtgcccttccagtgcagggtctgctggtgaggaccagtggctaatgcttctgctcttggtcagaacagccagtgcagatcctcagaagaactctgaaagcaaaattgactcccaccccacttctagaagcatttcacttgccttctggttctttctgcttgcctatatccaggctcatttcttatagatgaagaaagtcctacccccagcctactcctccaccttcaccctgtgaccttctccaccttcaccctgtgamcttctaggttcaccttttgaagctgaagattgaaactccaaatcctgctgcagagaagttcacatttgtttttcctaggcagggccagcccatccacccctccttcctagggttyccctgatactttatttatacctgttacctgtctttatcacactgtcacattgtcttgccattttccttttgcttccctgtctccttttctaagattgtgagtttcttaagggtaaagacaacatcttgtccacctttgtatccccagcccctgcccagtgctcatttttaaccaggcatttcaaggtctttaaacatcactatacatattgatcttttaaaaaagatgatggtagctgtgttcaggagagtggattgtagctctagaagagaggcgtgtttatataagaggattagatacatattatgagccagggcggttttctttccttgtgaatgaaagggctgggtgtttgattatttgctggggcatccagggtttagaacaaggtataatgaggactttctcaaggtggagttgcctgaacaggtgtgaggagccaggaaacttcggcacccccagggcctggcagtgcttctgaggcatcctgagcacttcggtgctcacttctcagaccaactgtgtccccttcaggggagcatggtggaaggggcactccaggggaagggaaagagaccccagtgtgccatgctgggaagggagatgctggcctgctggcatggaaaggtagggaggcaccaaacttcagaaggttctctagggtcagctaccattagctgttagtccctagmcccatgatggggatgaaagcgatttgtgtatcaaggtggctgtgcagtctaatgctccttctgcaaaattctgatcagaacctatttttgcttttaatggagataattcccataagacagaggttctgtgttagctgctgctggactgtctaagagaggaagataacttatatcccggttgaagttgaaagtgtgcccagatgactcaaacctaagtgcctcgcatctccaggggacatgaagtgagacatagggttcctgcactgaccaggtgataggaacttccaggggtgagcagaaccccagccagcaccccttgttcctctcagagatgtgaacctttcaagttaggggccttgacaaatggaacagaatttggctcctctaggaccctggcttttgggtaattatactcataattaggcagcacttggactctcctctttctgttcacgggacacactgcacgtccttgccctgcctccatgtcacactccacgtcactcatatgtgagccaaacagctacatcagagacgtggaattctttgacgttagtaaaacctgcattagggaaggggaacccttgcagctgacccttagatttaaaccatgactgcttcttgggacaggcccagtttatttcggttttcattgttcagtgagctggggctctgctgcgaaggccagaatccttttgttctgtttgctctctgtcctaaaggctgctgccagactgagtttccccaaatgctgctttccccttgccactcaagagcctgcagtcttattaagtaaatatcatggatcagtaagatttccaaaactgttttgaagacaagatataataagattgttgcctttttactttaccaagcaaggacattttctttaaaaagccagttaccatctactatcttcattattttataaatgaaaacattttagcatgaaaacaaagacgacataatttcacaatatggagcagtcttttacgttgacttggttgaacttggtggaaacctatttaattgtcctatctttttctcattttgtttgatctcaaaccagcctgtgagaacgactggatttctacatcaaatctaagtgccccagcctttgggggcctctgtcaggtagcctggtgtgggtgttccctgcttcccactaacccctatccttcctcctccctcctgccttgcctctgtagagtctgggcctccatttgatccccgcaaccctacacacctcactccctctagaagcctgctccaaatagacttcctcttcctccaatatctctggccccattccccatctctcccctaggtgcctggtgcggaacaccatcagctttcattcgttttgttttgcggttttctttctttactcctttttattttcctccctgcctgcattcttgactataactgttaagaaggcagatgtcttactgttgcttccttcagatttgtaaatctagcatggtgctgggcacagaagaggtatgcagtcctttagtggggcatcactcggctagctcagagctgttcacagtgatctgatgtcacctctgaggtccatgggtgcccagggacactgtgcccattgtattgtctacaaggtgaaaatgtggtactgctcttcctcaagaaactcccacatttttaaaagagtgatagtattgtagcacggtttgttttgctttataatacttcttgattcccttgttaagtgacatggcagatatttttagactaaagacaatttaagagctttaaattattttaattttataactttaaaatattccttttgatttacctttttaattgcccacatgtttttttagtatctaccaggtacaaggtaatctgctaggtgtccgggacaaagacaaggttagaacatggtcacagcactcagagtggcttactgtctcctggaagacgtagaggcagatgggacaggggtgcacaggaagagcctggacagcaggtgtgcacgtggctgctttcgtgttctacagtaacaccagctgtggtttgaaggggccactttcaaagtcagttagaaatgtgggaactgtttaaaagttttctcctagcaacttgctcttatactagaaatgctaaaaacaaattagaaattatttaattgctccttgaatcgtgacctcctggggtaaaggaaatctgccagagtagatggagatgagggcaacacccagggagggaatcccaacaggtttcttatctgcttgtcagcatgaggctggtagcctcctaaataagaagatgtgctaatgaatagcagagtctactggtttcgaagcacatttgaacagagagctgtgactgagctctgagaatgctggcttggccattaggcagtttgaaactgatttgctactgtcagtttcgacccgtaaataacagggcgctctcccctttcattctcctgcctgccacctgccagccaagctctcaggcttacccacctccctggtggctatgccagagcacagctgagctcacctcgaggggagcagagctcctatctttcctggaccctcctggctgcctagtttcctggctgggattcctgacccctggttgccaagactaccttgttggtccctgtggagttctgtcctgtttgcccagaggcctcgctcagacttgttcctttttggtacatgtttccactccagactgccccaggccccaactctcagctctcctgttgctaccagcttccagtcaatgactgtttatttgaacatctcctgygcaacaagagaatgtagtgatcaagagcatggaccctgggtcagactgcctgggttctgatccygactccctcacttagctgtgtgactctaactcttctgtgcctcagtttccttgtcagtgaaatggagagcataacagtacctacgttataggaatattaggttagatgagatgtacccgtaaaacacttggaacagtgcctgacacatagcaagcacccagcagggattagctgtgtggccagatggtgagaaagggcccacttctgtcttcacagaagagctactttaacacagaggtgaacttggaaggactacagtaaacgatggtggccatcagcagccatggcatggagacatcgcctcctttatgatacttccagtcgatctgggaggtgggggaggatttgaaatgtaaatgcaaggcagagtgagcctcattgccccctgcagggaagcagaacagtctggtttggctaggtccctgaagggagctccgtggtgagggatcagcctaggcatggtggtgctgagttccttaatggggtaagatttgggagcaaggaaggcaaagggatgcagctctgaacatcacgccccaagtcacgcaaatgtgagctgcaaagtatttcatcctgttttgataactaggccagagtgcatcacacccgctaacgttggtgcagctggaatgtttccagtttttgctgttataaataacactgcaattaatactcttatgcataaaattcaaaaatcattttggattatttccttaggagtacattcttaaaattactagattgaaggaaattaacttttttttctgtgctacttttctctttcttactaccttttattattttattataaaagtaatacatatttattttataaaaatttagaaattgaccaaaagcagccattgttcacctatcactgagtaataacatttttctatrtatcctaaggcgtgtacgtgtacatttttagagcttttgactttgagattacagtcacacattgcttaatgacagggacacattcagagaaatatgtcgttaartgattttgtcagtgtgcaacatcatagggtgtacttagactaacctagatgggatagcctacgacccacctaggctttgtggtttacacagttgctgctcctagtctacagacctgtacagcatgtgactgtgctgaatactccaggcagttggaacaagtgctatgtatttgtacacttaaacgtagaaaagcacaataaaaatatggtattctaatcttatgggaccactggcagatatggggcccatcgttggccaaaactttcttaatgcagcacatgactgaattttccagaaaggttagactaatttaggttttcctcagcaggaaacaatagtgcattgttactgcttctcactaaattgagagtttgttaatacgatagattggaaattgtgtttcattattgctttgactcgcatttgttttcctgcttgtgggctcaatcaactcttcaatcctctttttgccatttctgtgaaagggcacattttaccattttatatggtatcactagaatcttataataccttaagcactagacctaccagccacatttagctaaaagcacttttttccctgctaaggtatacttacatacagtaaaatccaccctttttagtgtacagttctgcaagctacacgtatagtcatgtaattgccaccacaatcaagatacagaacaattccatcaccccagaaaattcccacgtgcccctctgtagtcagttcctcttccctagcctcagcccctggcaaccattaacctgttttgcctctttatagttttgcctttccagaatgtcacacaaatggaatcattccgttggtagcattttaagtctggcctgtttcacttagcatgaaagtgcatttgagggtcgtccatgttgttgtgtgtatcagtggtcattcccttttgttgcagagtagtattctgttgtatagatataccacagtttgtttatccacttaccagttgaagaatatttggctagtttccagtttttggcaatatgaataatgctgtatttgcctacaggcttttgtatgaccattttttccattttacttgggtaaatatttggaataagattgctcggtcatatggttaagtgtatatttaacttcataaagaacttccagttttccaaagtgactataccactttgcattctcatcagcaattttttgtttgtttgtttgtttttgtttttgagatggagtttcgctcttgttgcccaggctggagtgcaatggtacaatcttggctcactgcaacctccgcctcctgggttcaagtgattctcctgcctcagcctcctgagtagttgggattataggcatgtgccaccacgcccagcttattttttgtatttaatagagatggggtttcaccatattggtcagtctggtctcaaactcctgacctcaggtgatctacccacctcggcctctcaaagtgctgggattacaggcgtgagccaccatggccagctgagaattctatttcttatgtgcttgtcagcacttggtattgtcagttttttatttgttttgttttttaggtgtggtgataggtgcatagtggtatttcattgtggttttaatttgaatttccctaatgacaaattctgttgagcatcttttcatatgtatacttgctgtctgcatatcttctttggtgaagtgtctgttcatatcttttgcccatttttaattgggttgtttggtttcttattactgagtttggagaattggtgtgtgtgtttgtttgtttgtttgtttgtttgtttgtttgttttttgagatagtcttgcactatcgcccaggctggagttcagtggtgcaatctcagctcactgcatcctctacctcctgggttcgagtgattctcctgcctcagcctcccaagtagctgggattacagacaaccaccaccacgcccggctaattattttatatttttagtagagatgaggtttcactatgttggccaggcttgtctcaaactcctgacctcgtgatctgtccacctcggcctcccaaagtgctgggattacaggcatgaactaccacgcctggcctggaaaggatttttaaaaatattttagatacaaatcctctaccaggtttgtgatttgcaaatactttctcctagtctttggcttgtcatttcatttcttctctctccattctctctggcttatcttttcctgtcttttgaaaagcagaaatttttcattgttatgaagtccaatttatcaatctattttatggattgtgcttttggtgtcatatctaagaaacctttgactaacccaaggtcagaaagattttcatctgttttcttctgaaggttttataattttaggatttacattttagtttcttccttttttaaaacatattgcccaggcctagaagtttcttttggaaaacagttgcacctgagaagatttgggatggagttggtcctaggagccttgccaggcatgatgctctctgtgagccatctgaaaaggaggtgtgtgccttagaagttgcccgaggggtggcttttaaacagataccaggcttctctggcttaagatttggcatcaaactgaagattgtatcatttgaaaagagggtatgggatgattagagaaaaacctccaaactttctagataagtccttctaactgttgcacaaagttgaaatgaagaatggtgccaaacacaggactttgccgattacatgtgaacacccatgtcagtgactcacccaatcatgctttaatctcataactgagaggctttaaaaaattatagtcarcaaggcagcttgctagttatgactgccattggaatggagttttcctcagaacagctggagtgtaatgtggtgggaagaaagcctggtgtgggtgagagaccaaggattgcttgcctgggaaggatgtgcagctaatgtttgatggaaatctgtgagatgaccaacctcagccaagctacatagaggccctccatacactgcagccgaagtgctcagaaaacaacaatgataattggcactgtatcaccgcaagagagataaaacacagctctgtcttcaagaaatgcatggtccactctgtgatccatgctaggttgtagaagctggcagaagattccagttccagtaaggcaaggcagttgagagcagcctggaaatggcttctccaagaatgtcccaggcagagcattgccrtgggttggtttgttctggaatgtacaggccattggtgtggctgtgtcagaggaagggctcccagtggtggtgggaaatgttggggatgtaaccagggctgatctggaggaacttgtttgctctgccttgaaatatgagtgttttcggctgggcacggtggctcacacctataacccagcactttgggaggccgaggygggtggatcacaaggtcaggagatcgagaccatcctggctaacatggtgaaaccccatctctactaaaaatacaaaaaattagccgggcgtggtggcgggcgcctgtggtcccagctatttgggaggctgaggcaggagaagggcgtgaacccgggaggcggagcttgcagtgagccgagatggcgccactgcacttcagcctgggtgacagagcaagactctgtctcaaaaagaaaaaaagaaatatgaatgttttcttgaattcaacttggtgctgttgaagcattttacatataggagttgtgggatgggacctcttttttagaaagatctctttggcagctctgtagagaatgagttggaaggggtcaaggtgtagacatcaaggaagccagttagatggctgtggctgtatgcaggtgaggccacacagctgacaggagggaacagatgagagaagtggaatcagaaccacaaaagggaggggggacacctggatatgcccaggtttctgacaggcaggaagacgtgccacccaggagcatcatcggcaccacccaggggaggaagagcaggcattgggtggagaccctccaggcttgaggtgcgtgagctgcccacttaaagacgcttgccaggtggctggaccggaagtctgctgctcctcttctaccttgccacaggctgctgcctctgagttaaagagacatgggaagcatcgggattgctcatacctcccaaagtacagcaggaaggactagaagcaatatgaaatctaattggcaagaccacggtgagcacacaggcacttaggagcagcacgtggcacccatgaaagcctccatcccctgacagtgagcccagaggctactgtggagcaggaggaaaccagccgtccttcctccttgcttgcaccctccctcctcacctcctactctctgtctttccagctgagcccttctcgtttatttaaaaaaaaaaaaaaaaaaaaaaaagggaattcactcccagtccttttgaaacccaacatgtcagtgatagatgagggcgtattctgtaacttcaaaggagaaaagttgagtgagtgaatgtgggccagaggagttgaaaagtccaagggaacaggagacccatggggtgaccccaccatcaggaggagtgccccccatcccacccctgctggtgccatgcagaggcacagacaatgccactttcaataaatcatgaaggattctgaatgcctggttttgtcccattttcaatgggccttgggcatattgctcagatatagccagccatttgtgcaaggttcccagctactcaaaggctcaaagtcgagtgctctttccactatataatggagtcttcacatatgtgattttgggggagatgttttcagatttccatagctagtcatagtaaagatgacctcgtgggcagttcaggccattgtccccttctcacatccagcctttgagtaaggctgcgctttcaggagtatccatgcagcacctaattcaatcacacatctgacccctgcctctctttcgcactggccccttctctgtgctyagtgtgctgctgggggcctctgcacaaacccggctgttctggaggcgtcctgtgctaagcagagagcacttggccattttccccactttctgaattcagggccccctggtgaatctggcgtggggatggctgcctgttctcatgaggctgcgcacatgaaggcgcctgttggaagcgccttttaagaatccccaggttgtttccatcctggagtcttgcaaagaaagaggaagaataacctggggtcatttaagggctggcatggtcatttccttaatcatctgtgaccactgagagccttattttctataaagaagcacagaggcttctttggctttgctttagtaacaacaaacagctagaatttattgagagcctgcagtttgccaagtgctttcacacattcgatcatttaatcctcaagccttttacccttgtttagagatgaggaaactgagacttgagcttaaacacttgtcaaaactcacatagctagaggtggcagaactaggatggaatcatttctctttttatttgaggcagggtcttgctctgctgcccgggctggagtgcagtggcatgaacatggctcactgcagtcctcctaggctcgagtgatcctcccaccycagcctcctgagtagctgggattataggcacgtgtcttcatgctcagctaatttttttgagtttagtagagataaagtcttaccgtgttgcccaggctggtctccaactcctgggctcaggcagtccttctgcctctgcacccccatagtgttggaactacaggtgttgtgagcgactgggccaggactaggcccagtctatttcttattctgcttactttttcatttctctcggtagatgttgatgttgttttatattcttctaaaaatctaaaaaatggatcaagtcctgaccttaggattatttgaagagctatttaaaatgctgtatgattccatttaggtaacatcctcaaaatgacagatttatagagaaggagaacaggtaggtagttgccaggagctagggatggcggggggagcagagggtggcccaagggagagctgtgtaaggatgggacagtctgtatgtagattgccatggcagttacacaaatgtacgtgtgtgaccaaaatggcataaaactagacacacccattatgccaatgtcagtttcctgcgtttgatattgtgctataattatgtaagatggaaccttgggtggaaattggagatgggcacgtggaacctttctatactacctttgcaatttcctgaagctataattatctcagaataaaaagtgggttgttttttttttaattcctctgtgtgcaacaccagcattgcccccaggaaatagccaggtctcagttcaggggctgcttgccatcagaaagcaagccacatcacacagtcaaagttggcctagaagtggggcacaaactagaagagggtccaggttttatcgcctgtcagatgtgagcttaggctctctcgacttatgggaaagcactgaactgagagtcagggcccccgggctcaagtatcagggctgcagttgtgtgacccagagcaagcttctcaacttctgtgagcctccagcttcccagctgtaaagtaggcatggtaactgcacccaccctgtgagtctggcagaatgtgttgatgtgcttagtatcatcttcgataccacgatcaatgttattattttatcttttcccaattttactcccaactttgcagtcagaccaatctcttgtgtattcatggaacattgaatattcattcttattttctctgcttttgatcatttattccttcaacaattattattgagcacctgttttgttgaaaattctggaaggcactagggatacattgatggacatgccccatgtggtctttgccccgggagagctaaaggtctgtttttttccccatcacctggaatctctcctgagtgcatccatcgttcagatccttgctgtcctgccagacctgaggcctcatctacaccatgcaggcccctctaccagatcattctctaagctccctcagtattagaggcagtgcagctcagtcatctttgccaacctttatcctgaacctcccatgggacctggcatggagctgcrcaccacagagagaatgcttagcaggtgcttgcccacagaactgtgaaaggagagcccgaaggagacttagacaggagccttttgaggctttcattttacagatgaagtcctgaataggggccctggactaaataatagraagtggctataagggtccccaacccatttttaataggataatgctagttcttatattgatcttaatttttgttgttgttttgggttttttttctttatttctgttctgcagtttttggactagctgactgacatttcctcttttaaccttttacagaccctgaaagaagctctagttcaggtcttattactacttagctgtgtgactgggccacaactgggggcaggttcattgaattgaaaaggtgaagccaacctatctctcacctgctctccctgagtggactcacctagcacctgcaggctccaagcttgacattgcctggagggagcccacccaggcatccccttcctccagtccagcctctccacctgcaactgggtgggtcagtctactgagctctcacctgattcttcagcgcccaccttaattgacagtgagccttgaggaggctgacattcttaatgccatttgcagttctctgttagaatctagagaaggggaaaggtaaattgttgcaacttgcagcctccaacacagtgtccctgtttgtgggagaagaaacaggaagtgtggcccagtaggaaatgccaagactttagagccgtatgggtttgagttccatttccaggttggccggggttgatttatgtattgccagaccttgggcaggtcagttacttaacctccctgagcctcagttccctcacctttaagataggagcagtgatacctggacacttgttcctggcacagtctctggttgcatgtggaacctgtgattcctactgcttatcacggggccctgcattgccttaacttaaagcctttgtggggatcacaaagagtaaacttacactggggtttctctacagggacttaaaatctagttgggacaatatgattgttaaacaagtacacagctagagacatgtttcaacttgagaataactgagaagaatcaggccatgatagaagcaattttcatgtatccagactgtcagaagccagccctctgccatgctccaacaggctggggtggcctcttccttccccaggcagagattaatggacaagttgttactagtgctgaggttctgggcagcttccttgtggaggcacatctgttgacccagcagggccttggaagctttttttcagtcgtgagcttcatctagtggcatagggcctccctgatgctggtgctctggagctagcgtcactgggtcataaaatcagggctgccttgattttatcaagggctgaccccgtgtcagcacagccacaggagagcagtgtagtggtagtggggctgctgaggcagacagcaaggctttgaagcattgtatcttcctgctgcggcccaaggagtcctacagaaagcaagccacagagagagtgtttcccagatactgctcaggtaaagaaattggaccttattgttgtagaaattactcaggttttagagtgatcacatttggaratattgagtcccaatcagcttgttccagcatgtcatgttttgaattctgatctcaactcattatcaggaataacctctggccttactgtataatacatcargaacatcattgagtttccgctatagctaggcactgttattatctcttttttacataggaggcacctaaggtaaaagagattacatactaacaggaagtaaagctgggattcaaaacccagcagcctaaagaggctgtaccctttacttctctactaagcagccccctgttattggggttttatttttgagatagagtgtcactcttgcccaggctggagtgcagtggcacaatcttggctcactgtaacctctgccttccaggttcaagagatttcctgcctcagcctcctgagtagctgggattacaggcgtgagccaccgcgcctggcctgtcattggttgttttcataggtagaagtgttcacaagcagaagttccttccttttgtcaaaggtgtttccctggcagaaaggtggaagcaagagcataaactctgtctgacaggcagaaaggtagactagaagatctagactagactaaaaagttagactttgagatcctctgtctgtcccctgagttctagccctacagcctctagagagattacatggcagctagagggaaaacaagtttctgcttaatgaaaacattcccctaagattattgtgaaacttatttttttaacatttaacattgtgtctagtttcttaaatgattttcaactgtgagattatccaaggagttttttattaccaaagctaatttttcatagttagcattacaaatagaaagtttgttcattttccttctttttatcctttccttccccccgcgcccccccccccccccgcttttattacatagagacagggcctcactctgttgccaggctagagtgcaatggcgtgatcatagctcagtgccgcctcaaatttctgggcttaaatgaccctcccacttcagcctcctgagtagctgggaccacaggtgcatgcctgtgctgatttttaaatgttttgtagagacggaggtctcgctctgttgcccaggctgctctcaaactcatakcctccagcagtccttccatctcagctcccaaagtgctgtgattacagacgtgagccacctcacccagccccattttccttcttaatggatcctggcccttccaaataccctccatttggtctttgtatttcatattaacagtaaacttttgtctgtactgttttaaacttcacaatacgcgtgggttctttagtttttaccacagttaaaacagcatctcttagactgatatgtcattctgtaaagaaatagactatctaagacacaactaattatcttggaataggaacttcaggtaaccccaggtatgggccccataggtgtcccttccagactgttctgagcgaccaattaagagatgtcagatcaatgggcattttgtggctggatggtagtggaaagtgattcttctaccaggaggtgctgctaaccccattgttgcaggttgaagccagggtgtaggagcaggggagcaggcagctggggaaggaggtagattggctgccccaggtccagaagggacctgagatggcagtgtagttctggaatatgttatccagatatttggccttgtctgggaggaaggaagcagaattagcacggaatcaagtcctgaactttgatgggagctcttagctgcgtaagacagccttatgcaggagaactcttcactgccacttggttctcattaaaacatctgaagatgtgagcactggctcttctgaaatcgtagagcgtctcttctaactgatatagcaggggcttattatgagtgctttcttccagcaaacctagaaagtgtctcacattcacccgtaaaacaaaccatgaggacaaccatagaggaactcagctctgtttaacaggtagaaagtctaggaccatcggaaccccaccaccaaccccagaatctgggagagaacagagacaaggtcagagctgctggctccccgcttggggttatataactccccgactcctcaagtccctggaaactgaggccaattccctggaagatcattctgttctctgctgttttttcaagaatacagccagcttgatcactggctctgagtattgtatgggaatgtcccgttttcttttttttccatgaactgaatgcctaccattatggtcattgtttcatcagtctgtgtttaaacttgcctggatctcatatttttatgtatgtttggcttatattttgaagaactttgctttgtttatatataccctcatctgtttccaaaaagattttgagaggacttacaacaaaggaaatgaacagtgagctgcatttaaataatagaaagacagaaaatcagaatgaaggagaggagtgtcagaaagaatttgacatctgtaagggtgggcacagctcctgtgactgggcttcatgttttctgatttcaatatcacagatgcagtcgtcctgcttggtggcgtgggggagggagagtttacaaggttatctcttacaacaaaccccatcgaacattgagaattatttttcttagcacctaaaagcagcttctcacttaaggcttgatattggaaatattcagtgttacaacagtggacagcgtttgcattttgggcaaatgaggaaagagttttttgttttttgttttttttttttggagacttgtccaggccttgcccagttactggcccgtgttcttgcctctctcatgtctgagatcgcagtggcaccatcttggctcactgcaacctccgcctcctgggttcaagcgattctcctgcctcagyctcccgagtagctgggattacaagtgcccgccaccacgcccagctaatttttgtatttttagtagagatggggtttcaccatgttggccaggctgatcttgaactcctgacttcaggtgatccacctgccttggcctcccaaagtgatgggattataggcatgagccaccgcgcccagccaggaaagagattttataaggctatttcttaagacaaaatctggtgaaaatagaggaacatactaacccacccttgaggaaggcaggtgctagagagccaagctcatatgatctacacacataactatcctctatcctaatctgattccaggataaagtgtagaccatctctgagtgggtggagagcctgtcgcttgggctacttctgtttcccttccctttgctgagtgtttgaccagggctgtgtagctgtgggaggcttccacarggtctgcagcttgggtaggaccactgctgagggcaggaccacaagctttatttagaaagcagatagataggtaacagaattagtatattctatatgcaaggaaatctagatagcatctttcccaggtgcacaaccatctctgtgcattggaaggggtgatatgcagttcctgcagtcagcactggcactttcctgtggaagcagctttgggtaactgcattccttcgacagtagttggcctgaggcccctgagctctgagcacaaatggtttgataaggtgatgttctaacgcagtcatcctctttggccatgaaaatcctcaaaaattctccagctttgattaggatgagcagattggctgcactctctctccagctggctgcatgtgacacacgcagacttgctcatcatgctttgtattcactgttgcatattgctcaggcacgtgagaggcaagaacatggcccactaactgggcaggtcctgatcgggaagctgctgaggtaaaggtgctcctgttctgctaaaggagaccctgggatcagggacgagctcttccytgctgggctcacccagtaatacaggtcgtgtgggacagtggtgagccgaactctcctgccatagacgtgctggtgagcaatggagtcaccttcagaagaggaggcggcttgacctgggggcatgaatgctaccaccaggcccttttctcctgggactggctccttcctacagagcaaccctccctgtgggttgaccatagctccaaagacagacgttttttcttctcagaaagtaaaacctcagcattgaagaatccttgtcctgtcatttttaaccttaatgagaacagagcaagcctctggaacaaggtgcagcgcagtcaggagaagtggctttaagtgaaaacacagctgtggggtttacagacggcgctgcagggaggcatcatccaatgggagcggccagcctcgctatagactttccaacactaatgaatcgggaactccatgctgaayagggtttagtttgatgggtccctgtgccagcagaaggatgtatttttcttgaaagaccaaggtgccagaaatctccatgattacgttactggagaaaggttcttttttgtggtttgtgaagttgagcgtcaggactgcaggattctcttgctctttctcactcttattttttccaggtcagaaccagagcttggggtggggaggaaaatcctgctgaatgagcaagttctttcttaaaaagctctctccaagtccaaaaagacttcagtggacttaggagaaagaaatttaatacattgccatagaatcgtcattaaccaagttaaagcaaagtccacagcatctttgtcttataaaagaaagcaaaaaggagatggaaaaaaagaaattatacttaggaaatccaaaccaaacagtgaacactaaagaagaaaaactcaagatcatctctgaaaatgtgattttcttctaatcagatttttctattaaaaaccaaggctgcaggtagaagtaacttttctgatcttttaaattctgccataaatggcatagctgaaatgtttgaactgtgctaggatttaccactttcagcttaaggaagagttggacaccctgtaagacccagtggactatgaggggaagagtcaaccgtggagaggctggaggcttcccaggccggccttgacctgtgtttgaaccttggtcctaataactagcagattgaagcaaattcacaggcctcctggagaacccatgttggtttgaactggagcaatcctggccaaataactcacactgtgctcttaccagtgacctccctcattacacccctgtgaggggagctctgagctagcatcctaggttcccctgctcattcatggagtagtctgcagagaaagctgaatggctctgtcctgctggggctgtaagtaccttccaggagacgggcagagagagacttggttgtccatgagaggtcatcttggaggtattgcgaacaaaacagggaattcctaaacttttaaactcatttttttgcccttccaaggtcaggccaggacttttccaaagcctcgaaacctctgatgtggcgtcttccctaactgatggagtttagtgcctagtggcccttgcatgacgttctccaagtatggctgtttgacaaagctgcctgtgtgcctgggccagccaaagatctacctgttcagtagcccagagggacccctggcatgcttgcctagccacactttcctgtcttgtctcgtcacgcttctggttattcttatgaatgtagcctggcccactgtcttcaccaggctgggatccaaaataaggtcacatatcttttaatagttacattaaaagactcagtggacacccctccttctgcttayctaggacattgtttctgcccctaagttctccctaaagtgccatccccaagcagcaataatctgagcagcctgaggaagctgtacatagtcctcagtcactcattcttgttacccacctgttgccatctgctgggagggtcgccttgctgtctccattgtcatcctacccagaaagctcagacgggcggaaggagggcctctcaaaggcccaacaaccccaacagggcctgcatcccatgttcccacagagtctggggaagattctcctctcccaagggtcctagtcccttcaactcatccaggctcctagagctcacccacgcgattctcttaaggccagtttcctgggggccccaccctagagcaggaggcctaggtccaaaggggacccagtggtagtctcatgctctggccgcctggagcctgccctcctgtgtgacctcakcctgagcccctgaaaggagaaggctctcccattttctgccctggggagactgccctttccttgttgggatgaaagccttgcctctaactgaacccttttgaaggcttccgccctctgctggtggaagctgacagagcaaccttgttgttgcctcttgggtccttcacttccttccctcttcactcaataccaggaccgttgtgcagttggaaactgtccacccagggaagcctgttcctggggaaaggattgggtagtggtgagctctcctgcttgacatggcagctgcctctggagagagaaagaccttgtgaagtctgagtggctgccattcttgcaggctgacttcccaagctgagctgctctgtgggtggtccctgcaggtggtgattagggccagagcgctgctgctgcctggttccttgccgtgcctgatagctaggaagtatctagtgagcattgttgagggaaggagcttgtgcctcttgagggtgctgacaagatggcaacacctgaacactgagagtgtctgagccacagctggtcatctggtggcaattactgagcaggaggcagacgtgaggcagaatttatttactgaagaaaaagaaattattttgaaggaatgacattggacacctgctgtgacagtgataaggacaccgattgcccaggagacctggtgaagccacccttggattctctgggggaaatacctctggcattccagcgaaggggaaaacaaaagatcagggccactttgacagaggagggacaggcaggaagggctcccctggaagcaggtggagcatgaggaagggcacagaggcctaagagagcctggtctgctctgaacccctcagggaagtggaccgcgtcggggagtgcatggagctctgcaggagctggagagtgacccttccctgtcctgtaagactccttctgtctgtcctgagggcctccctggctggcacaccctcccgagcacaggcccacctctttccattgctctgttactgtccatatttgttcatgtgaacaaccaaccttcagcgagcctgggctgtgttgaattcactttcatatctccaaaagcaggaagccgtcaaaggtactaaagagggaagtgttaccaggtttatgcttcaggaaaataacagctatgttctagagagcggattaggagaacatagccaagggagtaggaagatacattgtgtgtcagtgtccttaggagaagcatgagcacaaattacacaagggcagtagagggcccggaggtggcagggaccaggcctgcctccaccaaggcactggctgcccactttgtcagtctttggagtctgtgtcctccatgatttggctcccttctcaggctggtggcaagctggttgcagcagttctggcccgcrtgaccagaagcactcaacaagcatcccctcgtacctcattggcctcggttgggtcacacatccattcctgaaccagtttctagggccaggaaatgccatgccctgattggcttaggtttcttacctcagagctgtcacgtccagccctggagctagaggttgggtctgcttccccccggaccccctagaatggggagcaggacaggggaatgaatagctgagtgaaagtaggccatccttagcaaggaggaaatgcctgctagctatgcatccgtgtttgctacaggaaccagatggacccattcattcatcttttgaaccttgtacatggtaagcacctacacaccagtagggacatactttgtggaaacagcataccatcatcctgggtgaatttcagtcctcatgaaggatcccctacccttatccctacccagacccttggctctccattccttgacttctttttggatcttgtttttgaccagccatctccaaggtcagacacacagcctgctctctgaccatggcctcagccccttcaactcccttatccagtgactcccacactcctctccttgacctctcagacactacacccagtgattagcaacatggaccatacttcagctgtgccacttacttggtaatttgggccaaatacttaataaactctcctgtaacatagaggtaggaaccggctttgcagggctcttgcgaggattaaataagatcagcgtgagagatgcttaggacagaggacgtgcttaataaatattagctccattccagacatctgtcacccagccgcttccttctgttttcttcccatcagcctctttcccatttatttccttcctgttcccccgtaggtctcctggtccatatgctgccgtattgtatctccactcccttacccccttattcttccctcataccttcctggcagatattcagcttggaccaacctaactttcttcacactaatgtctaagttgctagaaaaaaattaacagtgggacagatgcttgctacagtaacttcagatcctgtggcctccgaatactccctggcaatactccctggcaatccttatgctctgcccaggtcaactgtttttcctattctccaaaggagcaatttcaaaccttcatcactttcctcaaactccttcccccatcacactccccattctttgcagataatttgtgtcctaattttcaggaaagaacctaaaaaatcatactaggacattctaaatcccccctgcccaatccacagatcttactgttatcgctgcccatcttccttcctcttgcagccaagaaaggggttccacttttgtgttggatccaatcccttgtcatctcagagaccttgaatctgcagttctctctgtctctcttaatgtcttctactccaccatccatagtgccttcttcctgtcagcattgaaacaagtctctgtcatctttaaatatactcccttcaaacaccttcagtacactctcacatcctctcatcctttcccattccatttcatgaatcttgcctcttccctagcactgtctaatttgctaaaagagttgtattcactcatgattgccatttcctggctttctattcgtttttcaacctgtcaccccgatctctgcccccagcactccctgcaagagtcttttctgatagatccaaaggattccttgtttgggaatgttctctgttacttgacctcttagaaggatttaacgctgctgactatgccctccttgaggcatgttctctctttggcttctataatgtcagaactcagaactccatagccactccccagtttctgttgtccagctcttaaatacaggtgtttctcaggattctatccagggctctcttatcccttcaggttacaatcttgcttataaacttcagaactgtatgttcagcagcctactggccatctccactagatgcctcccaggtatgttagaatccgcaatctcagattgaactcaaactcttctcccaaacctgtttttcttccttgtcagggtgagtagcaatagcatctgccctgcagcctgagccagagaatcctgaacacttgttgactcttccctctctcactgactttatctccagaccatcaccaagtcctgtaatgctggtgaggtgaaaggagcatggattttggttaaaattccagttctaattgtggtttgctcaaactacttaatctttctcagcctcaagttcctcatctgtttaaaggaaatagcaatacctaatttaagtggtttttgtcaggataaaggaaagcctttacttggtaggtgatatggtttggctctgtgtccccactcaaatctcaccttgaattttagtaatccctcatgttgtgggagggacccagtgggaagtaattgaattatgggggtgggctttccctgtgctgttctcgtggtagtgaataagcctcacaggatctgatggttttgtaaatgggagtttccctgcacaagccctcttgcctctcgccacgtaagacttgcctttgcttctcctttgccttccaccatgattgtgaggcctccccagccatgtggaactgtgagtccattaaacctctttcctttataaattacccagtctcaggtatgtatttattagcagtgtgagaacagamtaatacagtaggcattcaataaatgtgagtcctccatttagtaaacatgactgctcttctgttccagtcctctctctcccctaccctatcaccacctctgctgacttgccttattgttgagttggtgtgaacatagtttcctgactttgagactccccctgcaattagatttcccatagttccttcatgactaaggactaagtgctggtcaccacagcattgtgtggggtctgggaggcagatgccagatgttactggcacatarttagatgtgtatgtacttccaagtcttgtctcttagctgtctccaacgccacygcacctccgtaagccaaatcctcatcatctcattgggctactgcagcagccccctctaaggcatttctctatgccctctctcacttcagcccttctctacctgaccatcagagctggtctttctgccctgaaacctgccatggcttctctcttctggtgaagtgaagttcacacactcctacgtgcagcctgccttgccagctcatctcccttgcatgcctgtgccagcccagtggctaagtcctctctgacccagtgacacctttcatgataagggagcaagaaggatgcttagatactgattgagaagctgaatactatacttcttgggtctagtggctagtaggacaggcataagacactcagctaagaccagctgtccagaaaactgggaccaaaagacacaggaaacccaggagggcttagaattctgtaagaatcaccagtcataaaataaggaggaaaacctattagtcttctgtcaaagcartgtatgcttatgaagaatttggaaaatgcaaagaaagtaatcacctggaacctctcagctagtgataggcactgttgctgtttaggtatgttccttccaagtcttttttttttttttttttgagacagactctcgctatgtcgcccaggctggaatgcagtggcaaaatctgggctcactgcaacctccacccsccaggttcaaacgattctcgtgtctcagcctcctgagtagctgggactacaggtgcgtgccaccacacccagctaattttttgtattttactagagatggggttttaccatgttgcccaggctggtctcctgagctcaggcaatccacccgcctcggcctcccaaagtgctaggattataggcatgagccaccacatctggcctcagtctttcttctaggaagtctttgtccttttttacatagtcttcatggtacactgtataatcaagtgtgcatcctgctttatctcatctgtccaacctatttttcctgggttagtaaaaattctccctaagccatgtaacaactacctgctattccatgtgtgactatagcatagtttgtttaaccttttgccactgctggactttttagtctttccaataaataacactggggggaacagttttgcaaataaaacttttcttcctacatttctgatratttttctaagctataaattcataacttaaatcactgagtcaaatcatatgaaaatttctaagcaatgcagactcaaaatggacagaatgaatatagacctgacctcagctgcaaagagagaggtaaagagaaaagggttgtaactaatagatkcttttaaaattatgttttacttcacaaaggagagggctgggaagattcaagtggtgctctgtagggcaaacatgcctttgacttgaagttctggcttcatgatggtcgagaagggcttgtttctgcttttgtgttttcatctgggtcagttagaggacaaaccattcctgtgagttcctttcccactaaggaagagaaaaatcgtccagtatctaatgatgcagatcattagctgtgttcgcagccttgtagttaaaaaaaaaattataataatgtatcctcctaatgtgcagttaattttagttaaaatctccctagtgctttaaaaacccagtgaatttataaacatagtagttggcttgcatttggaatgttaaagctgtcataaccaactggctctagcagggcatgctgcacctccttgagctctgttggaagttcagcactcacctgagcactgccctctggaatccagaaagaaaccaagactttcccagagttcctgttcctgatcttccataactgaagaaagctaatgagtgtctcaaagttaacatgtccaaagtcaaacctttgactccctatcagtccccaaattcagtctttctctcagcagtggatcagccacctgactggtgattcagattcaaaatcttgaaccgtccttgagttcttcctttctttccttaccactgccaacatcaaatccaccagcatatcttgttgattcgacttctaaaatgtacctcaaattgtccatttctctcactctatcccagcccccctggccgctcccctgactgtagtggctgcctcctgcaggatgttgcttctgctctgtggtctgtggtctgcagtctgcactgtagccagaggggtcttgccaaaatagaattctgattacctcatctactccttctttttcttttcttcgctgttaaggtaaaggccaaaaattccagtgtggccaagaaggtcctccccagagtcacccaccatgtccctggatctatcagcgcccaacttcaccagccatcctgcagctcctgccccagggcttctgcactcactgtgctctctcctcaggagaaccctctccactccccatccctcctcctcctgattcagaggagccttcccttctacccattctatccaggtcaggctcttcactttcatggaaacatggggatttttttcttgcttcagagagcctattttaatttgaagttctacacatatatgcacattcattggtgtgatcatttgattgctgtcagtcttctctgctagacggtaagacccatgaaaagagtctgctgtcactgttctttccctctcagctagctcatgtctagcacaagataggtgcttaataaacgtattggttgcatgctgaatgaacaagtagagtcttgctgacagtcatcattgatgatggggtccttgtaaggtgtgggctcttcccagagtgggcaggcccaggttctccacaacacattgacttgagggagtgtgacttcgtttgattttatttttttcatttcagctattggaatgaatagagcatgctgcctaaaacttctttttctcttctctctctcttcagctaaagcttgctttcactctggaccacgagaccggattgcctcaaggatgtcatatctatgagtaccgcgagagcaacaagtaagccactcagtgggaaagagtgtcrcttcacatgtgtgcagcagtggtgcctgtgggctttctgacactgagcttccattgctaagtggttgtcaggaagggaatacaccttttactactatactagaaaatagctggcacagaaatagtcctcttgtaagatctctttgcccctaagtatagaacttggagcacttgcagaggagcagttgtggtgtgttagaagtagatgctgaagcagaccttctttcaaggctgcagatgtcccccagaccctccccactcttggtctccagtcatgtgcctgcttgtttggttcactgtgtgactttggctttgttgtagttctcagtcactatctgcctatacttaggtttatgggttttgttgtgattatctaccttgtaaattttatattaatggttgggagatttccgggtacttacagagatttaaattggtgcccttgttggaaaggtggcaccttgcatactttcatagcacctcctttccacatcatagactgctccttttttttttttttttttttgagacagggtcttgctctgtcacctgggctagagtgcagtgatagaatcgtggctcactgcagcccraaactccygggctcaagtgatcctcccayctgtttcccgagtacctggtactacaggtgcacaccaccatgcccagctaattttctaaatttttagtacagacagggtctccctatgttgccckggttggtcttgaactcctgagctcaagygattctcccacctcagcctcccaaagtgctgggattacaggtatgagccaccacacccagccacagactgcctccttgactgtgtattttcgtttgtgagacagtgaaagtggtggtgaatgaggcacaggaactgtgccccgatgatgacaatgatggtaatgacrgcggctaccattgagcacctcctatgtgttaggcacagtactggggactttacatttgttatctcatttaatcttcataacaaccccggtgtgttattttattattgtcatatttgcagaagctaaggtctagggaactaaagtaattcactcagggtgactcaccacggctgtgagaagcagagtcaacattatcatgtttactctggggagagaatagaaggaaaacaagtgacccgtatttttacttagaaaccccagtcaatgacaagagcagtcccatcctggacttaaggagaatgtactctggtctcattgtctaaatatccaggctgtttaattttattcagtggaargaaacaaataggcacatgccagtagaactgtctactgtctatgaccttccagaagagaaacctgggccttcctcaagacctctggtgctgtttagggtagaagagaggctaccgggtgccctcgttaccacatctccrctgggattaccttcaagacatgatgactgtttgtaatttatctttaggagaatgccatagtaactggtgtgtacccctaattaatcataggaaggattgaccagacatcctttaacaattcttgctggactctctgctctttgrgaaaaggttgaagagtatttattcaatgggagaaggacaccagctctctgtcctttaagtttatgtcttagctgttcacatatctggtggcaacaacttatgttgtctttgactgtgagaagagaaaatagcctagctctttttttttttttttttttttttaatagaaacagtgtctcatgatgttccctaggctggtcttgaactcctgagctcaagccatcctcttgcctcagccttccaaagtgctgagattacaggtgtgagtcatcatgcccagcctagctctgtgtcttggttgatccatagctcctagcatattatcagaccaagcaatgtaagaagataacttagggtttataaatatgaataagttttggcccccaaagacctctaaaagaaaatacttgtgtaggaaatcagataggagccatgatctagaaaagtatggtgatcagcatgttctcactcataggtgggaactgaacaatgagaacacttggacacaggaaggggaacatcatacaccggggcctgtagtggagtggggggagtggggagggatagcattaggagatatacctaaagtaaatgatgagttaatgggtgcagcacaycaacatggcacatgtatacatatgtaacaaacctgcatgttgtgcacatgtaccctagaacttaaagtataataattaaaaaaaaaaggaaaagaaaaaagtatggtgatcaaatgctttggtgactgctttctctggttctctcttgcttgtattagagtcagtcttagggttcattctcaatctttagacaactttcctaacctctctgagcctctagtttcatttattttcttcttcttcttttttttttttttctattttttgagatagtcttgcttttgtcacccagcctggagtgcaattgcatgatctcagctcactgcaccctccgcctcctgggttcaagtgattctcctgcctcagcctcccgaatagctgggattacaggtgcctgccaccacacctagctaaattttgtatttttagtagagatggggtttcaccatattggcgaggctggtcttgaattcctgatctaggtgatccacctgccttggccccccaaagtgctgggattatagtcgtgagccaccacrcccggcctgagcctctagtttcttcatctataggatgaagtaggattaatagtaggattaattattaattgttaattaattattaatagtaggattaataatacctctctggcagggttgcatggggctctctggccgggatatcatgttgaagtgtgtcatcaccagtctcacatatagaatgcccataggaagtgcttgttgcctcttcttcccaaagagaaaaactggctcatgacttccatcttcccagaaagtcttctgccaacagtgtactcatgagggaagaggctggtgtgcctgccgttcacagcctttggttgtgtacgacgctctgtcaaaggcagactcctcactcatgagttatgaagcacggaggaccccaaaatcctgactatgatttattgtctcccccagacccttccctgtttgtgttcctctgtttccatttagggtcattttccctacaatgcctgaatccaaatattggcataatagtgttatttaggaaatgaagatactcagcccagacccttaaggggcccatgttgtctcaggctaagtaacatgaagacaataccagcagagagaggaaattctacagatgaaaaagctagcttgagtattagtttggtacaactgattattgaaactactgcctttcctttttggatattccctgcagtacaatttgtaatcactttagcattcatctctgtttgccaaattcaatccatcagcagaaaaagttgttctgaataagtgctgaggctgttggatggttctcccaaatagtctttcctttcaaatggaatggcccggaaaatgggcactccatttttatattttctggattcttttatcagccctccattaacgggattcagtatcaaaagcaggtaaagttttctgcaacagagaagaagaatgtggccctcgggtccatgrgtggtgcctgataattttgatccttggctctctgtcatcctgttctcctttcacataaaggggctaatctctacctctggggtccagggaggacagtccctaggacttgyccatttctcatgggacttggaccctgccttctctaaggctagaggcacagctgtcgggtaaacattcttaaagctctgaggtcattagaagaaagagagaagctgtcctatggtgccttgggttcaactagtaaagctctccacsctgaattattctgtcagcctcccaaaagctgctccagtctgcatctggaggtgtgaggcctcacaccccctggcagatgccaccgtgggtctacgggtggtgactggttttttttttttctctgttgcagaaaactttacctgtctttaacactaaatccagttaatcaaggagtgatcgagagtcatttttgtcaaattgaagtttggagatctctggatatagggcaaggaacaagaccttcaggagtgaataagtgatttgtgagaattcagttacacatttatgaagcccctgctctgtacagtgtgttacatgggggaggcaaagatacgttagacccagtgcrtgccctcagggtttgtataaggagcaaagygcactccagcaccctgtgggatgatatgcactttggcagtggtaggaatcgagtgctatggcagcaacgatgaggaaagtgaatgcttccgactttggagttactgtgtggatggtggtgaccttcacagacaaggagctttgtcagaaggctcctttctctccatccccacggctaccctccttctcactgccaggactgtggagctgctttgcaagctattcttcctgccgttagctggttggcctcccggctgtcctctctgcagcctgagtgagtgtgtgtgtcttttccttctggttgctttttagaccttatttttgtctttggcattctgcagttttactacattatgtctgagtggattcatttttatttatattgtttaggactcaatatagttctcatttagaaatttttatctattatctttgattctctttggttctctctaatctctccttctggaacttgttagaaaccatcttatttcatctttcctctcttttttctatttctgtatctgttaatgctgcattgtaggmaacttcctcaaaagtgtctgtcactttattctccttgtagcagtttactatcggctgcttaataacccttcccaatatgaatatttggtttttattttattttatttattttttgagatggagtctcgctctgtcacccaggctggagtgcagtggcgcaaactcagctcactgcaacctgcaccacctgggttcaagtgattctcttgcctcagcctcctgagtagctgggattacaggcgcgcaccaccacgcagggctaatttttttgtatttttagtagagatgggatttcgccatgttggccaggctggtctcaaactcctaacctcaggtgatctgcccaactcagcctcccaaagtgctggggttacaggcgtgagccaccacgcctgtcctcatgtttggtttttatatttaattttcagaagttctgtttggtgcttttgaaaatccgcctattactattaattaatttttttggtgtcctagtcttctgttatgatttctattctttcttttatctccctaattattttggttgtatttattttacagcctctttccagttatttgaagagttttagttctagttccaagagtaccaattctcttatttcttgtgtctattgactcactcttacgtggttcattttctcttgcaacttgtttttttatcataagatcatcttaggctgtgcgcagtggctcacgcctgtaatcccagcactttgggaggccraggcagaaggatcacctgaagtcaggagttcgagaccagcctggccaacatggtgaaaccctgtatctactaaaaatacacaaattagttgggcgtgatggcacacacctgtaagaccagctacccgggaggctgaggcaggagagtcacttgagcccaggaggcagaggatgcaatgagctgagatcgtgccattgcactccagcctgggtgacagaacaagaccccatctcagaaaaaaaaaaaaaagatcatcttaagtarggattgtgtttagtgggagttccacatactgtgggttgtggatgtgttatcttatcacttttgcatatgttctgccaagacccagggaggttcataggtcctgctagtttggatgttaactccttggcttaggagtctcacctcctgggtaggccacattctgactcctcacccatgtgccgtgtgggcttcacatctccatttctcataggagatgcctctggtctgtgccacatacggccattcctctgctctgtgagaaaggtcttcctgattctttgttcaaagaccaacagctcccaggatcctggctttatgtggggatctcagttccagttccatgaccaggtcttcagttccatggccaggtcttctgcctcctgcatgcattaaaatcttagctcctgtaactgtatcaacgtctgatactcccggcccccagttgccacggtaaaaattacagctctgacttaatttttttttcacttcaagcatctgagaattttctcattattcttctatactcaataatatatttaaattattattttggtatattttatctattagttctctgtgtttgtgttgggaaggaggtccacatcagttcagtctactatcttgtcagaatcggagatctgaataaacttaaatatggtcactcatttagcaaatgtatagagaatatctgctatatacctgtatagttctaggccctggggccacagagctgaataaacgctgatgctgccaacagaggcccatgtgccagtggaagggactgggcactcctcagcagcaaggcagccagccctgtgatcccaccccacctgcctgccatacagacccatcctgtcttcctgccctggcaccctacatgctgtctgtaccagattacctcacgctcctgcgtacaacgtgtccctgttgtcatgccattttctgcttctagaacatccctctttcccagaaccccstgcccacccatctaggtaacctctgcttctccttccactctcagctaggtatttctcctctgggaagccattccacacccctcacaggcaccaccaaagctgggtcagatgtgccttccccgtggccctgtgccgtgcctgtctgctccatgtcagctcttagcactgtgcctttcagttgtgggtttgcttgttggcttccgccactggcctgatgcttttgaggtcaaggtcttgtttttttcatttcagtacccacagtgcctaatccactatctggcaaataatgcttgatgaagggaaggtgggggacctgatttagtcctttaggaagggagggagcatggctactgaggagtcaagcttctttccagctttgtcttttcatttgccgtaggattatcatgatgattaaattacacatgacatcagggaaactgtcttcatggatagctgtgaattctgaagagctaacatggagaaaagaagctgtaaaaatgtggcttaactctaaatatagtggtaattacagtcacttacatcagtttttttttgccattttttgccgggtagtgaagaacagtgatagctatgaagagcattaaacatgtcagacaaacttgtggaagctgaattcgattgcaaggctatactcttgttcacracatctagactttatgatccatgtaccataatcatgatgggagctaccatcttctgagtgcccgcagacaccaggcaaggggcttacccaggttagttctagtctaaaaccattcaagaaggatattcacaataaaaaataaaaataaaaccagtgagagtctgagaggttttattattttcacaattgtacagaataaaaaataaaaacaaaccaaaactgaagagtctgaagaggctcacctgccaaggccacagaggtcaagggcagaacctggccagttgtggcaaattctaaagcctgtgctgtgccttcatgacacctgcctttctctccatgccaggaagctgcagggagtgctgattccagccgtttctaagcaggcctgcttgggaaggctgtctgggaaatcctgggatttccagtccctgtgaaccccaggtcagatgggcagcttctgacttgtcatcagagttctgggttaggccagtcacgctgcttggcaggtcaccatccattcagtggtatgtgatgtggctgtgttagttataaagacctcgtagttttgggggtgcagttgccctgartacctgcctgattggcccttgtagtagaccctggcagacccaggccctagctttggggtgcctgctcctctgccctgctggcagttgtgcctcacttggtccagacagtgaggccagcagttgctggcagatccgttgtccctgcggacctctcagagcctccttgacactcacagccaggtcctctgccttactgcagttcttactcttagaacaggttagtttgctaaacttaacaagagaaaatcttccattttttcctgcctagctactggactcattttgggaccttgaaacacacrtcattaaacttactagctggcctctagatgtgtgagagagagctacgctgtgggattgatttccttcggctgaagtgtctgccgcattcatgagcctgccttgaaggacagtactccttgcagccttccagaggatagggcagttctgggctgtacatcctctccccagcccacaggcacctgctagctcaggtcactgtaaggacacctgggttctcttccccagcacctgagcacatagttctttctgcttcccaacatgccccctgcccgtgggggcttagcctgcttggcatcccccggggtctcagaacacactctctagacacaatagacctagagaaccaaccctaaaaccacactgcggttctctgttgttttgtgtttatcatggaggatgtgatgggttcgttcaggtgctctgacaagtggaccccaagcaggattaatgtacgagaggtgttgggggaaggcctgtgaaggatgaggggagggaacaggggcaggcccggggcttccttcaccttacagcaaccagcccttgtagacagtatgcatcccagggctttcccgtgctggcattatcacagtgactcaggagcttcttcccaggtcactgctggtgagtctttgagcagctgagccacaactttgtaccagggcctgtccctgcccacacaccactcagaagagcatcccctttgcccactaggtagtgartgagccactccccagactctatctttctgcctgtttcctcagaaccactcctgtcccacttgcgtcagttcagatctgcagagaagcagatgctgagatgggattggatgttgagaaacatatggaggaagatgcctgtgaaggatgaaaggggagagagtagcggaaggcagagagagccttcagacctcaacacaagtctggcccttatgaaggaatttggaaaggaaggagggctgggtagggagagtctcaggctacggcccaggtttttttgtttagttttgtttttttgagataggatctcatgttgcccaagctggtctcaatctcctgggcttaggtagatcctcccacctcagcacccccaccagctaggattacaggcccgcacaatggctcccacctgcggcccagttttaaggttcactgacggaaagtcctcaagccaaagccaaagccaaagccaaagctgactgctggaggatcctcacatcttgcaggacctggcctgcattaggaccctggaggcgtgctcacaggaagtgtgacttcagggcagatgcagtggtggatcagagcacttgcagttggggacattgtcagtagtagaagatctgagtgatgcctcttcctggctgctgcacttgaggaggggacagagcagggtgttcctggatgaagtcctgtttaattagcttcccccctgcttggttctttgcctttgccttcatcctgaataagcagaggaaatatttcccagcagctctgacaacttcaaaccagcaccaacacttcccagtactttggaaatgacactttctgtctgcaccttggaactgatgccagctcctcaggctaagcagcagtgttacctaagagccattcattgcagagggcgagagcctccaggcctcccagacactgccaggttagcttgaagaaggcctttcttgttcctgatgaagccttagtttaggagaaaggggggcttgaaatcaagagagaggaggggcttgggggaagttggaagcgatgcagccagagaggtgccaggcgtgagctcatgggtgcaagcctgcagctgtattgtgcacgtgggagtcagccactcacagtgcaggtgtgagctcactgttccaccacagccgttagtgtttggcatcagcatgatgcaggcacaactcctgcttccactgctggattcgggtagtgttcagcgaagggagtgtctctccaccgtccacccacacagagggatggccgtggctctctatgctctgctctcttctcacctcactccgtgcagcagcaatcaggatattttgtctgccaacaagcagtgcttcatttaacctcagttttatctacaggaagaggagaagagggtatgaacactcccattttagagagagagaaacagatgccctgataggtgccctgtgcaaggtcaagctgtacataagaggaccatccagcaggcttctccctggatactaccccagctatctgatgcaagcaggtgtggggccctagaacaactacacagaagtggcactgagttgcccatgggtccaggagcagggagggcagcaaggcctggggcagcacagctgcctcctgtattgcttccatctcctctggagtcacagtcacccagtctcctccacatggaatctgaactgcaaagggccaggacaaggaggagctctttttcagctgtgttgagtcagtgcctattccccacttgctgggagaaccagggagggacagagtctgaagtcatattttatagcactcagttgcctcggcagaggtttcccatgctgctgagctatggtgctcaggaccctttgtagaaatcactagaccttcagctctttctggctttctgaggccagaactgacccaaacaaggaaatgggggagccgcaaaaatcggcagattgtgctggccacagaccagtcacatacatcagtgtacacacrcaggaacactggtccatgtctcagcatatagtgtgacttatgcattctgctatttttttctgtagtgcacatactggaaaataggtttttacaataagcttgctttgtaaaacttacttctgaattatgacatgcatagagaaaagtgtacaaattataagcatctagttcaaggaaattgttagaaaatgaacacatccatgtcaagaaatagaacatggccaggtgcagtggctcacacctataatcccagcactttgggaggccaaggcaggaggattgcttggggcccaggggtatgacaccagcccgggcagtgtaacgacaattaacaaatttttatttaaaaataaataataaatagaacattacagcttccaggagcctcccatgtgcccctcactcctcccaaaaggataccaccattgttawcttctaacactgtagattggttgtgcctggctttgaacttcatataaatggaattatttactatattctcttttgtgcccagcttttctctttcagcattatatttgtgagaattcatctttgctgttgcatctatagtccattcatcaatttatccaatctgcatttgttcagtcaacatttgtattgtttccattttggggttattataaatctgcttgtacatgtcttttggtgcacatatgcatgtgttgcttttgagtatataataggaatgaaattgctgaaatcatatgtaatttcacaagcagtgtgtgagagctcatctgtttattggccattcagtagagtgccttttcaaatttcttgcctgtttttctactgggttttctgtttttcttcttgatttatagtcctctatattctggatatcagttctttgttgcttatacatgttgcaaatatcttccactgtgtagtttgcttttttactgcctctggtgttattttaaygtacagaagtacttaattttaatggagttcagtatgtcgatcttttttattatggttaaatgctttttgtataccatttaagaaatctttgtctatattctaaaagaatctacttagaattgatttttgaaaatggtacagcaagtttattttttcatatgggtatctgttgacccagcatcattttttgaaaatactttcccatagcttagcactgccacctttgtcaaaaatgaagtacccatatgcacagatctgtttctgctctccattctgtgtcactggtttatatatctattcttgtaccagtaccacactaccttcatgtttgtataaaaatcttgatagccagtagagctacactttccaacttggactttttctataaagagcacctatgctattcttggcccattccatttccatatagattttagaatcagattgtcagttgccacatacatgcacacaaacttgctaggatttatattgagattgctttgaatccatatgtcaatttgggaaaaatcaacacttttatgataatgagtcttcacaaacatggtacctccctctatttagagcttctttaatttttctcaatataattttctgttagagatcttgctcatgtttcattggatttactcctaggtatttgatttgtggtactattttaaatggtatttgtaaatttaattttctctttgttgctaatacaaggaaacatggtttatttttgttgaccttgttatcaattactttcctgaatttatttattaggttcaaataatttgtagattttttttcataacaatatttcagttcagtgtagatgcttttttatttccagtgtacctcatcatgtcatctgcaaataatgacagttttactttttcctttccaattctcatgccatgtatttatttttcttgccttattgcactgtacagtatttctggacataataataataggcatttatgtcttgttcctgatctcaaacagaagagtttttaccacaaactcactcttagattatgaaaatgaaaatttttactggtgttctctttagtatacactttatttttccccaagatgagttttcaatttgggaacttttttttaagttttaagtggtgatttatgagctaggagctaggaaaatgatatctgattttttatttaaatgaaaaggaactaatgtttatcacaagactgctactcctcattttaaccttgtgaggaggttttgccttggccattttacagaaggatctcatggctgtacatttgaacaaggattcaaacagatctgtctgacttcaaaacccatgctctctttactgctccctgattccttggtagaatattgaaygtgaacccacgaggtcgtaaaaataccacttttgtcatagatgaccgagagaaaagttgctaaactattattrcctcacaggtatatgcagcatcttttcctttccccagtaacctcctaccccaaatctctttatatccctgtgttttagtccattttcatgctactgataaagacatacctgagactgggcagtttacaaaagaaagaggtttgttggacttacagttccacctggctggggagtcctcacaatcatggcagaaggcaaggaggagcaagtcacatcttacaaggatggcagcaggccaagagagggcatgtgcagagaaactcccatttttaaaaccatcagatcttgtgagacccattcactatcatgagaacagcatgagaaagacctgcccccgtgattcagttatctcccaccacgtccctcccacaacacataggaattatgggagctacaagatgagatttgggtggggacacagagccaaaccatatgacactatcacctgccccatcccacctttccctgatttccattgccatggaaaggagccctctgggcctgcctgtggccctaaagggctgcagccctcctcagcaccggcccagcacccactgggcccagtatagggcattctccagcctgtgctgtcattctgtcgcctgttgtctggtgctgggaggtaggattgaaggctttcctcctgggcgggctgctcaggttgcaaggtagatcctatatttttaagccctgtagagtctcagctgtcccattttgagggttatgcatcctacatgggttcacagaatccctttcgctgagacttggaggaatgaagaggacagagagggtcgagacccaaaccgagcaggccccggaggcctcagggccctggggctgaagggagctccctagcccgagaatgcccctcactattctcacactccaccttttgcagcccaaatacccatggatgccccaagagatttccctatgagacagaaaattctagaacaccaggaactctcaaaactagatatttcaaaactcttaaagaccttaaagagtaaatgttttcattgtcgatttaacatagagttacattaagcagctaacactttccctttcttgaataagatttcctgtctgtcacgttgccatttgctttcttcatgtttttgcgatggactgcagctccctccattctggggagcctcctggsgctgcagcaatccagcatgactcggagctctttgattttctttcccagttactttatagcacatgaagatgtgttcttaccagtgacagagggtcggtgagaatgaccatttttgttttccgtatatctgtacctgccacatccatacctttctcagaaggtcctggaatgactcgtttctctctctgcctctctgggtatttctccaaccacaggtttgcatccccagggggaagccagctctctggtccctcatgctaagctttttaagcagatagtactgccaggcggtctttaaacccaaggaggcttgccccttcccaagacttcaaggagttctagaagagactgtgatattcaggccaggtccctgtttgatgaacagggacactcaattcctggcaagtggggtgagcgcctccagccctccccacccccataccggtgtgctggcccagacccagggcatattcaggtacttaaagtagcaaatgtctctgctgtaaaaaccctcactccggtactgaaagcccagagcccaggctcaggccacagaggtctgagatatactctcaaggaggttagcccataaaagaaacaggtcataggactgcatgttgggtttgagcctgaagaaaggtgcccatggttgtcatcttctgtggctgcctggcaggtaaccagatgtgcttggctctcttagcttttggctgtgctatctgtggggtagtgtttctgatctgtcttcactgccactcccagctctctgaggctttgtggctttttcttggtggttgggcaggaagcctctagagcctgaaggaattgctgtgcttgatgacaggcacaggctatcaatggctataaatcgcctagtggctgcttcacgtattgaagaagaacatgtttgctgtctgttctgcggatgcttctctgatggccggaacacagctgcgaaaagatttcgtagagtgactcagagcaagcgcccagctcatgcccactgaattaagcaagaggaagtggccaacttccgcagctgctctgaragcccaacacagcaaggcctggctgagatgaacaacatagatcattccactgactttgggctacccccaagccaaccccatgtgaccccacacctaccccaaagctaggtgagacccagggtccaccctccaagcccgggttaccagtagggggtaggtgccaaactggagagtagactgtgatgaatgggtagcagagatggcagaggacatggctcatcacctggggtcggggaccccgctctcagcagctcccttccctgagtgccctggcattggtgtgtctgtgtgttcgcgagccctggcatgccactgcggcttcacagtagcctcctgggcagcggctcatcagcttccagcacagcctttgttgttctrtaaatctgttaatgtttgtgctacctagaataagaaggaaggagtcattctacagagaggatttattcttccaggcgccaaaaccttgttccttacgattatgtcctgttctttaatggggtcccctgtactccacagtgtcattcgcctccacactagatgtccacacaatgctgtgtattttcactgattttgctggggccctgccctgtctttgtctctgcctttacagtcagggccagttgtcacttctccgtggctgtccggagaacctgtagcaccctctccagccactccaagcatgaggctttgtggggagcgtggaatctgtgaggaagccgaggcaagctgttaggattctgttcaatgggaggaaaggctctgagtgaggtgggaaggaaggacttcccaggaggcacacttgsgttcccggccccacctctgcgctggctgcccacaggccctgcttctgcctatttcctggttctgcttcatgtttcaaagacataagatcaaatgtgattaagttttaggtaagcaagatattgtgcttattattgaattgttcttctttagtttaacagccctccagtttaatctaaatctgtttcctgtcattaagtctttggtgtagataaaagatcagttagctggtcgctatcttttgtgtcataaatcttctaggaaaccattgttgtgatttttcattgtaccgttcctgaagaggaaggaacttttcattcctttgggcttttttcctggtgaatttcccagctgttagtgtcatcgagcttaactctcacatccttaaggcagcattagcctcagaaccaccagtacctcgctgtgtgccctgggaggcaggttattacccttggcttcatgacccatggacagtccttgcaatggaagggaaacacatttgtgggtagagtgtggagaatgtgtgtgaaaggctttcctcgcccaggcagtaagtgctgcggaaacaagccactttttatgctaataagatttggacaggggttgggaggtaggggagtgagtgtgtgttgatctgattccctgtgcccaagagcaaggacagtcacttcatcccagcccctgcacagtgttgggaacacagaggtgttcagcagatgctggrcaaatgtctcctgggagtatgcagtatttgctcttttttcctctcatgttctgtgttcctaacattcttctattttggcggggtggggaggtagaaggtaggcagagtctcactctgttgcccaggctggagtacrgtggcccgatctctgctcactgtaacctctgcttgccgggttcaagcgattcatgtgcctcagcctcccgggtagctgggattacaggtgccctccaccacgcctggctaatttttgtatttttagtagagatggggtttcactatgttggccagcctggtctcgaattcctggcctcaagggatctgctcacctcagcctcccaaagtgctgggattacaggtgtgagccaccactcctagcctcttctattttttaattacacctctaattgtctctgaattgtcactgaattaattgtctccttaattcagtgcagaaggttttcataataacactaatatttatggaatagttaacaataggtcagagcttayaatgttaaataagataacaaagtttatctcatttaatcctcactagaataaccctgcgaggtaggtagaagaagttagagaggttaagtagtctgcctaaggttacccaggttgtgtgtggttgacagtgccctacctttcccccctgactttagcaatacaagaatactggcaagttgctgctgccctctgggctctgttataaagtgaagctgccgatccacaatggagaacccactcctgcaaggccaggcctccacagaggccagaggccagaggccagtagtggtcggggtgcccaggaagctgggctcaaacaagggtaacttgcaagaatcttcaggaagcccttatattcagaattgtgttctgtgccacatgggccctttcccaccatcaaacttagaaaacgacccctaggaaagtcctcagagttcatggaagggcgctgagaagtctgcccacaccctcgtgggttggaggaccagtttcgccaagtgttctctggcccagttgtaaacatcattcgtttgcttgtccagcaaacattattggacgcctattagtgccaggtactgcactgagcacaagagaagggcccasttccttcccttgaagcccacagcccatcgaggaagacaggtatgtaagacagcatttgcaagggggtgacaaaggccaggggggaggtgaacaarggatgcagggagtggctctcagtgttgtgagcaccccgcatgggaaggccagcgcggcagggtgctgggtgctgttgccctctgcttctcccggctggagtgtcagtgtgggaccctgtaggccccaacccaccccaggggaggcaagtgagaaggtgacaggacagagtcatgggacaagaaccagagggaagaggcctggccaagccctggagaactgagcagagcagagagccgcctcaccaagcctctgtgttccatcttgtcatgcttgttggaatgaggaggaatccctaaagatcatggatagaaggagaatggctcttcttcccaccacctccccaccgtctctccctgaaaccccaggagcattccagatacaacacagggcgggggtcttcccttcatgttccttgagtgcagtggccatggccactcctttctcagaactcctactgccagtcttagcactgctggcctccatacccagcagggaggtgtggtctgctcccacatggctggctgggccattcctgggcagatggtatcgagtaaggagcacccagtgtcttgtgtggttggcacacaagacactgtggtggttgagagaagcagagggcaacagcacccagcaccctaccacactggccttcccatgtggggtgcacacgacactgtgtggttggcacacagtggacacaccctggactgcatgctacgtataagcatgtcctggtgaaactagcagccagttctttgttttgttgcaaatgaccatttgacagtacttccacaacagccaaacatggcacatgaggaactgggcttgagtatcacaaagatttactggtaaatggacaggcataagcaccattaatcagacagcacagttactctccatcttggtggctgcacagctcagcggaccacacagggccctcctggggtgttgggcaaggcctcctcccaggcagaggcagctggactgaggccagagagttctgggtgctacagcctctaccaggaacaacaattctcacccaggggaggcctgaaggctgcctgggcttggctgcctgggcttggcctaacctacctgtgaagaagctcccagattgctagtcagcatcccaggtaccaggagagctttcttaatgcatctgaaaatcctggataaacagggctgccctctgcaacccaggctgccctacaagatgggcttggcctccagagtggtagctcagggaagcagagccctcaggtccagtcacgctttggcatggtctggcctcaccatctgacttacgattgacccagcctgcctgaaaggactcagggcctaatccaggttgttctggtcttggttctcaggtagaatgagagtggcgtcggggaaagggctgaagtcttcacacaggctgtgcgagagcactcagcagtctttggttgactttgggtaggagtggagatgaaacccagcagtcttatggttttcccsgccytccaccccacccaccctaccccttcctgtggacaaagagagggcagagctggggcctcagtgccacgtggggtgggcacatgaagatgtcagggaagcccagaatgttctggggggggtgggggacacattcattgaaaccgctctgaacctaggtcataaaactgtgtgtcaatattttaaaagtcacagaatgaatgcagagctctgccaaactcaacatgctgtgttccagggggtgataagacgagcgttagttcagtggaaaaaaaaccaagacaaaaggagttttcttttaatcttctgtgtttcatgtttatactgaggcaggctgcccttgcaggagagaattcattcatcatgcaaccaacagatgagtcccagtgacattgtcacctgtcacctgtgttggatttaagtgataaccatatacaggcagtaagaatgtatcgaggcaaatgtagcctgtcccattaggccagcagaagccatcttgggtttcttctgccaagttcatacacctctggttcaacagtgataagctgaagggaagttgcaggagccataactgccactcctagtcctttattactagggggctgtgcttccacccctgaaaataagtcttgtttggcactcaacgttttctgtggagcaaacaagcaagtcatgtctctgaaatacctcatttgttcccccaaacatttcaccagctcctccatgtgctgctcagctctgggatacatagatgggcacggctaggtgttcccctcccttccccacccaacagcctatggtctgcagaggaaaactagcctccagagaaggacagtctggattcactgttgagatgtggtttagaatcagcccacaggaccatggagccagggagggagatgtgtgaactgaacctgtacagccccacgagttgctgagtggagaaggtgggcttgggtgyggggagcagagggggcagagtggaaatccagggtggcctaagagtctgggtgcctgtcacccatgaggaggccccaaagagtcccttgggaacagaggcactgatctccttgtggccagtaagtgagcagggctgaggcaaggaacaggccagcaaaagcctgcggggggccagggagtgtgacaaccaaggacccccagagcactagcagctaaggacctcatgccacactcagacctgggcgagggactgacctggagacctcctgagctttctctgactgtatggagctcaccagggaaaacatgggggatgcctggatgcattgcccagctccgagctcagcacaaaaactccctcttggaacagtctagaaagaggctcacctgaggcccagctgtcacccaggggccatgatgtcatgtgggccaaggcatctgaggggcaggggccttccgcatcccactgctgccgtggcccgtggcccactctgccctgccctcctgacccggaggcccagtgcgtctctgtggggggtgggaggagcgtcagcaaaggagaggctgcacagggcgccttcggcagtgacgsgaaaccaagagcaggaaaagcaaccctgctcagccctgggcgactcagacaggaaagggcctgagcctgaggcaaccaggagggggcagccttatcagggaggccgtggcgcgggcctgagtgctgcttctgccctcatccaactgcagcgggacagaggcaaacaagaggccccccctttgtttccaggggggcctggaaacaaggcttccaaggtggcaacagtgtcccagcccagccaggcggtggctgcagggggccatgtgtgtgcgcctgtgcctgtgaccagcctcagggcctaggggcagggagcaggccaggggaaaggctctgtccctggggcttggccgggcaggtggaaagccaggttcagatgggtgaccctgggctctgcagctgctgtggtctggcagaggggaggaggcgcccttagcagtcaggggcaggatgatggtagtgacgtagctgactacgggggtgcctgacccctgggcagcaatgtgctctcagggtgggctctgtattgagttcccactgtcagcacagcctttggctgctgcctcctcctcagagggttcagagcaaatgatgcagggtcacctgaggacaaagcatggatggggtgtcagggaccctgggtctgggagcttgggcaagcccttcgagctcactgagctccctgtgctcctgccaggcatgagaactctgacttctgagactcagatggaccgagagtggcaaagtgcctggcagtctccacatccagccctgccacactgtggcatgggacctctgtggtcacttctgtggcctcccagagacaccatctccctctgtcaccttaggaccacagtcccctccccatgcactgggtgtgggggaccagtgaggagtggatgaggaagtgcagagaccactctacgcttgtttccctgcagactttagtggctgtgtggctggggtggtggccctgctgaaggggatctgacctggcagccgtttgggcaggagcagttttcagatgtgagcacacgttcaaacttgcagcagcaaagctgctcaaggtcccaggaagcccaggcttctctctcgtttttgtggctgccttggtaacgtgtgggtgtaagagcgtgtgtatgtgcaggagagagacggagagaaagaaagacctgtgcattccagaacacccttcttccttgaacatccgattacccagagcctaattttaaaaccgaagtcgatgccttcttaagtctgcgatggcccagctggcctccttaagtctgtgatggcccagttctgttcttgctccaagtctacgaagccagcttcccctgctggggcttgaaagggacccctggccaggagcaagcagggcagcaagcaaagctgttgggggcactgtggggactcccccaggtggccaggcttctgtgtgcccgtgccacccctcctcaggaccttgtttccagttccggttgggcaggggctggcactggagagaggcttatgtgtcaacaccataaagcagccagcaagccctaatgaccacgctctgcaagaccacacagsacagactggcacctggttctgcttgggggcagggccgctgccagcctgcaggccgcccctacctctgggagcagagcccgaacttggggagcgaatgaggcttctgggctggctttatgctgacaagggccttctgcactgtcagcccggccccagctcccagcaagtctcctttcgctccccattacggccactggggctccctttggcaaggcctgagggcccaaatgtggccatctagcctctggggacttccttcctttggagctagaaaaacaggtgcagaatgtgtctggctacagcaggggcccgcccactcacctatagaaaggccctgccatggactgagcctcccagcctaggaaacctggctctggcctcccctgcaggcatatgatgtttggctccagaggccttctcctctgggcttttccatgcctgtgaactgggccccattcatttctctgtggtttcatgggaacgtccaatgcattcaggaggttgcagtgcgcgcaggaggagaggggtcagcgagaggcccgagctgtgactggtgggccacccagaggccacggcaccctctgctggagactggcagcagggtgcatggccagctgtgggtgggggtccatcagtcaagcagctgcactttctccccatccccctccccgacccaggcaaggtgctctgcctgcggctccctttctccaggcctccactttccagctcccaggcacccagccccacccggcctggcctggaacagagctgccaccaagatctcttccactttccctccccagcagcctgcaattcagtgctccgtagacccctgcctcccagggctctgcggtttccaccacactacactcaatttccagctgctaagaacacagcaggttctacgtaaaggtggccatcacctgcaccccatgggttgcccagccatggagaagaggccatggttgggtacacagcttctgagacaggcccagcagctgccttcatggcctcggcagagcccagggctctggagcttacaggcagcgtgtgcccaagtgtggaaaatttggtctgcagaagaaatgaggctgaaattggctgggagcaattcttatcaaagccacgttagcagttttcagcaagagctaattgaacaagctctgtgagtggcctcattccattagcaggagcctcccacagagcgtgacaagggccctggtggctgagggcagaagaggctgtttctgtcccacatttgcctttggcctttgaaaatggacwmattttcagctttgggcactggtcctgcccctctgccccggctcccgctcatttccaaggccactctctgagtgtcctgtgtgaggaaggggtgaggtgagtttgtcagcactttatcaggtgcatggatctgaaatgggacacctctggcctccttgccagagggtggctttgtggtgagggtaggggaggcagaagaaacttctagaaatgttgcttttactgtgttttttgcccaagtcctagagttggggcacccaggccagtcacatcataagatgtgtaataataatgtcttatttattcgaggccaggaacttgaacattgcttccctgttttacagggaaacaaattgagattacatgagcttaagaagcaagtgagtggtagggctggcattccatgcaagccactgaggagaagccccttgtctccatggcagggccaggagaggggagggacaccccccaacccctaccacctgccagacaggaccttcctggccacagatgccctggatccctgactatcaaaacccagccccagcctttcagctgagcagagaaatactcagatccagttcctcgatggtcagggaaggcaggcttcctctgaagagcagatcgctttacccctttctcatctcatcacctctgagccctgccagggtgagagcagcctttcccagcatcgtcctttaagatgcracagaaacaggtcccacctgagccagcaggaatgcggcacccagtggctggctctgcagtcttgatgctcgccggcaccttcagggtgaaggacgccctgtcgtaaacgcatgaagagccctgcgtttcatatattgatgttgttgctttttctttagaggaacgtttgtgcactgtgggaacctctgtctctaccagtgtcacccttgctgtggggagtgtgtaccgtgtgcggggggctggtggcctttctctgctgtctgccacagyktgtgaggggctcgctgagcctcayacctgagcctccccctccccaccccctcctgccccagggaggcccagaaccagggaggagaggtgctgggagtgagtgccgaggagctggggtcctggccctgcagccactgtcacascacagccccaccccagacctccagagtggtggggccctggtggtgcaggttccagacgcttggctgatgccaggcctggatccaaggcccccgtctccgaggccttagcttgctgttctggaaggtgatgctggctggcagccattcccagcccctcggaaagcagttgtcaggcagtccctgagctccagcgccccatcccccrcagggcccagtgatctcacgcctgtgccyctggtgctgggaggagtggggtgacactagggccagtgcccacatcagaggaggaaggtatgaggccagggcagggggcagggcgccctcccgtccagcagccccagtgcccactctgcgcccttcggggctcccgtggcccagagtgtggagcggctcaacctgaccacccaggatagcttgggggcgtttcggaggtttggctgcctaggctgtgcacctagcacwgctccccaggagagggagggaggaggtcagggkagagggccctgctgaccgggtcatctctggccctgggttcccataggagcgcctaggctctaagctggagcctccccatcccaggaccttggggagaaagaggctgggcgccacctgctggcccaccagggaattgacagggtgggggactgtggagcctgtgctggccgcagatgagagccctgacycccaccttccctaccccacccaccctgcaccgtccagctcagttctctgacccgtggtgccaggtcccatttgcaatggcraatactgaactcggtgcaactctggctgctggcagctgggcttggcctgcacctttctgtccccaaactccactggggacccaccttccagccaccccagggtgccaccgccagagccaggggtcagccccaccttcattcactcctactcatagcctacctgttcactctgcccccatctgctacttgcagcatcagaaggacatgagggcaccaaacagcccctgcagctgtcctcaaacatcatggccaaggctgcacctgggaagtggactttctgtggtgctagctccctcctcagtgcccttgacctttgtctgggtccctgcttaatgtggcctaactagttgggccagagctccacaggtgctgtcctgactcccagccccaggagggagggagaggctgagacggcaagggaagcagagactcagccacaccaagggccctggcaaggtgggcctctcctccatagcctcaccaggcttcacgttcaaggtcaccaagagtgcacttgttcactgtcgagggcagaggtgactcctgggactgtgctgggggtccagggagagcaggtagcggagttgccagggaagcagcttgcctgaggtctgtggtcttggcaggggcttccacagcggccccaccctctccctgtcccctccctcctgtccttgtcctcgtgtttactgaaaaccatgagaagggatgtggagagcgcctgcaggaactgagagcaggagcctggctcagccctgagaggcccccagatattcaattcctaaacccatagagggtggggcatgggcacagaggagtaaccaggggccacctcacacagccctgctctttcaccctgccygcctggtggcctccttagcctgcagcctcagtgctgcccgctatggggtcatgctgcctcctgctggccacactgcaaaatgcagcccagggtcgggcctaaggctacacttgtccctcttccggcaagcctgcagctgggctggaggggaaagcaggcaccacagaattgcctggatgctcctgcccaggaggattgtccgactgcatggggagaaaagtccagaaccgtgcctggcacatagtagtttttatggagtgagagggcaaaagtacgcatgattgtgtgcatctgaagtatttccgtgctgatggcctgaccagtatcagattatttttcaagcaggaattttgattcctcttgggttcacaatatcttattatgaaatccgaataagaacagtctaatggcaccagacagtgatacaggtgagcctagaacagtcagtgttcatgtgggggactgcagcctgcttttcagggaggcttcaaaagaattgaggaacacagattgatggcagggatgaaaatcacagggcatattgaggagacccccagctggccatgtggggggcaggtggggcaacaggagaacagtgcctgcgtcctgagggctttcaatgcatcaggcagagggcctgccagtgcagaacctgttttctctgcgtccatgacagccctgagcaggtgccattgtgacccctgtcctgcatttgagacagaggatggggagggctctgtgatttgttcagaatcccacggcaagaaagttgtggagctgagagtcaaacctgggcttgggagacttgtagtgggttaagggcttgaacacagggtttttggcaggaagtggtgggcacaagcacagattagggctgggaggtggggtggcacatcacaggccgttactgccacccagagggcaacatggatgctcctccttttacctgctgggtgtcctgtgtggtagaagggcaggctgaagcttgatccttgtggtcacacatcccagctgtcacctgccttactgtgtgccatgagccagcccaaaaaagtccccactagtccccaggggaggcgctaggggtgctgggctggcttccctcctctccaggtggtgcctgccctcctggggcatttcccagcccttcttcctctgcatctcargctccctggggaggcagatatgctctcaggacatcctggcagagcacagccacacgtctgccctggcaggcccaccctgggtggaggaggggctctatatgccagggctctctctctcggtggctggctttctttccacgagcatggccagatgacgaggctcacccgcagcactactcacacctccaggaagggaagttgatggcagggttctggctgcagccaggcctgcgggagcttcctccctgatctctctcactcaaggggaaagctcagggctgggcatgaaggctggggaaaggcagggaaggcagagtccccccaggctggtcaaggccccgatagccccatgtctccctgagggggcggctttccccatgaagagggtcctggtcaccaaggcatgaggacatgcccaaggctggcccatcacaacaggctccagctcttgtgcacatgtgtgatcttcttgtcccaccaaaggcgggaaaaagaagtgcgtggcctcctgccccagatttggtggtagggtcagtggtgctgacctcagtgctgtgtgataccagccccccagcctttgcctggttcatgtcccacatcgcctatcggtccccgctccttcagtctgggaccttggcctgctcagtccttctgtggggagccacatccattcacagtgactgttgagtctaatgacagacacccaagtgctgcaaagccagagcagcagcccctgaaagggtgactctggggtctcaccccatccccactcctgccctgtcctctggtgagggcttccctcctgctgcctcagactgtcctgtctaccctcagagaccctgttgggaggcttccctccaacaaggcaccgtccccagaggagaagggagcccagcactcctgggactgtggggtccttggtccactcaccactgccacatgcctcagggagccctcagagcaggggctgagctggggccccagggttcccatgccctgggcgagcatggtgccctcttacagcctgggctgcccgagtgttccaggcatcctgtcattcagcagagatctttcctcggtgccttctctggattgggtgggctgctgagctctggggctgctgcagtgaattatttaatagatgggtgcttccctgctctccagggtccccctctgggagagccagcacaggagctaaccagtcagaggagaaggcggtgtagaccaactggtgcagggagaccatgggggtgctgggcaagacagggacttggcggaacacatgagatgaggtagctgggaggttgtctttaagctgagacctgaagggtgattgatagagagccaggccggctgcagcgtgggaaagcctgcgcacctgtccccaaaccccagcggtccctcccatcccacccaccctctgcaggctcgtggaggagttcatgctcttggccaacatggcagtggcccacaagatccaccgcgccttccccgagcaggccctgctgcgccggcaccccccgccccaaacaaggatgctcagtgacctggtggaattctgcgaccagatggggctgcccgtggacttcagctccgcaggagccctcaatgtgagtggtgggcaggattcgggggaggccctgcttgggggaaagaagagaaagacctggaaggtggggtggtccagcggcctctgcttccccccagagtccctccccttcagccaggtctctcctgtagggaaggaggccctgggagaaagggcccctctgagtcacaggggccctgacagtgggacctgccccttcaccaggactgtgccaagcggggggaccctggaggcctagcagagggcaggggtcctgtggccagaaagggctggtcttgggcccagaggctttcagagtcggggctggaattgtaggaatcccgggaatgttcctggtgggtactttcaggtgctccctgcctggggcaaagctaagaaacccagggccttggctgtggtcctggaggagggagacatctcacccaggcccaaccctgggaggggaaggcaggtgccccaggccagagagctggagcccagtgagtccaggccagccagcaaaaacatggaagtgtgggccacagggtgtgggcggctgccccctctccccacccatcccctctgagcagggctgagccccacaggcaactcctccccccagagccgggcatgaggtgctcagcggatgacagggcccagagtctctgcccgagctggaccacacgtcacataggtttctgggatttgcttctagaaaagcctgacccaaacatttggagatgacaagtactcactggcccgcaaggaggtgctcaccaacatgtgctcccggcccatgcaggtaaggagggcccagccccggcctcccctgctcccaggagcacactagccccagacctgtgacctccacgtgcaagcacaggcccccaccgttcctgcctgctctggacatggctgggtggacgggggctgytcctcctctgccagagggtgggagaggaggccgaccccaggcagcacctaggagggggcaccctgagcctcttgagtttgagccgctgtctcctgctcacactcgctcaaggacagagtgccctggagctgaggggctactgagacctcctgtcaggctggggtcctggaggagagacagggtcccatgtggtttcctgtcccagggaacactccgcagcctccatccccacatgtggagtccagaactagctgtcagcctctggccagtgtgggaaagaagcggacttggccgggggcctaggcctgggcctgcagggaggtggcagcctgtggggtggacagctgggcttgctctgggatgcctgtcacagcgccccaggctgagcttcccccrtgcagggcccgagcatcctgggaccaggaccccagaggaccctcgggtcagcgggagcagtggatgctgatgggtcggctctgggtcccaccccggcccaggggcagagacaggctgtattttaggggctcggtcactcggcagattcaatctgttcacaagaactgatggcttcagctgacctcagtggatttattttctgacacttcaagctctgctgggtttgaagccatcagggcctgcttgggcctggtcaccgtgacctgcccccagtcacaagtgtctgcccagccaagcacctgtggcacccacagcggagaggggctgggccgtgcccactgggctctctctgttctacactgcagcggctctaggcctggcagagaaggcacagcagcccctgagtcccagaactgcctctggctctgccctgctggggcccctcccatgtccctgcctctgacgccatcacctccaaggaggtacaagccaagctggagctccagagatcggagccgctccggagttagccagagcccgaaaaggctgcattctcctggctcgcctcccagggagctcagaggcgcccttgcccgggaatccgatggcagagagttaccaggtctgcggtgctcctgttcctcagccccgggaactggggtggggacagggcagggcagcagcagagagcacagaaaggtgtgagggggcacacagtccccagtgagcatctgcatcaggacaccagggctgtcccagggctgtcccagggatggctgggcctgtgggaaagccatggtccccacccatcccacccgaccctgagccacctccaccagccaagaggggccagggcccttcatcaacctcacccaggtcatctggggaactgggccaccactgagaacaaagcccagacatgtctgggagtggaggctgtgcccacctcccccagagacttgcccccgacttaacccagggcccagcaggggctggaagggaagtggagttagggagcggagcaggtcaccatcagctgcgccctggattccagggcccgtgtgcacagagtaacgggagccggctgtctgtctggccaagggcacaggagggtgagtgtgtacagcagccagggagcaagggagccagagagacatacaggcgtgaccttggacctctgcgaggaacccgttcactcgctcccaggcagtagcactggccctgacacccagccctgaaagctcggggactgcaggacaaacagcttcaggggctgtggccccagctgggacgggctatgcgctggtccctagagactctcggtatctccccctgccccagtcctgcctcctgcccagcacaagggcctttggaactcagccctctgtgtctcagcccccgggagggtcaggtgtcagagacgagaagggccgaggctggcaggccggaaactgcctcccttgactgctgtggggtggagtattggcgagcacagaggtgcccgggtgaagcgtggcttcagctgggcgggatcagtgccagaggggatgaggacggccccgaccaaaggtgggcctaggctggagaggaagctccaagagcctgaggcccgtattgcacagggcaggggatcgcatcctgggctttctctccctcctcccactctggccagatgggaggatggacgttgcctccttgaacaaagacccacaggctccttggcttctgcttgtgtctccagcagacagcgtctgcagcccctggtccaacaaaaccgcaggcggcctcctcctcttcctcctcctcattgtcctcctcgaccaccaccacctcctccttccaccacctcctccttctcctcctccgctgtcgcctcctcctcstcctcctcctcctcctcctcctcctcctcctccgctgtcgccgcctcctcctcctcctcctcctcctccgcwgtcgcctcctcctcctcctctgcctccacctctgccatcgccacstcctcctcctcctcccccaccccccgccgctacctttctttcttcttccttcttcctgggcgagagtagcagccccggccccatgctggggaagggtaggccagagactcttccctcctggtggtgctcagcagtgactcagcagggactggacttcggaggctcagctcgtgccccctaccctgacagcatcctgggggttcctggctccctggtcctcagcagggtgggcttgtccaggccattctcagtgctgccaccttgagggcatctgggaggcccaggcaggccagatttgtctcctggaaaggacatgggtacccctgggctctgcccagcctcctggcctccccctgggrccccttgtgcagcaagggccctggccccagtcctccctggcgtcactcagcaaccagcagcccattaggtctgtccacacatcgctgccgacggtgaggctgtgggtggtgccagccttccaggcctggctgggcagctctgggcttgtcaggctctgacccatcccgtcccgcagatggcactgtacttctgctcggggctgctgcaggacccagcgcagttccggcactacgcgctcaatgtgcccctgtacacacacttcacctcgcccatccgccgctttgccgacgtcctggtgcaccgcctcctggctgccgcgttaggtgaggggtgcagtcggggtcagggcagacctgggccagctcagggctgcccacccccacagtgggtgctcagtggcccaagaccattctgccgtgacagcggaggtccaagggtcgggcgacccaagtgcaggggagcctggcctggaaactctccctacgggccggtgctgcagaagctgcatggagcccacagccagccctggacacagcygggaggagggcgctgacctcgaagggccgctttctgctgccctgggagctgggtgcttggggtcctaatctgtcggcgggggtgcagcgccatgcagcccatcccccagccatagctcttcccagccccccaggctcccactctcatgcctcaccccctcttcccaggctatagggagcgactagacatggcgcccgataccctgcagaaacaggcggaccactgtaacgaccgccgcatggcgtccaagcgcgtgcaggagctcagtaccagtctcttctttgcyrttctggtcaaggtgagccctccagcctggtgcccctcacctccctctrgctcccgaccctcctgggcacctgctcaccaggaggcctcgaggagcccagggcagtgccaggaggtgccatggctgcagcactgtccctgcaggagagtggccccctggagtcagaagccatggtgatgggcatcctgaagcaagccttcgacgtgctggtgctgcgctacggcgtgcagaagcgcatctactgcaacgtgagtgccctgggagagcccgggggcgggcagggcagcccaagccatcccgcactggaggggcacaggctgtgatgggtcacactccacccctcgctcccccagccctagcacaaagcccacctgatgggccttgctgagacgcccagctctcccacctgggatggtggctccaggcccagggtcaggcctggcccccttccccaaggacccaggaaccagagagcaggcccctccatggccagtacagctcggcaaggtgtgcaggctttggggactgtgtttataggaacgtgaaggaatgaaaggccagcgaatggtccgtggccgctctggaaactgtgtcccctgaagacaaggaagagagctgtccctggctcggctcctgccctgagtgactgttgactcacagttctctctccaaggggacatgggcctgtcctaatgctgccttaggggcttggctccagctggccctggggtctgcaggtcaccacctgcccctgtgcctggctttgaatttcctaacatccagagtgccctgggagtacagtgtccagcccgttgtgtgcagtaaacgtggtgttcataaccgggagctgggcagaagaggaacgacagagtccccctgcggaccctgggggctctgtatcctgaagttcaagcctagctcaccctgctgtgggcccagccctgcctgcactgacagatggcaccagcagggggcgcagcgctccgccgccacagttctctgtccccacctcagtgcagtcagccctggaccccccaccacttgccccccatagcacacagagccacgggccttcccagcccccacccctggcccttggtcactctcacctgctgcctcagctgaaggtggcctggcagggcctccctgaagctccctccagccaggcaagggtgggccagggccgagggctgagggccgcctccaagcattgaagccctccagggtggaagggcaggcagcagcatccagagctgaggcctgaggcttggtgtttgcactccaggcactggccctgcggtcccaccacttccagaaggtgggcaagaagccggaactcacgctggtctgggagcctgaggacatggagcaggagccagcacagcaggtcagaacccctctgtgtcccagccccctaagtcctgatgacccctctcctgcctcctgcggtgcccctcattccttcatctgtgtcccctgggctcccccagcactgcagcctcccgggtggggttttagggccctcccagctcacccagaccccctcctgtgggtcctgctttctggcaccaccttcccttccttgggggcaaccacagtggagagaggaggggctctgcctgtcccgctaatgcaggggtgctggccttctagggtcctttagagaacctgatgaaagctatgagtttacacccaagaaattgtctggaaccgttttcaccaacagtgtgccctgaacgcggacccaggccctcaggttgtgtttcataagccttgggagcgctcaggatgcatctgactccccaactctgccctgacccagggcattcttcctggagggggcccccattacagacaggcgagcagaggcttccagaggccgaaggaggggccaggggtcctgctgcagggatggaggcagagctgcgcctcgacatcaggccctgccatccttgtcccctcacggctgggctctgcacaggtcatcaccatcttcagcctggtggaggtggtcctgcaggcagagtccacagccctcaagtacagcgccatcctgaagcggccaggcacccagggccacctgggccctgagaaggaggaggaggagtctgacggtgagcccgaggactcragcaccagctgagctccaccagccgcctgccccgcctgccccgcctgcctgtcccgccacactggctttaggacctgttgacacggaggggggtttttaatttggtttttaacaactcaggggtttgtttttatttttatttaatttttgcagctcaacttttaaacaaactgcaggggagagggtggggctggaaggaaggctgaggcctggtcagcagtgaccccagcagagcaggccccagtcctcctgggaggctggccccccttttttctgggccctactgccctcctctgcccaggaaatgggggggtttcagcaactcagtgtcacagaataaaatcaagtgtggagtgccatctggtgtgtagggcgcctctgggaagcctgggcagcagaatgccccttgcacccagggcaagggacccagttcaggcttcacccctcgctgctgagccgatgtcaacacctggaactttcctgtcagttccaacacgattcagagctggctgcctggcagatgattgatactggagtctcattctgcctgattaaaaatggaattagtatgcaacactgagagcgcccccatcaccctgacgaatgtgactgtgtctgacgaatgtgactgtgtccaaccctgcccccacttcctctctgcaccagctccgcaggrcctggtgggagtcatgggtcctgtgataccccctcccctcagttcctcaagcagcactctgtgaggtcctgtgcccagctctggtgtgagtgggtgccccggcagcaccaagggagcctggacagaggagccggcctgggcctgggggaggggaggagggccctccagtgccttccaaaccaggaggggaaactggctgctggtgacacagcctgggtgacacggatcccacctgcctcagtcccgagcagagctggctggccactgggcagtcccttccccagccagcctgaccccagcctgtactccttccccctccgtgggggaagctccgtggcttggcgtccccgagagctgccagaaactaggatgaaagccatggtgagcacrgcctctgttcccctgcaccatttcctggggtgtccggattaacaagctcatttgatctggttacagtgaattttcttcaaagaaacactcaatagggtcccttgtcagagtgcctcgcagcgacagtgactgggtactgctgcctttgtcctgccaccgtcagacggggctggctatgggaggcaaccaaagacatcccgcacctgccctgggagcctttccctcctccagggctcagccacctcaggcggccttcmgtctgtgtgtcctgccacccccgagatgtcccagaggccacggtcaccccatctgttcctgtccccagaaccttctcctggagccaagtatctgcagggacagacaggcgagcgtctgggggtttggtgttggggtggagaaggctgtggggtgctgccccagcccaggcagcctgactgtgagagccccaaacaggagagccccaaacaggaaggaccagggcccttcccctcccctccatgctgcccaccctctgaggagcagtggccaagttcctctctgggcttctcgggccaggctgaccctgtcccccagggcctcccacgaagcatgggagctgttccctcacaggcagcacagacccggacggacacctgtccctatgtcccagcgcccccaggccccagtgaggagtagccaggggggtgaacaagggggttcctgctgcctgggcttgtttgggaagcagatgctgggctcagagtttcttcagagagcctcaccttccgtgctggccccagagcatggcgggtccctggagctgtggaggccatggcagccccagcccaccccaccccatctggggaagtggaaaccgtatccacgagggtcaggtcaggtctctgcctccagtgacctggcaaggttgtgcccagccaggacctgggctcaggcccaggcagccgccacaccctacccagagctcagagaaggcagcccagccttctccccacaccagtcacaccgagccccgcgtctgcattcactcctttaaggaacatggttgactgaatccggtgccgcgcattcacaggatggctctccatgggtccactggggcccagcctcttatgtggcccctcgctaaaaggactcaacagaaagagtgaccaggcaccgaccctcatctaaaggaggacttggccattccctgggctgtcccacagcacctgccggccagggcccgggcacagagcgagactgtcttttcctcaaggagacaccgtgggggagggagggagaggtagacaccaccaacctcattccatgaccagggcctggcgatgctcagaagccagtgagtgtgtccctgccctgaagggtcagtgctggccccctggacctagggggaagatggtgcaggcagtggcccagcctgaggaaggagctgaagctctcaagagtttgcagccaccctcctggggagagactgacgcctccccagttcctgttaggaaggacctcaggaaagaactggaattacacagcctggggtggcagcctcctggtccctgaggaggatgtcaggccgcagaagggaggaacgggcatgaagcttgggaagcgggcgccagaggaggcgaggcctctgcagaagcagcaccagaggccactgcagcggctccaccacccagcagcgccgccaggaggcaggaagtgggaggccaggcaggaggggctgtgattgcccaggtgccaggaggaagggctgagaggggacagtgcagatgtccagagaggcctgacagggacaggctgcgaaagtcacgggtggggatgggcttccgccagagttgtgtgtggcctgaggacagtgcagcaaggaggccccatggtgagcacatgcagccgaagtgacaggttgggctcctttgtgggacaagagcctctccaggccactgcagggtgttcagagaacaaggcctacaaggatctgctgtgcctgcagctgggcagtagaacactgagcatgcagggccggggtgggaagcaggaaagccacatggacgagagagccgggcctgcccagcagtgccttttgggagcgcaggcaggatgggatgtgcagctgtgacctgcccggcatagaactccgtctggctggggagaggaggtctcttctagccagaatggaccaggaggtcccgggaggacctgggaggaagtggattgagttgggccttagaaggagagccaggaacaggccaggtcaggggagctggagcctggctaggtatggagagagcagggtacacttgctgcaactgtgagaagagccaggggtggccctggtggcctgggcgcgtttagctgtgcctggggccaggcctgactggctgcaagtcattactataggcggagagtgcagagtagcgcgctcctgctgtcactccctcctccaagtccacaaagaggcaagaaagggaggattttaaggcctatccataccgcatggcaggtgagagcagaggagcaaacagcacttttggatcctggaaagcagaaggtgagtgtcccaggcgtagctgacctgagaaaggcgactccaaagccagcagcagcaacagctggaactgccccagcctgcaccacgggacccccagctctgagactgagagcagctctggggacctctgggctggggtgaagagggatggctggaatcattgttgcaaacaattcagtaggcaggcagctccctagatcccaccgtggtctgcagaggccagcacctgtcccgacctcttactggtcggccctggagagccatctcctacagaggcaaaatgaacggtctctgggccaggaccaggcctgttcagggggatgtgtggctaagtgcataagggatgctgagactacagccctcgtgcccaggcagcgctcagggcatggatagccaggccctccccatccaggccagagatgggaagactccatccaatctcattccatgaccagggactggcaaagctctcagttctctctccatcccagcaggagacaaagaacccaacctcagagattcctcaactcggagacccagccaggccaccctccagagcatctcagtctgcaagccccttggtgtgctcagagcttccagtcacactgctcatgcctatccgtgcacagccagggattgcccttcgtggaggaaaacttcatgaaacaaaaaacaagctccgtggggaacacagaccatagaggaaaaagaaagctgtagaaaaagaaatgatgaatgccttcctggaggtgagaaagccatcgtgaaacgagaggaggttgctccaaaaagttcctagagagcaaaacaagggcccttggaggcacaatgattgccaccgtggagacacatttcagcgccactagagtaaaaacactgcagacaggtgagctctcaacagatacatgtccctcgccttctcaggaaagatgggcagtaatgagggcagaagccacaaagaggaaaccgtagtgacaggacccagggtccttcaagctgcggtggggcaagcgctcgggacagtggtgagggagcagctcagccccaggtggtgcctggcaaccygccccgggacgtcccacccagggcagcagtagagtgacatggatagaaagctgaattccccagaagagcctggaggacattgaagtacttcgcatagagcctcgggttggattagtagtacatacagaatgatccacatgtgaagataagaccatgattggctccagagaaaacagcagtgcaagcaagaagaggtagctagtcacagtttacgatctggcaatagcgtttacacagtcatcaccatagaaatgccgagtcaggatctagtttactgcagaactctatcaggaggactggaagatggggacgctgtccacatgcagggaatgcagttggtgaaatggaagctaaatgctcattttcctcagtgggaagctgtggcttgaagatgactgtaaactctctttccgcctcttcaatcttgacaggccccagggctgctaagctaatatggcagaagggacactgtgccagttgcaggcccaggccttaagagactggcagcttcccctctctgtctctggaaacctacctgcccttctgtaaggaagcccaagcagctctggagaagcccttatggaggggcccactctcagcccacagccagcaccagttgggcagccacgcagacccccaacctgcaagccaggcccgctgaggcctcagtacacacaggcagtcccatcagccctgcccagatggcagttttgtgatcaaaatatagacgatagatgattgttttttaaggttgttgggggtagtttgtcacacaacgatagataatagaacatcagtaggctgtgtgtgtgtgtgtgtgtgtgtagcatatatatatacacatatacatatatacacatatacatatacacatacacatatatacacgtatacatatatacacatacatatatacacatatatacacatacatatatacacatacacatatatacacatacacacatacacatatacatatatacacatatatgcatatatacacatatatacatatatacacatagcttcaaattcagacatgaagaagtatcttatttagcaacagtggtaaatagtaaaacaccaagagagaggaaagtggttgcctcagagatgggaaaatgcaaggagggagacggaactgctgtttgttttaacaaaccttgtagatctgtttgatactttaaactacattcacatataacttggacaaaagtaaaaactgaagttgaaaaaaatgtattcatgctaatagcacaggaatgatccacaattggattccaaggcttcttgtacattcagcatagggtgtatgaaagagtccactattctagcaacagataaaattcctactgacacgcaacctcaggttcccactcgtttagaaggctgcgtatggtcttctacttaaagcctcaagtagcagtcatggcagtgacaaatcctcattgcctccatagaacctctaggctcatgtgtgagcccaggctgggctggggcccctgggagcccagggtgaggggccagtccctgggcagctccgtgagccaggagcagctgtgccacctggggaagggctgcacggtcgatgggtcttttctgcagaagagtgtgccccagcccttgctgggcacagatcaaagaggtgttcatgggtcgaaatcacagatttcaagggctgataggagtcagagtgggggggctgggagggctgaggcaggttaaagatttgagaggggctgctgtgtccacagctgcatcacactgctctgctgtcccctccatgttccccggcactgccgcctaccctggggtcttctggaagtaactgaaggccccctcaacctggctcatcatcaaagcagactgttgactagctgcaggcaaatatgaa

SEQ ID NO: 94602 - DNA, 54794 bp, Homo sapiens
aaccccgtctctactaaaaattaaaaaaaaaaaaaaaaaaaaaaattagccaggcacggtggcgggcgcctgtaatcccagctactcagcaggctgaggcaggagaatggcatgaacctgggaggcacgcgccactgcactccagcctgggcacacaacaagactctgtctcaaaaaaaaaaagaaaatttaaaaaagcagaatcacgcagggccttgtaagccatattcctttccattttgccttaaagaaattgaatgattattaaattaattcattagatgagtataaaacagttcacacagtgaacaaaaatcaaaaacaaagcacaatagatggcattaaaacagaaaaaacctctctcagatttgaataaattttacttaatcttcaagcttaagttcaagtctcaatcatttctataatcaatacttactgaacacctgctccaacaggccactggggacatataggaaggggacagagtccttgccctccaggagctccaggctcttgccaaagcctctctgacatgctcagctcaccatggcctctcttatttcaaagcctaacatagttcatgcaccactcactcactttggcacctaatcataatctgttttatattgttatcaaatgttatatgtgtacattcattatttaaaggaaaataatattttaagaaaaactcctgggctgggcatggtgactcatgccttactttgggaggggggtttgttcagcattttgggaagctaaggtgggtggatcgcctgagatcaggagtttgagaccagcctgaccaacatggtggaacccagtctctattaaaaatagaaaaattagctggacatggtggcacatgtctgtaatcccagctccttgggaggctgaggcaggagaactgcctgaacccaggaggcggaggttgcagtgagccgagatcgtgtcattacactccagcctgggcaacaagagtgaaactctgcctcaaaaaaagaaaaattcctggaggacagagttcacgtcatatcttttatttcattactatttgtactacaaaatgaagtaaagaattgagtatagtgtaaaatctctaatattcattagaattcattctgccaagcaatttatatattctatgtctccaaatctttaagtctgaaaacagttttgaaatgggcttgtaaagaaaaataaacgtgatgcatgtacacgaaacttctgatcagaaaataataaacaaatatgaagtacttcttaccacaattaaaacacacacacacacacacacacacacacacacacttctgcatgtactgtggcacaaaaagaggtcaagaaacttaaagagcagccaaaattattaagaggaggaactgaaggacacttataatagctaattattttaggcaattggtgactatgaaaaaaggtgcaatgaggctatctgctcaattagaatgctgaagataattttgggaccatttttcatagtgaatgaaaagctatagaacagtaatgccttcacttgaggcaattccaggaggctgaaaacaggacaggctaaaactacggaatttacattgcttcaggaaaggggaattaccttgggctttatctagtctaatcctgaactgcgacagagctagatgaggtctcccattggagaactgacataactgaagcctgagagggtactgcagatgagatcacatggatttaatttgggaaaatggagactaagaggcatgatcataaatctagattgtaagtggcacatacacattgaacccagctttttttctcatccaaacttgaaacatttggcaaaggatgcctttacaaacttcaggaaggcatctactttacttcaattttaaaggaacgtattacacagaggtggtatctcaaaatgacagagaacgcgagctctggaagtcagactgcctgtgttcataacccagctctaccacctagtagctctgggacctggggcaaattccttaacactctacttctcaggttcttcaatcaagaaaatggaggcaataacaggacttatctcacaaagttgtggtgaggattataatgcacgcaaagtactcagaaaaaaagggtctgacacatggtaagctctcaataaatagtggctattaatatacttctagaattcatcataaaaatcaggaaacaaattgattttttaaaggttcaaatgtatttaggaatgggaaatcaatatatggctacttatagmactgggacatacccaacttcaagatttgtgttgtctgaatgggatgaatcagtaagaccatgcctattttccttaagtgttcaactctagaaagtaatgactactagctttgctaattctttcttcattaattttgcaaaaggtataaaagcaatatggaaaaaagaggtagagaagacagaagtagattagcacacaaggtgatttcctcagatcagaatctgatgtgcccaatgaatgggtgatgttcccatgtttggctgaggcattccaggactttacatctatataaaagggcggggagtgggaagggggcaggtctattactccatcttcagttacagcactttccccttcacccactacactccacaaaagccttctttcagttccagtatcaggccagactctttcctgtctcagggctttggcaggttgatctttctcctacctggaacactgttactcccttactaccctcctgtggctacttcttcctcatcctaaattcccactttcaaagtcactacccttgatacccttatttaaaataggtctcttcactgggtgcagtggctcatgcctgtaatcctagcactttgggaggctgaggcgggcggatcacttgaggtcaggagttcaagaccagcctggcaaacatggtgaaaccctgtctctactaaaaatataaaaatcagccaggtgtggtggcatgcgcctgtaatcccagctactctggaggctgaggcaggagaatcacttgaacctgggaggcagaggttgcagtgagctgagatcaccccactgcactccagcctgggcaacagagcaagactcgtctaaaaaaaaaaaaaaaggtctctcttgttattttctatcacagcacccagtgtgcttcctgtgcagaaggcacttatgcaatttgtaactaattatttatgtatttatttttaatgtctcccccattagatagctccatgatggcaaagaacatctttgttcattatatcaacctcatttaccttaacacgttgactagcatagagcagacgctcaataaacatctgctgaatgaatgaaataatgactcctaaggctcctttcagctgcccaataattattaggtaataggataaaaaatacccagtgtaaagggggaggttttacgtggggtataggaaatatctgattcctcactatgataaaaaaacaaacaactaaatggctccattccaagaagtttagttaaaacttgactgatgtgggctgggcatggtggctgacgcctgtaatcccagcacgttgggaggccaaggcaggcggatcacaaggtgaggagatcgagaccatcctggctaacacagtgaaaccccgtctatactaaaaatacaaaaaattagccggctgtggtggcgggcgcctgtagtcccagctactcgggaggctgaggcaggagaatggcgtgaacccgggaggcggagcttgcagtgagcctagatcgtgccactgcactccagcatgggtgacagagcgagactccgtctcaaaaaaaaaaaccaacaaaaaaaaaacacttgactgatgtaatctattaatgagtaacagcttcctcagtgactttgtaagttttgctttcagatgtgcctcaatcattttaacaactggttatctaggcccaaatccctgtcaaataatgggttggctacataagaattagctgataagctcattaaaaatacagatttttggaccaaaactccaggagattctgatttagtatttgtgaagccttagaatccatataattaaaattttctcattttaaatagatattatgtgtatgtaatacacaggtccagaggtaagaaacagtttacagcaaagtttctcttctacccctgttcccctggcatcaagttcccctttccataagctactgctgttatcaatttcttgtgtatccttacggataattatttgcctaagcaagcacatatatatcctttgatttgcatatttaaagagctattctaaccttgttttttctaatctcatttacaatatatgttggaaatgagggtatctgcatttttaacaagcaccctagatgattttgatgtgaagccaaatatagaaacaactcatggacccacggttgtgagattaagttcaattcactacgacatattagaaactcaaggacattgaaggatgccctcaaaagtagcctcccttacttgatttctgccccctcgtctcacagagatgaactaaatcattcgccagtgtctccacagaagccaggaaaaactagccattcaaatggatgctgtcaaagcttcaattttcaataattggaattctttcctgctcattgttacccgaaattacaaacctgacaattcctgtgttacacaagacattcctgtatttaagttgaaataaggtgtgatcgtcactgaatgagggctggtttttctcctgccagttaagtagtttaatggagcacaaccgaaatactttctttactaatccttattcacacagcctcatccaaacttcccccaaaactgctttcttgccatttgagcaaaagcaattaacttagaaactgtggggagaagactgcttggtgaattctggagttcggggctcctcttatcctgacttgacctacctgggggcgatggctgggtccctaggcagctctatctcccccatcccacctatccctgggactgcaaagggagcttccttttggcactgagacaaggttctccgagagccacccgacctccgcagtgtctctgtcaccacgaggggcaccgcgcggcaggcatcctcacctttcctacaccgcgccaaggaggcaggagtgcactgggctacccgagcgaggcagagaacccgccgggatccagcgctggtttaccccacaccctcgtcgaaggggctctcgagggctcggtttctgcccaagccccctgcaaggtggaggcatgactcctccatcccttccccttgaattcaaacgtgaggatggtatctgcgaggctaaagcggggctcagatggcccaaacttcagaccactctcttctccactcggcttttcttccatcctcctggccatgtgtctccccgtgagtcgtggcccaagtctccccacctcggccagscgccaccctctggcctggctcccgccctcctgcccacctggccccttccccctcacccagcatgatggggctgagccgccgggccaggcctttggacaggtcgtacacgtagagcttcaccggatagagattcggcggctccattgggacccgtggcgacggcggccacgacggccctcgggcacccggcagcggcttggaccttcccgtacccgacgggagtgcgaagcggagggagagggggggaccgagcccgggcccgggctgaggggtgggggagaggccgccctgcgctgctcgcgcccccacacccgctaccggcaacgactactgtgaggtgacagagaggggacagggaggscccacacggaagagggggcgggggcagggatgcacttttgcgcatgtgcttacagtcctgacgtaggaaggggcggggctttgccgaagggggcggggctctcgctgatgggttggctttcgtcagggacataggtagaagctggttggggagtgtgcgtgccagcctgacgcgatatagtgcgcacatgcgtgatgacgtagrgggcgttgattgggaccgagtacagggcccgcgcatgcgtggattgtcgtcttctgtccaagttggtcgcttccctgcgccaaaggtaagcgggccgttatccatttgtgttgttcgccagctaggcctggcctcgtcccgcttcgctcggtcggtctcgcgcgcccccatagccttgctagagggttagcgttagccttaagtgtgcgaatccgaggagcagcgacagactcgagaccacrctccttcctcgggaaggaggcggcacctcgcgtttgaggcccgcctgcgtttgaggcccgcctgcgcttgcggcccgcctgcgcttgaggcctgtctgcgtttgagatctcattgggcgtgattgaggaatttggggaggtttttgrgcggtattgaggrcgagggggtccgttagtcagcatagaatcctggagcgggaatccctcaccgtctaaatggcgtcgggggcgggacctccgggatctggcttccgcgggccgccgccggccctgaaacgtgagggatagctgagatgaggcagctactgggatggcccccatgcgcatttacatgcagtccgactgccgagctttcgaggcagcaggatttacygtccacattcctcactactaaccaagcttttagaacagatctcacaagaacctagaggtcggtattttttcgatttaaatttgcctgttactgacgttaacgtctttcgcctagtgagcagtagccaacatgtcagggtgggagtcatattacaaaaccgagggcgatgaagaagcagaggaagaacaagaagagaaccttgaagcaagtggtaagtgacttcagcatgtagtgccattcggtgtgtggaagaaagaccttccctgcctatctctgctggatggactttgctgtttgatggcctgcccttctcctcccagataattctgaaattcttttcttcctttgaacttcgcagagctaccctaggctcttatatgcagatcttactctagtgtgccctaagttttttttggacactggtagtttgacatcttttggtccctgataaatggccatgaccataggtattttttgtcatcttaagtggttcaggtgagacccttctcatccaggaaagtagtgttaccattccaggacctcagtgtaaaaatgcccccaccctgcaataactacaccaaccaaagaataaacgcaagcaacacagttacaggaaagtgattgattccctcactatagcctccacgtttgggagtgtatgtgcaggcaacacagtaacacataaaacaaaggaagagaaataggggtacatgtaatcttcatactggttaatttaactcctgagcagaaaaattttgaatatttttattaaaaatgagaaacggccaggcgcggtgtctcaagcctgtaatcccagcactttgggaggccgaggcgggcggatcacgatgtcaggagatcaagaccatcctggttaacacggtgaaaccccgtctgtactaaaaaaaaaatacaaaaaattagccgggcgtggtggcggtcgcctgtagtcccagctgctcgggaggctgaggcaggagaatggtgcgaacctgggaggtggagcttgcagtgagccgagatggcgccactgcattccagcctgggtgacagaatgagactctctcaggaaaaaaaaaaaagtgagaaacataggaaatacaaaaaagaaaaaaatttgctataatctaccactctaacacaaccactaccagcattttgacatttttgtatttttctttcaagtatctttcaatatttatttcctaatgaaatatatatattttttaattttttaatagagacaggctggagtgcagtggtgagatcatcgtagctcactgtaacctcaaactcccgggctcaagtgatcctcctgcttcagctacctcagtagctgggactacaagtgccgccaactcccaataattttttaattttttgtagagacaggatcttgctatgttgatcaggctggtctcaaactcttggcctcaagcgatacccccaagccttggcctcccaaagttctaggtttatagtcatgagcctccatgcccagactgtatctgatttctttttctttttttttggagacagtcttgctctgtcgcccaggctggagtgcagtggcgcgatcttggctcactgcaagctccgcctcccgggttcatgccattctcctgcctcagcctcccgagtagctgggaccataggcgcccaccaccacgcccggccagttttttgtatttttagtagagacggggtttcactgtgttagccaggatggtcttgatctcctgaccttgtgatccgccctactcagcatcccaaagtgctgggattacaagtgtgagccactgcgcctggcctatctgatttcttgtattgtaacgatagtgcatatacatttatttatttattgagacagagtcttgctctgtcgcccaggctggagtgcactgactcaatctcggttcactgcaacctccgccaccccagttcaggctattctcccatctcagcctcccaagcagctgggatgacaggcgtgtgcgccaccacactcggctaatttttgtatttttagtagaggcagtgtttcaccatgttggccaggctggtcttgaactcctggccttaggtgattcacccacctcggcctcccaaagtgctggaattacaggtgtgagccactgtgcgtggcctatagctcattttaaatataccataatttggccgggtgtggtggctcacacttgtaatctcaataaatatactgtaatttgtctgggtgtggtggctcacgcctgtaatcccaacactttgggaggctgaggcgggcagatcacttgaggtcaggagttcgagaccaccctggccaacatggcaaaaccccatctctactaaaaaatacaaaagttagctgagtctgtggtggcatgcacttgtagtctcagctgcttgggaggctgaggcacgagaattgcttgaaccggggaggcagaggctacagtgagctgagattgcaacactgcactccagtctgggcaacagagtgaaactctatctcaaaaaaaataaaataggggccgggcgcggtggctcacctctataatcccagtactttgggaggccgaggcaggtggatcacaaggtcgggagatagagaccatcctgactaacatggtgaaaccccgtctctactaaaaaaatacaaaaaattagccaggcgtggtggcaggcgcctgtagtcccagctactctggaggctgaggcaggagaatggcgtgaacccgggaggcagagcttgcagtgagccgagattgcatcactgcactccagcctgggcgacagagtgagactctgtctcaaaaaaataataataaaataaaaaataaggccgggcgcggtggctcacacctgtaatcccagcactttgagaggccgaggcgggtggctcacgaggtcaggacatcgagaccatcctggcaaacacggtgaaaccctgtgtctactaaaaatacaaaaaaatagccaggcgtggtggcaggcgcttgtagtcccagctactcgggaggctgaggcaggagaatggcgtgaacccgggaggcggagcttgtagtgagccgagattgcgccactgctctccagcctgggcgacagagcgagactccgtctcaaaaataaaataaaataaaataaaataggtcaggcacggtggctcatgcctgtaatcccagcatttttggaggccaaggtgggcagatcacctgaggtcaggagttcaagaccagcctggccaacatggtgagatcctgtctctactaaaaatacaaaataagccaggcgtggtagcgcatgcctgtaatcctgctactcaggaggctgaggcgggagaatcgcttgaacacgggaggtggaggttgcggtgagccaagatcgcgtcatcgcatgtttaaggttcttgacacacattgccattttgttctccaggagacagctaattaaacttattaagaagcagcaggccatgcacagtggctcacggctgtaatctcagcactttgggagtaggaggctgaggcaggctatcacctgaggtcgggagtttgagaccagcctgaccaacatgatgaaaccccatgtctactaaatacagaaaatttgctgggcatagtggcacatgcccgtaatcccagctacttggagatgaccagacattatatacctttttaggaaaaaatatgttacttatgataaagtcatgctgaagaaagaaaacctgaatcagattaagcctctctaggtccttagtaggaaggacagaggactctgttaatctacaccaaaagaggtcaatcggcaggccaggcaaggtggctcatgcctgtaatcccaatactttgggaggccacggcagaggatcgctcaagcccagaagttcaaggctgcagtgagctatgattgcgccactgcattccagcctgtgtgagagaacaagactgtttctaaaataattaattcaataattttatttttttatttgagatggaatctctgtcgccaggctggagtgcagtgactaatctcggctcgctgcaatctctgcctcccaagttcaagtgattctcctgcctcagcctccctagtagctggaattataggcatgcgccaccacacacagctaattttttgtatttttagtagagatggggtttcaccatgttgtccaggatggtctcaatctcttgaccttgtgatccacatgtctcggcctctgaaggtgctgggattacaggcatgagccaccgtgcttggccatttatttatttttattttttttgagacgggttctcgctctgtcacgcaggctggagtgcagtggcgcgatcttggctcactgcagcctctgcgtcccagattcaagcgattctcccacctcagcctccatagtagctgggattacaggcatgcgccactacacgcagctaatttttgtatttttagtagagatggggtttcaccatgttgtccaggatggtctcaatctcttgtcctcgtgatccacatgcctcggcctcccaaagtgctgggattacaggcgtgagccactgtgcccagccaaaataattttttattttttatttatttttttgagacagagtcttgctctgtggcccaggctggagagtagtggtgtgatctctgctccctgcaacctctgcctcccaggttcaagtgattctcctgcctcagcctcctgattagctgggattacaggtgggcaccaccacacctggctaatgtttgtttgtttttttttttgttttttttttttgagaccgagtctcactctgtcacctaggctggagtgcagtggcgtgatctcggctcactggaagctccccctcccgggttcatgccattcccctgcctcagcctcccgagtagctgggactgcaggtgtccaccaccacgcccagctaatttttttttgtatttttagcagagacagggtttcaccgtattagctaggatggtctcgacctcctgacctcgtgatccgcgcgcctcggcctcccaaagtgctgggattacaggtgtgagccactgcgcccagcctaatgtttgtattttcagtagacacagggtttaaccatgttggctaggctggtctcgaactcctgatctcaagtgatcctcccgccttggtctcccaaagtgttgggattacaggcatgagccactgtgccccgcctaattaatttttttaaaaaggcaatcagcaaaattcagaatgtggaaaagtgtataacacaaagcatcttggctcttcagaagataaattacaagggaaaaaagagagggtatctgtagatgaagaggctttagaaaattaagtcaaagctaatgtttagaaatgtaggtttgggtgataaaattataaagaaacgtaaggggtgggtgtgtggtagatcatgcctataatcccagctcttaggccagggcggggtggggtgcggtggctcacgtctataatcctagcactttgggagtctgaggtgggtggatcacctgaggccgggagttcaagaccaacctgggccaacatggtaaaactgcgtctctactaaaaatacaaaattagctgggagtggtggcgggcgtctataatcccagctagttgggaggctgaggcaggagaatcgcttgaacctgggagacggaggtcgtagtaagccgagattgtgccactgtactccaccctggcaacagagcgagactccgtctcaaaaaaaaaaaaaaaaaaaaaatagaggcctggtggggaggattgcctgagctcagaagttttagatcagcctgggcagtgtagcacaataccatctctacagtaaacttaaaaaattagctggtcatggtggcacacacctgtagtcccagttgctcaggaggctgagtcaggatgatggcttgagcccaggagttcgaggttgcagtgagctatcatcgcgtcactgcactccagcctgggtgatgggagtgtgaccctatctcagaaaaaaaagtcaggatattgacttttttggggaggtgggtgttgtaattgggagggaatgtaagagggatttctggggtgtctggcaagactcaatttcctgacataggtggagattttatggttgttcaccttataataatttattaggttatactttcctttatggcctttatttatcttatatggtaaacaaatacgaaaacaaggacaaacattttcttccatttttttccccataggagactataaatattcaggaagagatagtttgatttttttggttgatgcctccaaggctatgtttgaatctcagagtgaagatgagttgacaccttttgacatgagcatccaggtaagactaccttttaatttaagacaaatttaaaaacagtattggctgggcatggtggcggctcatgcctgtaatctcaggacattgggaggccgagacgggcagatcacttgagcctaggagtttgagaccaacctggtaacatggagaaaccccgtctctacaaaaaatacacaaatcatccaggtgtggtggtgcaaacctgtagtcctagctactcaggaggccgaggcgagaggcttgcttgagcccaggaggtcaaacagaaaaaagaagtaggctcctcctcttgcagagatggaagtataaaggaagaagggaagttcccacagttatagtgtggaaaagagtgagtgatacttgggagttgactactgcctgtggttggggaagatggctacaataaaaaggcaacttcaattttaaaacaggcacaggacttgaaaagacatttctccagctgggcgtggtggctcatgtctataatcccagcactttgggaggctgaggcaggcggatcatgaggtcaggagaccagcttggccaacatggtgaaaccctgtctctactaacaatgcaaaaataattagccaggcatggtggtgcgcttctgtagtcccaggtactcgggaggctgagtcaggagaatctcttaaacccaggaggcggaggttacagtgagccgagattgtgccactgcactccagcttgggcaacagagtgagactctgtctcaaaaaaaaaaaaaaaaaaaaaaaacaattctccaaagatatgcagatgtccaacaagcacaggaaaagatactcagcatgtttagtcattagagaaaggcaaatgaaaaccataatgagctaccactcacacccactatataaacaaactaaaatttaaaaaacaccagcagaaaataagtgttggcaaggctgtggagaaattggcgtgattgactgtacctgacctgttcttgtttctttaaattgaggttgtgtttcatgtaacataaaattaactatttgaaagtatacaattcagtgacacttaacacattcacaatgttatgcagccaccacctctatcttattccaaaacattttgaatggctaaacagtggcrtatagatatacattccatgaaaaggaatgaataattgatacatactacaaagtagatgaatcttgaaagtattatgctaagtgaaagaagccagatacaaaaagtcaaatattgtatgatttcatttacatgaaatatccagaataggtaagttcttaacgcagaggggtggttggttacctgaggcacagggaagagaggaacagggagcaactgctcaatgggtatggggtttgcttttggggtgatgaaaattttttggaactagagttggtagttgcacaacattgtgaatgtttgtgtgtgtatttatttatttatttatttttattattatttttgagacggagtctcgctctgtcacccgggctgtagtgcagtggcgtgatcttggctcactgcaagctccgcctcccgggttcatgccattctcctaccttagcctccagagtagctgggactacaggcacctgccaccatgcctggctaattttttgtgtttttagtagagacggggtttcaccgtgttagccaggatggtctcaatctcctgaagtgatccgcctgcctcggcctcccaaagtgctgggattacaggtgtgagccactgcgcccagccttgtgtgtgcatttatgctttttttttttttttttttgagttggagtctcgctctgtcaccaggctggagtgcagtggcacaatcttggctcactacaacctctgactccctggttcaagcgattctcctgcctcagcctcccgagtaggtgagattacaggcacgtgtcaccatgcccagctaatttttgtatttttagtagagatggggtttcaccatattggccaggatggtcttggacccctgacctcgtgatctgctcgcctcggccttccaaagtgctgggattgcaggcgtgagccatggcacccggccttgctttttttttttgagatggtgtctcactattgctcaggctggtttggaactcctgggctcaagcaatccacccacctcagcctcctgtgtggctggggttaaggcatgtgccactatgcctggcacattgtgaatgtattaaatacctcttaattgttcacttagaaaatctaaatttcagcttaattaaaaagattagtgtttctttttttttttttttaatttattttttttattgatcattcttgggtgtttctcacagagggggatttggcagggtcataggacaatagtggagggaaggtcagcagataaacaagtgaacaaaggtctctggttttcctaggcagaggaccctgaggccttccgcagtgtttgtgtccctgggtacttgagattagggagtggtgatgactcttaacgagcatgctgccttcaatccatttaaccctgagtggacacagcacatgtttcagagagcacagggttgtggggtaaggtcacagatcaacaggatcccaaggcagaagaatttttcttagtacagaacaaaatgaaaagtctcccatgtctacttttttccacacagacacggcaaccatccgatttctcaatcttttccccacctttccccgctttctattccacaaaaccaccattgtcatcatggcccgttctcaatgagctgttgggcacacctcccagacggggtggtggctgggcagaggggctcctcacttcccagtaggggcggccgggcagaggcgcccctcacctcccggacagggctgctggccgggtggggggatgacccccccacctccctcctggacggggcggctggcagggcggggggctgacccccccacctccctcccggacggggcggctggccaggcagaggggctcctcacttcccagtaggggcggctgggcagaggcgcccctcacctcccggatggggcggctggcctggctggggctgaccccccacctccctcccggacgggtcggctgctgggcggagaggctcctcacttcccagatggggtggctgccgggcggaggggctcctcacttctcagacggggcggctcccggacagaggggctcctcacttctccgacggggcggttgccgggtggagggtctcctcccttctcagatggggcggctgggcagagacgctcctcacctcccagacggggtcacggccgggcagaggcgctcctcacatcccagacggggcggcggggcaaaggygctccccacatctcagacgatgggcggccvggcagagaggcgctcctcacttcctagatgggatggcggctgggcagagacgctcctcactttccagactgggcagccaggcagaggggctcctcacatcccagacgatgggcggccaggcagagacactcctcacttcccagacggggtggcggccgggcagaggctgcactctgggcactttgggaggccaaggcaggcggctgggaggtggaggttgtagcaagccgagatcacaccactgtactccagcctgggcaccattgagcactgagtgaaccagacaccgtctgcaatcccggcacctccggaggccgaggctggcggatcactcgcggttaggagctggagaccagcctggccaacacagcgaaaccccgtctccaccaaaaaaatacgaaaaccagtcaggcgtggcggcacgcgcctgcaatcgcaggtgctcggcaggctgaggcaggagaatcaggcagggaggttgcagtgagccgagatggcagcagtacagtccagcttcggctcggcatcagagggagaccgtggaaggagagggagagggagaccgtggggagagggagaccgtggggagagggatagggagagggagagggagagggattactgtttcttttgtgtacttcgtagagaagaattttcacagatttattatatatctcatgtctcataattttagaatttggaactgaacagaaacttttcatgttctaatttgtgtacaaatagttcttggtaggcagggtgtggtggctcacgcctgtaatcccagcactttgggaggctgaggtgagtgaatcacttgaggtcaggagttcgagaccagcctggccaacatggtgaaattctgtctctactcaaaatacaaaaattagccgggcatggtagtgcaggcctgtagttgcagctattcaggaggctgaggcaggagaattgcttgaactggggaggtggacgttgcagtgagccaggatcacgccactgcactccatcctgggtgacagagagagactccatctcaagaaaacaagaaatagttcttgtagttggcacaccagaatatcttgcaccaaaaaaaaagaataagctgggtgtggtggtgtgcacttgtagtcccagctactcaggaggccggggtgagaggattgcttgagcccaggagtttgaggctgcactgagctatgattgtgccagtgaactctagcctgggcaacagagtaagaccctgtctcttggaaaaaaaaaaaaaaagaaaaggctgggcgcggtggctcatgcctgtaatcccagcactttgggaggccgaggtgggcggatcacgaggtcaagagatcaaaaccatcctggccaaaatggtgaaacctcgtctctactaaaaatacaaaaattagctgggtgtggtggcgtgcgcctgtagtctcagctactccagaggctgaggcaggagaatcgcttgcacctgggaggcagaggttgcagtgagccgagatggcactattgcagtccagcctgggcaatagagccagactctgtctcaaaaaaaaaaagtgtatgtaaaataaaataatagaactatgaataaaaacaatcgttaatttaaagtggttctcaaacagaattacttgcaggacattaaaacacagactacagaaccttgccccacaatcaaaatttctgattctctatgtctagaatggggaccaagaatttgcatttctagtaaattgtcaggtgatgctgatgttactgatttggagaccattactttgaagagcagtgctttaaccttttttagaccgtggacctatttttttttttttttgagacggagtctcgctttgctgccctggctcttggctcactgcaagctctgcctcctgggttcacaccattctcctgcctcagcctcctgagtagctgggactacaggcacccaccaccacacccggctaattttttgttcttgttttttagtagagatggggtttcaccatgttagccaggatggtctccatctcctgacctcgtgatctgcccacttcggcctcccaaagtgctgggattacaggcgtgagccaccgcacctggccaaccgtggacctctttgaggatatgatgacagctacataccttcccctcaaaaaagatagtactcacaattctacctgtaatttcagagagttaatggaacccttgatgcctaaagacctcagaagaaaatgtagtgttaggtaggaaggaaatgagacattcatagatgagcacaatttgataaccgataataagtattcagtagttgataagcaatagaaaacattttctaaaattctgttttagtttttgtttttaatttttagaacctaaaaggagcccttaccagattcttttaaaagtttgtagactcctcagagtagattaaaatatttatggaaatgactacttgccatgtggattgttgtcagtgactagctatagtacatgttctgcatttaaggagagaatagctgtggacgaaggccagctagagctcaggcaggacatggaggggatcaccatggttggtttattcctcagctttgcaggttccaaaacttaatttttttttttttttttgagacagggtctcgctctgtcatctaggctggagtgcagtggcatgatctctgcccactgcagccttgacctcctgtgctcaggtgatcctcctgcctcagcacccctgagtagctgagtagtggggactacaagcatgtgcatgcccagctaatttttttgttttttgtagagacattgttttgccatgttgcccaggctagtttcaaacttctgtagcaatcctcctgtgttggcctcccaaagtgctgggattataggcatgagccactgtacctggcccgaagacttaattttgttagtgctccagaattaggtaggcccctagaactgatgaactctcttttttttttttttttgagatggagtctcgctctgttgcccaggctggagtgcagtggcgcaatctcagcccactgcaacctccacctcttgggttcaagcgattctcctgcctcaacctcctgagtagctaggattacaggcacgtgctaccacatccaactaatttttgtatttttagtagagttggggtttcaccatgttggtcagaatggtctcgaactcctgacctcgtcatctgctcgccttggcctcccaaagtgctgggattataggcatgagccaccgcgcctgggtgaactgatgagctcttacaagacctgatgtaccagatgctgacattagtttatatagaggggtagacctttcctgttactggaatactgatgtctttaactgggtagttaaacagttttatttcaaggatgcgcttactggtagttattgacttattttcaggtcacatgtacttaagcattgtaattattttatatagtcatcccttgttattgagggaattggttgcaggactccccgtggattccaaaatccgaggatgcccaagtcccttaaataaaatggcatagtatttgcatataacctacacacatcctcccctatactttaagtcatctataggttactcatagtacctaatacaatgcctatgcatcacttcattcacatggcttcaatgtagtacttggcacatggcaaattcaggttttgctttttgaaacgggaatttctttgtttttcctgaatatttgagatttgaggttggttgaatacatagatgcagaaccagcagatatggagggccaactgtgtatataaactctgtttcctgataccaaggtacttgaaagatcacatgacctgtccaaattcagccagttaagtaagtgacatcagtaggactcaactccaggttttctgattccaatgctttgcttcgccccaactcccatagcacaatttcctccctctgatacttcttttccttttttcttgagataaggtctcactctgttgcccaggctggactgtagtggtgcagtctctgctcactgcagccttcacctcctggggtcaagcgatctttcacctctgcttcccaagtaactgggaccctgtgctgccatgcccagctaatttttttgttttttttttgtttggtagagatggagtctcactatgttgcccaggctggtctcgaactcctagggtcaagtgattctcccacctcagcctcccaaagtgctgggattgctacagatgtgagccactgtgcctggcctgaatatacgtattgktaattctctgatttcaatggcagggactgcttatacttctaatgtatacttactgcattctggtttttgttaaaatttgatatttatgsccattactttcactgattcattacccctgaaggtagggatcttgccttattttagtgccatatacaaattcagtgcacatattttgagcaactaataggtactgagcacttatggagcttccatttagtggtaagtaaatattaattgaattttttttttcagtgtatccaaagtgtgtacatcagtaagatcataagcagtgatcgagatctcttggctgtggtgttctatggtaccgagaaagacaaaaattcagtgaattttaaaaatatttacgtcttacaggagctggataatccaggtcagtaatattttaagatcagcttttcccttatatatgagaatatcagtactctgatcaaagaggactgtggagaaggaagcaagttacatcttgtctaggagtatgctttcctccataaggggaccttgctcgatgtggactttgttaaatgggttaaacagctctggggtgaaaaagggtccttctgttagtcttgtggtaaaggcagccactgacattcttctgatttttctttccatttgactccctgcctctgatcaggtgcaaaacgaattctagagcttgaccagtttaaggggcagcagggacaaaaacgtttccaagacatgatgggccacggatctgactactcactcagtgaagtgctgtgggtctgtgccaacctctttagtgatgtccaattcaagatgagtcataagaggatcatgctgttcaccaatgaagacaacccccatggcaatgacagtgccaaagccagccgggccaggaccaaagccggtgatctccgagatacaggtgggcatatttccccrttctcttaaattggcacttaattrttgtttttttattttttatttttttaggagttcaggagtcttggctcagcctcagcctcccaagtagctgggactataagcatgtgctgttgtgcccagtgcagttttattgctttctgtgtacctgacttcaggcatgtgctttttaccatttagaataaaataaaaaaataaagtgaagccagaagatgcctgtgtaacattaacactgcagatggccatgccattagctgtctaaaggactctgtcagaacaagattgtcttgattttttttttttttttttttttgagacggagtctcactctgtcccccaggctagagtgcagtggcacaatcttggctcactgcaacctccgccttccagattcaagcgattcacctgcctcagcctcccaaatagctggaattacaggcatgaaccactgtgcctagctaatttttgtatttttagtagagatgggggtttcaccacgttgaccaggctggtctcgaactctggacctcagatgatccaccacctcgccctcccaaagtgctggggatgacagatgtgagccactgtgcctggccagttgtcttgactttaatattaccacgaatggtgattatttgaaaagttgtctgaagtcattatagcagttggtttccttagtcactttttctaagtcctgaaaatgttaatagtctagttttcagggagcttttaaaagcatgtttcagttttaactgaaagaacttctcacttgctgaaaattgttttttcctccctcacttttgtttacccttgcaacaggcatcttccttgacttgatgcacctgaagaaacctgggggctttgacatatccttgttctacagagatatcatcagcatagcagaggatgaggacctcagggttcactttgaggaatccagcaagctagaagacctgttgcggaaggttcgcgccaaggagaccaggaagcgagcactcagcaggtgtgcactcagcccgggtcagctgcctacactgcccttaaatcagaagcaggctgggcgcggtggctcacacctgtaatcccaacagtttgggaggccaaggcaggcggattgcttgagcctaggagttgagaccagcttgggcaacatggcaagaccctctctctacctaaaaaaaaaaaaaaaaaaaatcagaagcaatgcactgctacacattgcttaacaaaccagaagcaatacattgctctgacctgactggctacttaactcgactatgccactgcctcactgtcttcctctaaaatagtttatttcaggatagcagaagctatttgctgctttatctctggcaagagctggcatgatatttctctaaagtaacacagccctccatttcgtgggggtagacagttatggtctaagagtatccttagctgtactcactagtacagtcatgtgttaattaatgatagggataccttcttagaattgcgtcattaggcgattttgtcattgtgcaaacatagagggtacttcacacacccagagagtacagcttgactacacacctgggctgtgtggttagcctgttgctcttaggctacaaacctgtatagcatattaccatactgtttactgtaggcaatggtaagtatttgtgtatctaaatgtatctaaaggtatagaaaaggtacaataaaaatatgatataggccagacacggtggctcacgccttgtaatcccaccactttgggatgccgaggcgggtggatcacaagttcaagagattgagaccatcctggcctacatggtgaaaccttgttctctactaaagatacaaaaattagctggacgtgatggcgcgcgcctgtagtcccagctactcaggaggctgagaatcgcttgaacccaggagtcagaggtggcagtgagccaagatcatgccactgcactccagcctggtgacaaagtgagactccgcctcaaaaaaaaaaaaaaaaaaaaaagaaatatggtataaagataaatggtatacctgcatagggcacttaccacgaatggaacttacaagactagaagtggctctgagtgagtagtgagtgaaagtgaaggcctaggacatgactgcatacttttatataactggcagcacagtaggtttgtttacacagcatcactacagatgcatgagtgatgccttgtgcgacaaacttacgacagctatgatgtcagtaggtgacaggaaattttgagcttcattatcatcttaacagaccatcattgtatgtgcgccctattgttgaccaaaatgttagtggtgcatgagtgtgcattatttgctttattcttctctgtaaattggtgacaacaatacctgcctcattaggttactgtgaagagttagtgaagagcacaaaacagagcctgttagggagcaaaaactcataaatgttagttatgatcattgttaaaattgtgtcattctgatttcttataaacctgagaccaatgggaaccagattgctagattctttttcttttttttttttttttttttttttttttttgagacaaagtctcaccctgttgcccaggccagagtgcagtatgatcacagctcaccttagcctcgacctcctgagctccagtgatcgccccatatcagtgttctgagtaactgggaccacaggcgtgtgccaccatgctctgctgattattttttatttttatttttattttttgggagatggggtctcactgctttgcacaggctggttgcaaactcctgggctcaagaaatcctcccatttaggcctcccaatgtgctgggattacaggcgtgagctaccatgtgtccatgtgtagcctagattctctctctttttttttttttgagatggagtcttgctcttttggccgggctggagtgcagtggtgcggtctcaggtcactgcaagctccgcctcccgggttcatgccattctcctgcctcagcctcctgagtagctgggactacaggcgcctgccaccacacccggctaattttgtatttttagtagagacggtttcaccgtgttagccaggatggtctcgatctcctgacctcgtgatccgcccgcctcggcctcccaaagtgctgggattacaggcttgagcctctgcgtccggcctagattctgttttttttagagagccttgatattagaatcctaaaggttactcattgtttcttcctaaagacctacagccttttatttattaagagacggtgtctcactcttgcccaggctggagtacaatggcaccacagcctacaactcctgggctcaggcagtcttctgtggtcttcctgtctcagcctcccaagtagcttttttttgagacagagtcttgctctgtcgcccaggctggagtgcagtggcgtgatctcagctcactacaagctccgcytcccgggttcatgccattctcctgcctcagcctcccgagtagctgggactacaggcacccgccaccacgccgagctgatttttttgtatttttagtagagacggggtttcaccgtgttagctaggatggtctcgatctcctgaccttgtgatccacccgcctcagcctcccaaagtgctgggattaagggcgtgagccaccacaccctgccccaagtagctttttttgtagacttggggctcttggtatgttaaccaggctggtctgagactcctggcctcaaacgttcctcctcaagctttcattctggagtggtttcctcagtataggggtccatgacctttggtaacttttaagcagtttttaagagtttactgacaattctaccagaaaacccaagaaatttttttgaggagaccttgaatcactcattgccacagttgtagttttgtcattgttctccttttcctcttggaaactatttttctttcctcagacaagtatcttgtcacctcttcacctgtcttgaaatgatgcgatgttgtttatactrcagtttggaagtctactacacattttggtggagatggatggggaggatagaatagtgggtaaatgtaggccttgttgtcagattgtttggattctagtcctggtccctttgctatgcgacctgacttctctgagccttagtaaaatgggagcaaaaaatggtacctccttgggtaggtgcagtggctcacgtctgtaatcccagcatgttagtaggccgaggcaggaggattgcttgagtccagaagcaagaccagcctgggcaacccagggagaccctgtctctctttattaaaaaaattaaaaaactgtactttcacataggattgccgtgagcattaaatgagataacctaggcatagtgcttggcccgtggtaattatttataaatgttagctgttcttattttgtggaacagtcattgtaggatggatacttgatataaataataataaattggagatattgagaactaacaatgccttagggctaaggcctagaaaaatattaaacttagctttttaaaaaatttttaatttttgtgggtacatggtaggtgtatatatttataggatccatgagatattttggtataggcatgcaatgcgtaataattacatcagcatagatgggttatctatcaccttaagcactaatcctttgtattataagcaatctgattatactcctttagttattttaaaatgtactgttattattgactatagtcaccctgatctgctctaaagtattagatcttattcattctttctattttttgtactcattaaccatccccactgccccatcactacccccttacccttcacagcctctggtaaccatccttttctgtgtccatgagttcaattgctttactttttatctcccagaaataagaacattcaaagtttgtctttctgtgcctggcttatttcacttaacatagtgaaacaacattgcatagtgaatgcaacaacatttatgttgttaccaatgacaggatctcctttttttttgagcctgagtcttgctcttgttgcccaggttagactgcaatggcgcgatctcggctcactgcaacctctgccttctggattcaagcagttctcctgcagcctcccaagtagctaggattacaggcatgcaccaccacgcccgactaattttgtatttttagtagcgacacagtttcaccatgttgaccaggctagtctcgaactctggacctcaggtgatccacctgcctcaggatctcattttttatggctgaatagtactccattgtactacactttctttatccattcttcttttgatggacacttaggtcgcttccaaatcttggctgttgtgaatagggctgcaataaacatgggagtgcagatatctctgatatacagatttcctttctttggggtgtatacctagcagtgggattgctggatcatacagtagttttctttttagtattttcaggaacctccaaccattttaactgaggtgagatgatatctcagattatgttagagttttttcctgtagagttgtttgggttccttatatattctggttcttaatcccttgtcagatggatagtttccagatattttctcttctctttgtcgatcatttcctttgttgtgcagaagctttttaacttgatgtgatcctatttgtccgtttttgctttggttgcctatgcttctggagtattacttaagaaatctttgccaagctcaatgtgctggagaatttcccggtatgattttgtggttccacatacattttaggattgttttgtctatttctgtgaagaatgtcattggtattttgatagggattgcattgaatctgtagattgctttgggtagtctgggcattttaacaatatttaaacttactgtagcaatctatagagtgagaccctgtctacaaaaaaaaatagttacttttgaagattgtgcagttttgtaattggttgcatttatcgtcaactctccttcaagcagcctttagacactgattttcacatctaagaagccaccaaatggttgatgttgttagtaatgcatctgttaccaacactcatctgtgagtcacatcatgcatttccaagttgatctgaaggtatattaggtgcttgccccaggaaccaaaatttctatttgtggctctgctcaaaaccagtgttgtctccacggtgtgaacctgtatatcttcgaactatacagacacttgtctaaacatgttcttttctttaaatactgctaggtgttccacaacagtgaagatttggttattggagactgttcttttctgataaaagtgttatagctggccgggtgcggtggctcacgcctgtaatcccagcactttgggaggccaagggggcggatcatgaggtcaggagttcgagaccagccacaccaacatggtgaaaccccgtctctactaaaaatacaaaaattagccaggcttggtggtgggcgcctgtagtcccagctactcaggtgactgaggcaggagaatcacttgaacccggttggcggaggttgcagtgagccgagatcacaccactgcactccagcttaggcgacagagcgagactccatctcaaaaacaaaagaaaacaaaaaagtgttaaagctgtaaatttgtctctgagcatggctttagctgcatcgtatacattttgatatattgtgtttttactttcatgcagttcaaaataattttaaattttctggccgggcgcgctggctcatgcctgtaatcccagcactttgggaggccgagacgggtggatcacctgaggtcagtagtgccagaccagcctggccaacatggcgaagcaccgtctctactaaaaatacaaaaattagctgggcgtggtggtgggcacctgtaatcccagctactcaggaggctgaggcaggagaatcacttgaactcgggaggcggaggttgcagtgagctgagattgcgccactgcaytccaccctaggcgacagagtgagactccatctcaaaaaaaaaaaaaaattagctgggcgcagtggcatgtgcttgtagtcccagctacttgggaggctgaggcaggagaatctcttgaacccgggaggcggaggttgcagtgagctgagattgcgccactgcactccaccctaggcgacagagtgagactccatctcaaaaaaaaaaaaattagctgggcgcagtggcatgtgcttgtagtcccagctacttgggaggctgaggcaggagaatctcttgaacccgggaggcggaggttgcagtgagccgagatggcgccactgcactccagcctgggtgacagagcaagaccctgtctccaaaaaaaaaaagaaaaatgttttcctcgtgatttcttcttgggttttttataagtgtattgtttaattttcaaaaatttcaggttttcccacatttctttctgttgtggacctctaacttagctccattgtggttaaggaacatactttatgggatttcaacctttttccatgtactgagacttgttttgtggcccaacatatgatctctcctagagaatgttctatgtgcttgagaagaatgtgtatcatgggttattttacgttctttttttcccccataatataagaattttttgcatattgtaaatatatgtgtacattgttattattgcagaacacattttctttttttggagatggagtcttggtctgtcgtcccaggctggagtgcagtggcacgatcttgcctcactgcaacctctgcctcctgggttcaagcaattctcctgcctcagcctccatagtaactgggactgcagatgcacaccgccacgcctggctaatatttttttgtattttagtagagatggggtttcaccgtgttgcccaggctggtctcaaactcctgagctcaggcaatccgcccgcctcagcctcccaaagtgctaggattacaggcatgagccactgcacccggcctgcagaacacattttcaagaggtcctgttgctgcttaagctgttggtataagtgctctggagtaatatgtcatgatggaaaagtacatgagctttgaaacagggatacttgagtttgaatatggatttttattgtgtgtccttgggcaagtcatgtaacttctctgagccctcacttatagaaggtcaataataaggttcttgagtggcaagcaataaaaactgaccttgagctgggggctgtggctcacacctgtaatcccagcactttgggaggccgaggcgggcggatcacctgaggtcaggagtttgagaccagcctgaccaatatggagaaagcctgtctctactaaaaaatacaaaattagcctggtgtggtggtgggtgcctgtaatcccagctactcgggaggctgaggcaggagaatcacttgaacccgggaggtggaggttgcagtgtggagatcgtgccattgcactccagcctgggcaacaagagcgaaactccatctttaaaaamaaaaaacaaaaaacaaaaaaaaacaaacaaaaaaggctgaccttgactaatttcagcgtatgagtcaaataattagttctaggaatctacgtagcaggaactaatgacagtgtctttagggtgccattatgagaagaaagtatcctctggaatcacatcctttcatggccactgctcagagaccccgactctcagatgagaacgtcctatggccttctccagggtcagatatgcccaccacttggccagaagaaggcacagcaacttgagtttgactaacattctcccaaaactgtagtcggggaagggtaattcccaaagaaaaattggggtgtttttttgttttgttttgttaagtaacccttattttgatggggctttattctttcttcttttttttttttttttgagatagagtctcgctctgtcgctaggctggagtgcggtggcacgatcttggctcactgcaacctccaactccctggttcaagcgattctcctgcctcagcctcccgagtagctgggattatagactgtgcgtgcgccaccatgcctggctaatttttgtatttttagtagggatggggtttcaccatgttggccaagctggtctcgagctcctgacctaggattacaggcctaagccaccgcacccggcatgatgggtctttattcttcaaagcaggaggaagggatcctagaaaaacagagacaaggccaaacatggtagctcacacctgtaatcccagcactttgggaggccagtgcgggtgaatcacgaggtcaggagttcaagaccagcctggccaacatggtgaaacaccgtctctactaaaataaaaagaaattagctgggtgtcgtggcaggtgcctgtaatcccagccacttgggaagctgaggcaggagaatcgcttgaacccgggaggtggaggttgcagtgagccgagatcacgcgactgcactccagcccaaccaatagtgtgagactctgtctcgaaaaaaaaaaagcagagacaagacaactagtacagtacttacagggttattatgatgattaaatgagagaatagctgtgaggtgattgatatagtgctgtgcttaatacaaactatcattttattatacgggttgagtgtttctaatctgaaaatccaaaattagaaatgctctacagtctgaaacttttttgagcaccgacctaatgttcaaaggaagtgcttattggagcattatgggttgttagatttttgggttgggaatattcaaccagtaagtactataaaatgcaaatattccaaaaaaaatctgaaatctgaaacatttctggtcctaagcaagcattttgcaaagggatacgcaacctgtagtacgttctttatcattgttttaagtagttaatatattgtggtacagattctgaggtggtatagcaaattcgattgtattattaaaaagcatatttatattttgagagcttgcttaggattattggagagaataaaacagtgaagctttggtgttatgagggaattttagatagaaaagtgcagtttttcagttcatgctctttcattttttactccctcaggttaaagctgaagctcaacaaagatatagtgatctctgtgggcatttataatctggtccagaaggctctcaagcctcctccaataaagctctatcgggaaacaaatgaaccagtgaaaaccaagacccggacctttaatacaagtacaggcggtttgcttctgcctagcgataccaagaggtctcaggtaggtagagatgccttttgttgttgttgtttttgagacagggtctcattgtgtcgcccaggctggagtgcagtggggcgaacatgactcgctacagccttgacctcctggactcaagcgatccttctgtctcagcctcccaagtagctgggatcacaggcatgtgacatcacacccagctaatttatttatttatttattttttaagagactggatcgactgggcacagtggctcatgcctgtaatcccagcactttgggaggccgaggcaggtggattaccgaggtcaggagttcaagaccagcctgaccaacatggagaaaccccatctctactaaaaatacaaaatgagctgggcatggtggtgcatgcctgtaatcccagctactcaggaggctgaggcaggagaatcacttgaacccgggaggcagaggttgcggtgagccgagatcacgccattgcgctccagcctgggcaacaaaagcgtaactccgtctcaaaaaaaaaaaaaaaagagacggtgtctcgctatgttgcctgggctggtgtcaaactcctggtcttaagtaatcctcctgctttggcttcccgaagtgctggggtgctgggattacagacattggccactgtgcccagcgtttttttgtttcgttttgttttgttttgtttaatagagatgaggtctcactatgttgctcaggctggcctcgaactcctaggctcaagcagtactcctgcttcagcctcctaaagtgctgggattataggtgtgaaccaccacacctaacccaagatgctttcttactgaattttctccaactgaagagttaactaggaggagagacattgatcaggctgaccagttaaataactttcatatgtgcatctttcctttccttctccttccctttccttttcttttttctctctccgactccctcccctcccctcccctcccctcccctcccctcccctcctctcccctcctctcttctgtttcttttctttccgctagtcaagtgaagcagtgggaatggaaaaggaacaaagaaatctgtaactggttgtgatcaattagttgtaaacaccaccgcacttggacgagccatgtgcacctttcttgctaacctgttaaaccacaaagacttaactctttgggactgtggtatctggatcagtgatattttgatagctagaaagttaaactgggccagtgtctgaaagagatgtcagtgaaaacctcaccccttcatcactcagtacatgctgctgtcagtctaacagtcttgctcaggtacaatagcagaaaatactttatagttaattagggagataaggagttaggaaaagtatgaagtgtgaagtgaactcattttttttagggagagaatttatttttgctagtgatatttttcctgtgccttgggatgacatacatctccctttctgcatctgaaagacagatgcaggacgcagaacattgtcttttctcatcctcttacctttgctcagtctatagagggatttaacatcaaaaattaaaattgaatgagtcatgcttcctgtatgcaaaatgtggaagaatctgagattttacataagtttagggcctataaggatgactaaaatattattttgattcaagccagagagttttgccctactctttgaaggagaaaaagataaggaattttcttttccattttggaagtaactaattttttatattgatttattcataggcagtaagctctctggtcactgagtttctttcttggtccagtatgtttgaaaaaaccttgagagttcttttgttcataaaacccaaatttgaatctgctactaagctgttattagtcacatatccaggataaaatacaaacatcattgggtatggtggctcatgcacttttggaggctgaaacaggaggatcacttgaacccaggagtttgagatcagcctgggcatcatagcgagaccctgtctctactaaaaaactaaaaattagccaggcgtggtggtgcacagcctggggaagagagtacaaaaaaaaaaawwatatatatatatatatatatatatgtatgtatgtgtgtgtgtatatatatatctctctccaaacaatacaaataatctttgcagtagcgccatcatggttgactgtagcttcaacctcttgggttcagttgatcctcccacctcagccacctgggtagctgggactacaggctcatgccaccacgcctggctaattttttgtatttttttttttttcatagagacaggatctcactatgttacccaggctggtctcgaattcctgggctcaaacgatccagctgccttggcctcacaaagtattgggattacaggcatgagtcaacgtgccctgccttggaagtagtacttatatgtgtgtgtctctgccttccacattgagacctagcacagtacctgacataggtcctctcatttaataaatagatgtggtggccgggtgcggtggctcacgcctgtaatcccagcactttgggaggctgaggcgggcggatcacgaggtcaggagatcgagaccatcccggctaacacagtgaaaccccatctctactaaaaatacaaaaaaattagccaggtgtggtggcgggcacctatagtcccagctactcgtggggctgaggcaggagaatggcgtgaaccccggtgggtggagcctgcagtgagccgagatcgctgcctgggtgacagcgagactgtctcaaaaaaaaaaaaataataaataaataaataaatagatatggtttgggctgggcacagtggctcacacctgtaatcccagctagtcaggaggctgatgcaggagaatcacttgaacctgggaggttgccgtgagtcgagattgcgccactgcacgccagtgacagtgtgacagactgcatctcaaataataaataataataaatagatatggtttaagcatgctttgtgtgtcakggatggtgctgacaggtcagtacatttttttttttctttttttgkgttggggggatagagttgctctggtacccaggttgcagtgcagtggcgccatcttggcacactgcatcctcgaactcctgggctcaagcgatcctccagtctcagcctcccaagtagctgggaccacaggtgtgtaccactataccgagctaatttttaatttttttatacagatagggtcttgccatgttgtccaggctggtcttgaactcctgggctcaagcagtcttgcctcagctctcaaagtgctgggattacaggcatgaggcactgcacctagcctattttattgtttttgcaaagaggatctcactgtgttgcccaggttggagtgcagtggctattcataagcacagtcccactctaaaacagtttgaacatctacctcttgggattgttacagaagataaagtagttggtgtaaagtacctgcagtcactcaataaatgttaattccctgttggagaaggaggatgccccaggtgagccatcttcctgctccttagaagagagctgattttaacttgctagtgtcatcatcttcgagttattttgcatctcctcgtagccttcccatttgatccttgtcgttcttctccttcagatctatgggagtcgtcagattatactggagaaagaggaaacagaagagctaaaacggtttgatgatccaggtttgatgctcatgggtttcaagccgttggtactgctgaagaaacaccattacctgaggccctccctgttcgtgtacccagaggagtcgctggtgattggtaagtagcgtggaccatggatgagtgactctaacacacagtgcagtttacggagcagcgctttgtaaatgggcactgcttggacactgtacaggaaatgttaatggagtatgttgaaagtgtttcaagctctgcctggtgcagtggctcacacctgtaatcctagcactttgggaggctgaggcggatgggtcacctgaggtcaggacgagcctggccaacatggtgaaacctcgtctctactaaaaatacaaaatttagccaggcctggtggcttgcgcctgtgatcccagctacctgggaggctgacgcatgaaaatcgcttgaacctgggagacagaggttgcagtgagctgagatcacaccactgcactccagcctgggccatagagtgagactctgtctcaaaaaaaccaaaagtgtttcaagctcaaattttggaaatgtgggaatgaagaaagttaaacagattttttttttttttttttttttttttttttttttttttttttttttggagatggagttttactcttgtcacccaggctggagtgcagtggtgcagtttcagctcactgcaacatctgcctcccgggtgaggactgtggaatttagctttatatatatatatttttttaatttaattttttttttgagacagtgtctcaccctgtcacccaggctggagtgtaatggtgcaatctcggctcactgcaacctccacctccctggttcaaacgattctccttcctcagcctctggagtagctgggattacaggcacctgctaccacgtctagctaatttttgtatttttagtagagacgaggtttcaccattttggccagtctggtctcgaactcctgacctcgtgagccactgcacctggccttatttatatttatatttttattcatttttttgttgttgtcgcctaggctggagtgaagtggcgcaatctcggctcactgcaatctccgtcccctgggttcaagcgagtctcctgcctgagcctcccaagtagctgggattacaggtgcacgccaccacgcccggctaaattctgtatttttagtagagatggggtttcaccatgttggccaggcttgtctcgaactcctgaccttaggtgattcacccgcctcggcctcccaaagtgctgagattacaggcgtgagccaccacgtccagcctggaatttagctttttaaaaacaatttcccatgtaattctttgaagcatcagatagcaaaaagcaaacaaaaccaaaataagtccacagctttttctccagtgttggaaattaaagaggatgtgaaccttgccgttgtgtttatttgtgcagtctagaccctatcttttgtgctatggctcatgaacaccccagatttgactcgattggttttcattagtaactggggtcatgtcattaacctagtgtcagtaaaagtgaactgacattaataatttgctttttttttttttttctggagacagtgtctcactctgtcacccaggctagagtccagtggcaccatcttggctcactgcagtctcaagctcccaggctcaggtgatttcccacctcaccctctcgagcaactgggactacaggtccacaccaccacgtccagctaatcttttgtaatgttagtagagacagggttttgctatgttgggcaggctggtctcaaactcctgggcttaagcaatctacctgtcttggcctcccagagtgctaggactgtaagcgtgagccacctcacctggccaataattcactttctgtttgtttgttttgaaacagagtctcactctgtcgcccaggctggaatgcagtggcaatgtctctgctctctgcaagctccgcctcctgaattcaagcgattcttctgcctcagcctcccaagtagctgggactacaggcgtgcactaccatgcccagctaatttttgtatttttagtagagayggggttttaccatactggccaggttggtctcgaactcctgaccttgtgatccacccgcctgtgcctcccaaagtgctgggattacaggcgtgagccaccatgcccggccataattcactttcttaagtggaatgtttggggcttctaaacctcttattcctttttaaattttcctttctgtgtctctgctgtccccattttcccctcagctgtggggtcctccaacccttacctgttgagatattataagccctttaaaggcttggtgtggtggctcatgcctgtaatcccaacactttgggaggctgaggctggaggatcacttgagcctaggagttggagamcagcgtgggtgacttagagatactttgtctctacaaaaaatcttaaaactagctgggtgtggtggtrtgtgactgtagtcccagctattcaggaagcagaagtgggaagattgcttgagcttgggaggtcaaggctgcagtgagttctgattgcagcactgcactctatcctgggtgacagagcgagaccccgtctcaaataaataaataataaaattaaaataagccctttaaagaaaatggaagagaaactttagggctaaaagagaagaaaggaggaaacctttttaggaggctagtcactgggctttttgttttctagggagctcaaccctgttcagtgctctgctcatcaagtgtctggagaaggaggttgcagcattgtgcagatacacaccccgcaggaacatccctccttattttgtggctttggtgccacaggaagaagagttggatgaccagaaaattcaggtgactcctccaggtatgtggcagagatatttccagggcttctgaaccttgcccatactttggaatcatccatggactcctaatgcagacctactgaatcatagtctctgggaatggggcttaaaaatgtctatttttaagctttcttgggtgaatttagtgcacagccaggtaaggccactaaatatggtgatggggtgcacagcatkcgcagccgtacaaggctgatctgcagctaggatagagaaatgtctgcctaggggactgtttgcagattactgacacaagttcttgggacctcactgccgacacctttctttccaaagccattgtttggcacccttgtaatgtctaatgtttggtttagttcctatacaaaccaaccatggggtttgccaagatagtgaggtatagcggaaagaccatggattttaaagtcagatttgactttatcttgtgcttatgtgtctggaagcttgcttgcttttgttttgggcccatctctgctgcttgttagctggtcaacgtgggcaagtaatttaacctttctgtttaatattccttagctacaaagatgggcgttctggagcacctttccctcggggtggttttacatttgagatgagttactgtagttttaactttgatcctcagcatgctcaggagtgctcagttactaagctattgtatctcagctccaaattcacccttttatgctctgcactactgaggctgaaatgatccaaacctaatttcatctttcacagctggctctcaggctgtgtctatagtgggtgctagagggagaccaaagggcagaggagaggtgagggatttgcttcttcctgtttgctcagtgtggtcagcattgtcagcaaaggctttcacctggtagcagcagttagttacagggcgtagattttttagtccttccagaaccagccagtaactgaactaaaatcagcctgataactcttacctgtttccttttatttatcacgtggtagagggtaaggaaaaaaggggcgagggtgaagctcagagaaggcccccatggagctgggacttagccctccagggaggaggcactgtccggctagctctggatgtatcaaaaaagctggagactggaaccaactgccgccaggtaaagggtctttgctggggcaatacaggtaggaacagtaaatacaggagggccgcaaccacagttttgctttctgcagtttcagttacccatagtcaaccatggtccaaaaattttaagtggaaaattctagaaataacttaaaagcacaatcccacctggggcaggaatcatctgtttgttcagcatctccacactgtaaatgctacccaccagttagtcacttagtagctgtcttggttatcagattgactgtcaaggtaatcagtattgcggtgcttgtgttcaggtcacccttatttaataacggccccaaagcacaagtgtagtggtgctggcagtttggatatactaaagagaaagtcataaagtgcttcctttaaatgaaaaggtgagagttcttgactttaaggaggaaaaaaatatatgctaaggttgctaagatatatggtaagaaggaatcttcgaaccacaaaattgttaagggaaaaaattcattttagtttttttttttttttatgctgaggttgctaagatacatggtaagaaggaatcttctatccacaaaattgttaagaaggaaaaagaaattcatcttagtggccaggcgtggtggctcacgcctgtaatcccagcactttgggatgccaaggtggcggatcacgatgtcaggagattgagaccatcctggctaacacggtgaaaccgtctctactaaaaatacaaaattagccaggtgtggtggcaggctcctgtagtcccagctacttgggaggctgaggcaggagaatggtgtgaacccgggaggtggagttagtgagctgagattgcgccactgcactccagcctgggtgacagagcgagactctgtctcaaaaaaaaaaaaaatagttttttcccccccttctttttttacataaattgagacaaggtctcactatgttgcccaggctggtctcgaactcctgagctcaagtgatcctcctgcttcagcctcccaaagtgctgtgcttaccgacgtgagccaccatgtccggcccaagctagttttcctgttgcacctcaaactgtaaaagttactgccacagtacatgagaagtgcttagttaaaatagaaaaggaggccaggcactgtggctaatgcctgtaatcttagcactttgggaggctgtggcaggtggatcgcctgagcccaggagttttgagaccagcctgagcaacatggtgaaactctgtctctgcaaaaaaataaaaaaaagtagccaagtgtggtggcattcacttgtagtcccagctacttgataggctacttgagccggagaggtagaggctacagtaagctgtgatcacaccactgcattccagcctgggtgatagcaagatcctgtctcaaaaaaaaaaaaaaaaaaagatgaaggctgggcgcggtacctcacgtctgtaatcccagcactttgggaagccgaggtgggcagatcccctgaggtcaggagtttgagaccagcctggccaacatggcgaaaccccatctttaccaaaagtacaaaaattagccgggcgtggtggcgcctgtaatcccagctattcaggaggctgaggcaggagaaccgcttgaacctgggaggcggaggttgcagcgagccgagattgcccactgtactccagcctgggcgacaagagtgaaactccatctcaaaaaaaaaaaaagatggaaaaaaacattaaatattaaatttatgaacgtatgacatggacaaacatgtttcaattgacggcagtcaggtttggtgctgtccgaggtttcaggtatcctcccgggttcttcaaacatattccccagggataagggatctactgtatacaggaaggggcacccctcctcccttgcagtcttctggaaactgcagagggagtctgttaggcagatgataacaaaaaccagctggtggagttcaagaaatggggcctacggggccccagccccagcaccacaggacataaaaggaagaatttggagctgagaaacaagtgactgcaacacttgaagtcaaatcaaagaaaatttatctcctttcttcaggcttccagctggtctttttaccctttgctgatgataaaaggaagatgccctttactgaaaaaatcatggcaactccagagcaggtgggcaagatgaaggctatcgttgagaagcttcgcttcacatacaggtgagtcaatctcaggctttctggaactgcctcctgagttgaaaatcttattagaaacagcttgggcataggccaagagaatggcactactcttttcagcaaactgacagattactacttgttattaatagttttttgaaagccatatagagaatggaaccttttattatgttggagactctgggattttgtggtttctctgttgtgctgtacttagccagattagttggttgaacaaatttgaaaaaatagcaggattcttattcgcccttctccttgattgtgtttgttattccacaatgagcaaaagtaaataaatctagtgtaaattgttaaaggcttaaaagaatgattaagtaattcaagtcattccctctcacatatataatagaccaactctcagagcctgcataatgggacactaaacgtaatttttttcacatgtcatttttaaaaatttattattattattattattattattattattattattattttgagacagggtctcttgtcacccaggtttgattgcagtggtgttactgtagttcactgcagccttgacctccctgggctcaggtgattctcccacctcagactcctgagtagctgggaccatacccttgcaccaccacacctggctaatttttgtattttttgtagggacggagkttcaccatgttgcccaggctggtctggaactcctgagctcaagccatccgcctgcctcagcttctcaaagtgctggattacaggcatgagccagggtgcccaggctggtttgctttctaagttgacttgagacaaagtcttgctctgccatccaggctggagtaccgtggcacgatcatggctcactgcagcctcgatctcctggactcaagcagtcttcctgcctatgcctcctgagtagctgggaccacaggcgtgcaccaacatgcctggctgatttttaaattttttgtagagacagggtctcaccatgttgtccaagctggtcttgaactgctagactcaagcattccgcctaccttggcctaccaaagtgctgggattacaggcatgggctactgcacctgacctcaactgttttacttggggtgtttttctcagctyaccccggacctgtagtatctcaggtggttttattctaattttttcaatgtttaaattgtcatgtttcagttgagttacattattgttttaacagaagtgacagctttgagaaccccgtgctgcagcagcacttcaggaacctggaggccttggccttggatttgatggagccggaacaagcagtggacctgacatgtaaggaggttgaatagagtagttcttttcatgggaggctttcttactggttccactctgcaccagtaatttgggtgcatttcccagtcctctctaaacacttaacctcattccccagaccccctctgtttggaagcttttccagaccagcttaaacagccagggaacagatttggctggttccatagtgagaggaggagagtgtcaggcttctgagacctgcctctgcactaggccgccctgtgactacatgctggtgaaatttaaaaaataatataagaggctgggcacggtggctcatgcctgtaatcccagcactttgggaggccgaggcgggtggatcacgaggtcaagagattgagaccatcctggccaacatgtctctactctgtctctactaaactctgtctctactaaaaatacaaaaaattagctgggtgtggtggcgtgtgcctgtagtcccagctactcgggaggctgaggcaggaagatcggttgaactcaggaggcagaggctgcaatgagccgagattgcaccactgcactccagcctggtgacagagcgagacgctgtctcaaaaaacaaaacaaaaacaaaaaatcaataaataatttaagaggaaataagtggtggatttgggtttagaatccagcgactcgcagccgggcgtagtggcttacgtctgcctcctaggttcaagctattctcgtgtctcagactcccgagcagttggtccccgcccggctaatttttgtatttttagtagagacgggatttcgccatgatggcccggctggtctcagaatgatctattttagacaaaatagccccagtgttaaaagcagaagagttattggaccattgttactgtggtgcctgcttagctgtgtctggcgaaagagaaacgttttgagctaaacagcccatctcctcctttcaggccttaggcaaattcagaagtcggtggcctagtgcctagcaaggtagtttaggacacaggtgcctgccaccaagcccggttaatttttttgtatttttagtagagacggggtttcactgggttaggatggtctcgatctcctgaccttgtgatccgcccgccttggcctcccaaagtgctgggattacaagcaggaggcgctgcgcacggcctattttgtgtttttattagtgattgggtttcaccatgttggccaggctggtgtcaaattcctgacctcaagtgatccacctgtctcggcctcccaaagttctgggattataggcataagccaccatgctcactacttttatttttatttttagtactgagcataggctggacctcagtacattcattcattcatttgagacaggttctcactcttgtcacccagactgaagtgcagtggtgggatctcggctcactgaaacctttggctcccaggctcaagcagttctcctgcctcagccttccgagtagctgggattacaggcacccgccaccatgcctggctgatttttgtattttttggtagagatgggggttcaccatattggccaggctcatcttgaactcctgaccttaggtgatccacccgcctcggcctcccaaagtgctgggattacaggcaagagccactgcacccagcttctctgtacttttaaaactctacagatgattcccagattgggagccagtgctcttgcagaggttcccatgatgtggaccaggggacttctgatgcagcaggagcacagtttggctccagcattgtgccatctaggtacaccagcaagagctcccctccatgcttggcaaatacgggcatgtgagctgcccatctcatcacccttgcccttgatgtgacacagctcatgtcagaagcttgatttaacaatatagttgtaagctaacaaaaaaggaaacaaaagtatgatctttcctccaaagttgccttttcctgtcatacttgctccccctgtttcagccagtcatctccccatcccactcctattcttcttacattctggtttccagctctgtgatttcagttaaataataaatcctattctatcagtaagtcctgccagttctgtcacttctcatgtttatgggtcctcccacccacaccccacttcacctgtcttatcttaccctctttcagttcaccctccatgcagctatcaggggattctttggataaggcctaattccttggcaggcatcccagcttccatgacctcatcatacccatctttctcacctctctgctggccctgtcctccttaacaccctaccttccagctatatgtcacctgctatttctctcccagtgccttctgcttcttatctttcaccacccctcctgtgttccagtgtgcctgtacagtcgcttcttgcatggtgttgcccaactccactgcatcgtttttatccacctcctctctctcactgggctgtaagctcaccgcaggcatgagcacttgtttgaattcccagaatctagcttagtatctccactgtaccactgccctttgggaaagtcatgtaatctctctccttttctcctctgtaaaactggggacaaatcaagaggctgaggcaggagaatcgcttgaaccagggagtcggaggttgcagtgagccaagatcgcgccactgcactccagcctggcaacagagcaagactccatctcaaaaaaaaatctaaaaaaaaaaaaactggggacaaatttacctatcctataggttgttagaaggagtaaatagagtaagtttaaagcatttacaacagtgcctggcggtagtatgtgtaattacagtaaatgcaggtgttggaaggtacttggtaaatgctggaaagacatttccctagacccctcccaccttagcagttaggtgctctctcttctggttctcagagagttctggaagtggacagcaagctggggctygtgactcaccaggccactcttctgtgttttgattttctagtgcccaaggttgaagcaatgaataaaagactgggctccttggtggatgagtttaaggagcttgtttacccaccagattacaatcctgaagggaaagttaccaagagaaaacacggtgagaagctgaatgtggacatgtgggctatttttaaaaattgcttttatgatagtcttatcacagtgggcaatatcctttcagaaatatctattcacagtctagttaaaatggcttttatccaaaaaacagacaataacaaatgctggcaaagatgtggagaaaagggaaccctcatacactgttggtgggaatgtaaattagtacagccactattatggagaatagttgggagtttcctcaaaaagtgaaaactagagctaccatatgatccagcataccatatgatccagtcagtatatacccaaaagaaaggagatcaatatatcaaagagatatgtgcactcccatgtttattgcagcaccattcacaatagccaagatctggaagcaacttgtgtccatcaacagatgcctggtaaagaaaatgtggtacacgtacacaatggagtactattcggccataaaaaagaatgagatcctgtcatttgcaataatatgttaagtgaagtaagccaggctcagaaagacagacatttacatgttctcacttatttgtggaatctaaaaatcaaaacaattgaactcatggagagagagcatagaaggatggttaccagaggctgagaagggtagtgaggcattgtggggttggtggggatggttaatgggtacaaaaaaaaaatagaatgattaagatctattcgataatacaacagagtgactatagtctaatttaattgtacatttaaaaataactaaaggaatacaattggaatgtttgtaacacaaaagataaatgcttgaggggatggataccccatttatgctgatgtgattatttcacattgcatgcctgtatcaaaatacctcaggtaccccacaaatatatatacctagtatgtacccacaaaaattaaaaatgaaaaaattttagaaaagaactgtctatacaaccatacatatttacacataccaacatacatatttcagcacaaatggaataatacattgttttctagtttgctatttttgttactcagctatatatgttggacagttatttatatccacacttacctatctcattttttaaaaaatgaggctgcagagtagttcattggatagatataccaggttatttaaccagacctgtattgacaggtggatatgctgcagtgaacatgcatttccatcgtgttcttgtgtgaatagatccacaggatgcattcttgcagtgaattgcttccaaaacagtgatttaccctctatccaagaaggagtgaatgttttcctgcactctcacccttccaggacttaatttttttaatttctatttaaaatgatacagaagttggccaggtgcrgtggctcacacctgtaatcccagcactttgrgagcctgaggtgggcggatcatgaggtcaggagttcaagaccagcctggccaacacagtgaaacctcgtctgtactaaaaatacaaaaattagccagatgtgrtagtgggcgcctgtagtcccaactacctgggagactgaggtaggagaatcccttgaacccgggaggcagaggttgcagtgagccgagaccacaccattgcactccagcctcggtgatagagtgagactccatctcaaaaatgatacagaagttatatcctttttttgtttttagacagtcttgctctgtcacccaggctggagtccagtggctcaatcacagttcactggctcactgtagcctcaacctcctgggctcgagtgatcctgcagcctcagcctgctgagtagctgagactgcaggtgcacaccaccatggccggttgattttattactttagagccagggtctcactgtattaccaaggctggtcatgaacctgtaaaagattttcaaaggaaggaaggaatgacttacccagagtgagcaacagttttgggtaaactgatggcattcacactacttgtaatttcctcctaggtgtgatctgtgttttattttgcactttaaatgaagctaccttatcgagataagtcttccccatggtgtcctaggctggcatcacagctttatggttaattgcagcccagattatacgaggtcccccatgccatgtagctgggatgccacttgtatgtagcatttccagtcactctctcctgacctttccccccagataatgaaggttctggaagcaaaaggcccaaggtggagtattcagaagaggagctgaagacccacatcagcaagggtacgctgggcaagttcactgtgcccatgctgaaaraggcctgccgggcttacgggctgaagagtggkctgaagaagcaggagctgctggaagccctcaccaagcacttccaggactgaccagaggccgcgcgtccagctgcccttccgcagtgtggccaggctgcctggccttgtcctcagccagttaaaatgtgtttctcctgagctaggaagagtctacccgacataagtcgagggactttatgtttttgaggctttctgttgccatggtgatggtgtagccctcccactttgctgttccttactttactgcctgaataaagagccctaagtttgtactatatactgttcttttgtgtgaaggagaaaggtgtgtatgccttgcatccaaaacttgctagccatcacttagcttaattttctctttcattgggaacactcatcaccacaatggaaacaaaacaagtatcagaggggcgggtgagagtgtgacgggtcagggcaggcgaaggcattttgggagtaagaagccctagcaggattatattatccttatcctctgtcctctagcctgttttcctttaaatgtgtcatgttaaggtataaaaatcagatttctgaagcagtaagaaggtaacacttagttctggggccatttgcttcgtgagtaaacagcaactccttctcattgcattcctcttaatgcaacattaagtcatgcaaaaatatacccattttctgttgccctgagaatttgggttccagaataagtgaaatgaagagttactcctcttgtgtttcaggggagctgtaggaaattcaagatgagaaaatgtcctagtatttaaagaaggggaagaggacaggagtgtcttttaccttttcttcttctacatccctgctctgtcctccctgtccctttcctgctcattctactgccactgcttttgaagaattagcctgagggaaggaaggagagcatctggaattgttggtctcctctgaggatgtgagtaagggtttgcaggtcctgtgtccttcaggactagaatgagcagcacctcatgaggaagagtgtaggaggggccaaattactcctttcagctttggattcttggctctaagctttataggttttttttttaacctgttattgcttttgtttctgtttgaaaggagatactgtatttttttgtatttccttacgtgtctgggcaagaggggaagataattctcccattagatgcttagaaattgttgagaaattggaccattccccttaaatggagcaagtttggaaactggattctatagggggttaatctaccaaggtagattgaaattacactagtcacagccagtcacctgcaataggagggcaaggagtagccccactgagcccttggtatccgaccctggatgctggagctagtgaagagcagccctggggtgagctccaggctggctttgctgtgcacactatgcccaagcctacgctcctttgcctcctacttccaaaatggagagaatgagagttcagaggtcaaacacctaccagagccaggcaggtatgtgaatgttagacaaatcacccgaggtctgtgataaacagcaacagagtgatatttctctgtaaatcaatgatgccttctctgcctgctgagtcccccacccaggagagaagaaataccatgttccagtggaattggttaggcctttggaagctcacgaggctgatttagcaaatttacatcttagtgccatcatatatacaagtgaccttgggcagtttatgaggcattttgagccttagcttccacattcttataataacgtcacatggtgaaaatgagaaaatatgtaaaagaacatggcactcaatagatacagttggccctctgcatccgcaggctccacatcgatggattcaacctacgtggatcaaaaatatttgggggccaggcgtgctggctcacgcctgaaatcctaacactaggaggcccaggcaggcggataacgaggtcaggagttcgagaccagcctggccagcatggtgaaaccccatctctactaaaaatacaaaaaattagccgggcatgatggcgtgcacctgtaatcccagctactcggaaggctgaggcaggagactcgcttgaatactgggaagcagaggttgtagtgagccgagatcgcgccactgcactccagcctgggcaacagagcgagactctgcctcaaaataaataaataaataaataaataaaacttggggaaaaaatcgatggctgcgtctgtactcttgctcttgtcgcccaggctggagtgcagtggcgcgatcttggctccctgcaacatctgcctcctgggttcatgcgattctcctgcctcagcctcccgagtagctgggattacaggcgcacaacaccgcacctggctaattttttacttttagtagagacgaggtttcaccatgttggccaggctgctctcaaactcctgaccttaggtgatccacccggccaggcctcccacaatgctgggattacaggtgtgagccaccgcgccgggccagactttaaattttgtcattagcccgccgggcgcggtggctcacgcctgtaattccagcactttgggaggccgaggagggcggatcacctgaggtcaggagttcgagagcagcctggccaacgtggtgaaaccccatctctactactaaaaataaaaaaattagccgggtgtggtggtgggaacctgtaatcccagctactcgagaggctgaggcaggagaatcacttgaacccggaagaaggaggttgcagtgagccgagatcacgccactgcacttcagcctgggcgacagagcgagactctgtctcaacaacaacaaaattgtcattattccataaataatacagtatgacaattattgacatagcatttacattttattaggtatcgtaaattatctagagtataatttaaagtatccgggaggccgtgcgtagttcatatgcaaatactgcgccatgttacatcagggacttgggcaacctcagatttgggtatccgcatggagtgccctctggcgcttgacttctaccgcggccatcgcgcttctatccgccaggtggcgacacagccggcgcggagcgccgatctgggcctgcgcatgcgcgccacggacgaggcaggccgggtgcctgggcctgggagccataagccggagagtctggcgggctaagctcagcggcatccgggttccttgtggccgccgcagcagctcgagaacacgaatccgtttggccaaaactgaaacaaacacacggatgcacatatgtctgtttacttctaggccaggtgcagagggaacgtctggaatgacactcaacgaaaactgcggttacttgggaagatgagccttttacctctcagcctttccccttctgtaatgtcttgttttaatgtcttgttgaaaaccagaagaggccgggcgcggtggctcacgcctgtaatcttagcagtttgggaagctgaggtgggggtgatcacctgaggtcaggagttcgagaccatcctggctaacacggtgaaaccccgtctctaccaaaaatacaaaaattagccgggcgtggtggcaggcgcctatcataccagctactcgggagggtgaggcaggaaaatcgcttgaacccgggcggcggaagttgcagtgagcagagatcgcgccaatgcactccaacctcaaaacaaaacaaaacaaaaaagtaaacaaaaaaaacagaagaaaggcagggcaggaccacgagctctgagggagattagtcatccacttcctctccctgccgactatccagaaattccatcctcattagcatccgtattaggagaggaaacacacccaggttttactggaacgggagctatgtattcagcctttcttgtttaagccacactgcccctgactgtaaggaccctggtgcaaccttctctgcatcatgtatggaagcaaatcctacgtggacttctatcttctgaggactcaggcggctcgtgggccatgccagcacttctagtgttcctcgctaccctgcaattttagcatgaccatttatttatttatgtttgtttgtttatttatttatttatgactacaaagatccagaagacaaacatgaccatttctttctttttttttttttttctgagatggagtcttgctctgtcgcccaggctggagtgcagtggcaccatctcggctcactgcaacctccacctcccgggttcaagtgattctcctgcctcagtctcctacgtagctgggattacaggcatgtgccaccatgcccagccaatttttgtattcctagtagagaaggggtttcaccatgttggccaggctgatctccaactctggacctcatgatctgcctgccttggcctcccaaagtgctgggatcaaaggcgtgagccaccgcacctggtccttttatttttatttatttttattttttttgagactcagtctcgctctgtcgcccaggctggagtgcagtggcacaatcttggctcactgcaaactctgtctcccgggttcaagcaattctcctgcctcagcctcccgagtagctgggttacaggcatcaccacgcccagctaatttttgtttttgttttttgagactgagtcttgctctcttgcccaggctggagtgcagtggcatgatctcgactcactgcaacctctgcctcctgggttcaagtgattctcccgcctcagcctcccaagtagctgggattacaggtgccccccaccatgcctaatttttgtatttttagtaaagacggagtttccctttgttggccaggctggtctcgaactcctgacctcgtgatccacccgccttggcctcccaaagtactgggattacaggcgtgagccaccacgcccggctaatttttgtattttagtagagattttgtatttagtagtagtagtagtaattttgtatttagtagagatggggtttcaccatgttggccaggctggtctcaaactcctgacctcaggtgatccacctgccttggcttcccaaagtgctgggtgggattacaggcattagccaccgcgtctggtggaaacatgacctttttttttttttttttttgtttttgagacggagtttcactcttgttgcacaggctggagtgcaataatggcgtgatctcagctcactgcaacctccgcctcctgggttcaagcaattctcctgcctcagcctcccgagtagctgcaattacaggtgtgtgccaccatgcctagctaattttgtatttttttagtagagacagggtttcaccatgttggtcagggtggtctcgaactccaacctcaagtgatccacctgcctcggtctcccaaagtgctcagattataggtgtgagccaccgcgcccagccaacatgaccatttttattgctgtggtttgacaaggcgtccccatcccttcatcactaccccgcaccctcctcccaccttagttatctattgctgtgtaacaaattacacccaggaactattggcttaaaacaataagcattcctctcctacctgaaagctagagtgaggctggaggatctatttgctgggaggccgtaatgagcatgtttccaattatctctgtcttatgttttgacatcttggggggccttccagacccaggaataaactgctcctctcagggctagcttactcatagagacagttaccacatatttgtgagaatgcctctcatgcatgccagtcacctcctttatctttcacataccaaagcattattcctcctgtactaactcatcccaggaccagatgccaggcaactagagaccaccccatagcccaaagcccactggaacgattcaaactagccaatcaatcctaaaccgtttattctgtcctgcctttcctgaggaaactctgataaaggatgtggcctatgattccccttgctctaattctgactcgtaaacaaagcgcgatgtttctcccatggccctgtgctgtgtggaatgccccttctcgtaggaaacgtacattctttcaatggcattgacttagtgtcatcactcaatctgttaattaaaatcccacaggaggccgggcgcgatggctcacgcctgtaatctcagcactttgggaggctgaggcgggcggatcacgaggtcaggagttcgagaccattctggctaacatggtgaaaccccgtctctacaaaaaaaatacaaaaaattagccgggcgtggtggcaggtgcctgtagtcccagctacttgggaggctgaggcaggaga

SEQ ID NO: 94603 - DNA, 12712 bp, Homo sapiens
acactttgctattcattttcacattatttaatcccaaaataaccctacaatgaggaacaaagagaaactaacacttaggaagtttgagtactagtccagggacatacaatcttttttgactctcaaaccatgagaactatgttatacaatttgtacgttctttctaattcaatcttaattttggtcatttttatagtcttcagtattgaagatgcaaatgatttagtaactaccacaatcgacagacatatgtattagaagggcggctctgaaaaattagaggaattcaagaaaatttaagaaattcaacaatgtgcttataactgttaaatagttttgtagaccatgttgaaaagtatggattattgttgtgaaaggatataatcaggatattagtgccaggtttacattgttaaaaaatgactggcagtaggctgggtgcagtggctcacacctgtaatcccagcactttgggagaccgaggcaggcggatcacccgaggtcaggagttcgagactagcctggccaacagtgaaaccccgtctgtactaaaaatataaaaattagccgggcgtcatggcaggcacctgtaatctcagctacttgggaggctgaagcaggagaatcgcttgaatctgggaggcaaagattgcagtaagccaagattgcgccactgcactccagcctgggcgacagagccagactcaatctcaaaaaaaaaaaaaaaaaaaaaaaaagactggcagcagactagtcgtgatggctcatacctgtaatcccagcactttgtggatcatttgaggtcaggagttcgacaccagactgggcaacatggtgaaaccctgtgtctactaaaaatacaaaaattagccgggcgtggtggtgcatgcctgtaatcccctctacttgggaggctgaggcagaattgtttgaacctggaggcagaggttgtagtcagctgagattgtgccagcctgggcgacagagcaagactccgtctcaaaacaaaaaaagtcatccttcaaatgctgcctgtctttttctttttttgacagggtcttaccctgtcacccaggctggagtacagtggcactatctcggcccagtgcaacctccacctcccgggttcaagtgattcttctgcctcagcctctcaagtagaggggattatcaggtgtgctccaccacacccggctaatttttgtgtttttagtagagatggggtttcgccatgttggccaagctggtctcgaactcctgacctcaagtgatctgcctgccttggcatcccaaagtgctgggattacaggcatgagccactgtgcccagcctggaggatgaattttgacagggaagcctggatgtatacctgcaggtctgtaagggctattacctcacaactgttaaaaattttatttccagagggtagtacaatttaattttgtattatttaaaataattattaatttgttgtttctcttgacacagttgcaagaatgtagtaactctgatcagctacaaggaaaggaggaaagagtaaatgaagaaagtcatctaactgaaaaggaatatatagaacattgtaacacccctacaactgattctgattcatctatagcagttaaagcactacaaatagatagctttggtttagttacatgctttcaacaagagtctcttgatgtttctcaaatgatacttggaaaatctcagcaacctgagtcaaaaatgcaatctgaatttataaaagaaaaaagtgctacttgttcaaatgaggaaaaagataacttaaacgagtcagtaataactgaagagaaagaaacagatggagatcacctatcttcattactgaacaaaactacggttcacaatatacctggattcgacagcataaaagaaaccaatatgcaggatggtagtgtgcaggtcattaaagatcatgtgaccaattgtgcattcagttttcagaattctttgctatatgatttggattaattctatataattttggacttttaaatattaaggttaaaaaatacctgtatctaaaattgattctgttaactgttgtcttaaaactaaaggtattaaagtataaaattaaaatttgcaattttttttaaaaaattgcaattttgattctcatgggggaaattggagataatttttttttttttgcctctggagtttaaagtttccttatggagataagttttgtgattcctgtaatagatgtgtatgttttctatttgagagttaaaacatttgagagttaaaacatttagttttaatacaacctatgtatatatacttctgtgttaatttttgctttgtcattaataaaatttaaaaatattcactaattgtgtttgtcacacaaagtaattctcaagaatgcatttaactggaattataagtacatgtgtggggggtagaatttcaaaactgtttctcagtctcactaagtaggacatatttaagcttgaaatagagcttagaggggaaagaactttactaaccaatattaatctaaacaattacgatacaaattcaccagataaaatgtagtatttttcatcagctctatattttgtcacacaaactatatatatttttgttacataaagtatatataatagatttagttatttagtaatgattttcaaaattcaattttgaagtatttcttagaagttattgaaatattaaaacatcttgtggttttatagaaatttaagagtaaaactggaatttttaaaatctggcaatttgctctgataggaaaattgccttcattacattattacacagaaaaacaaaaaaaagccagtgtttcctaatcactttctttttttttaagagatgggtcttgctatgttgtccagactggattcaaactcttaggctcaagtgatcctctcatctcagcctcctgcataatcaatttcctttataacacctaaaatgtgaggcaaagagaagatcctaacaggtttttttcttacaaaaaattttagggcagccaaagaaaatgaaaggaaggaaatacagaaagggaaatatttgttgatttaatcactaaccccaaagccaggagctgatctatttgtttcaaaaacagctactacttcacactctggccttcttagctcagtcctggaaataacctaattttttagttctttgaactagtgatgtcaggtcagagtaccagaaataggtacaaagcctcctgattcacccttatttataacccccaggcaaaatcttgcaccagactgggccgtgggtaagtctaaaggtagctcgtaaagcaagagaactatttgcctcaccttagataagcatatgtgctcttaaactactatgaatcttaaattgatgcaataattttgagactgccatttaatagttacaagtttaagtaacgtttttttttttttctttagatggagccttgctctgttgctcaggctggcgtgcagtggcacgctctaggctcactgcaacctctgcctcgagactcaaaggatcctcccacctcagcctctcaagtagctgggactacagatgcaccactacacccggctaattttttgtatttttagtagagatgggttttcgccatgttgcccaggctggtctcaaactcctgagttcaagcaatctgcctgcctcaacctcccagagtgctgggattacagacatgagccaccacacccagcccgtaatatctttacacagaaattagtcttttatgagaaattctcggttgaatgcaattacaaattaagggaaacttctataaacgtctacattaaatatggagcaaaatttaagcctgtttcctataattttctgtatctgtccttttaaaacgtatgatttaagttaaagctggcactagaaagtatttcactttggcatgactgaactttgtatcatttctggctttcaaaaacaatttaggctgtatttcccttacacagcaactttttatcattcattttcaatgcctgggtaatttgaaagccaaacagtttcttgcacagggaatgcattgtcataagctgggttttatttcaaactcaattatacaatgtagcaatagtaaatattaaaatgtaatgctaactcaaaacttgtagaatgccttcactgaattttggtataaagagtaaacaaaacttattctgcaaaaggattaggaacctttttatgcaaaaatgagtattttattttgtcagcactaaaagaaaaaaaaaaacaaaaccactgtatttctacattgaggtgaaaacaatgtttaaactttcttatcaatcaaatacattccaaaagaaagtgtgttctatgaaggttccaaaacacactcaaaacacaatagtacaggaatctaatactgaaaatgactgttctgacagggtgtttaacaaacataacttttaaattattaaaccagtgaagcaatcccttcctaataagtgtgtcaagagagtgaaactgggtttgttccattaataccctaacaatttcatcgtaatactttttactgctatgacagttttaaataaattttgctgtacttaaaataggttttgaaagtggaaaagtgtacaaagtttcagataaaaagattaataaatgcaatttaaataaaatttcccctcttctctcatatcaacaataatcaattttagcagataacagattgagctttaaaaccctactcccaaaatgaaaccttcagttttaaatcttaatcagacataactggaaaagattactatgtatttggacaccttttacaagattttgtttttgtattaaagcagaaaccagttcctaaactcttttattcaattgtatgtcctgtttggacaaatatcaaaaatagaagactgtcgcttttgtaactgtgattttcactgcagtcttctataacttttacagagttcatggtccctaatatctccccaccctccattttttctaggtggggaaatggctaccacagtaaacttttcactgatagttagagtttctggaaacatgtattgtttgttattatttaagagtgactcaatttgggcactctgagtggatggtctacaggttttcttgtgatgcataccacagtctccagcatgaaagatcctaggaatttgaggaaccagcactttccagaattttggaagacaagatacagtcaagtattgaagagtccagtcccagttataatcatcataagtacagaaagtgtctgtgcactcgatcagcttctgataggcattccgggtcaaggctagacccatattgtgctctgtggatttccaagttttcacatctaccttgtcagccatgccatagaaactgcgactggcactataggtccccagggagagaacatcacattcagggcactcttgctgcttcagtttccacatctttttgaagacatggtaaaagtctggggctaagtagtgatcctcttctaggaaaagtataaggccagcataatctcgaagaattttcactctttcccacacaaaatgcagcttccaccaccagtgatgtttggtctgggagaatttggcctctctataatggccgaaggagtcgggatactcagcattgatgcaccccaatttcaaagcggcattcttcggcaggtctctgggacaatctctagggtcactacctggaaactcgttagggtacaactgaatgctgaaaggaaagaacacctgcagaaccggacagaaattcaccccggcgatcagctgattgatctcggtcgaccagaagtcatggctaaagatgacgaggacgttgtcaattccctgggcttttcgaagtgagtccagcagcagtctgaggtattcgggccggttatgcacctggaccaccagcaccagctcccggggggcccaggtgccagccttatctacattcctcagggtctgatcaaagttcagctggtacaccagggaccggtaccgcagcgtmaggttgtccgcctcgggctgggggaccgccgggaccagggaagccgccgacacgttggagaccctgcggatgcccacagccacagaggggtggtccccaccgcggccgccggcaccccgcgcgggttcggcgtccagcaacggtggggcgagggcctcgttcttcctttgtcgcccattgctgctccagaggacgaagccgcaggcggccaccacgagcgtcaggattagcaccttccgtttgtagatgcggaacctcatggtctccagggccgggagcgcaggcgggcgggcgcggaaaggagcagctgcttctgcacggaaggggcgggcgggcggcggccgtcgccttggcctgtcacggtcggaactggcccccgcggctgccctcgctaactcatcccgggccccgggggtcctggggcccgagacctctcatttaccccgcgccgcctgcgctccacacatcctcgcctggcagctacagctcgagcrtcggcgccgccgctaggagccgcggctcggcttcgtctccgtcctctccattcagcaccacgggtcccggaaaaagctcagccgcggtcccaaccgcacmctagcttcgttacctgcgcctccagcggccctgcgtcctctgcgctctcatccttacaggggccctagacggccagaactgagcgacgcggcctcgcctcactccggcggggaccgttatgacaacccgcaactgccccgcggcacaccgcggccctccggcccacacccctccggcccgccccttagaccgttggttggtgctttccagacgcgaccgaaggcgcctgaccgccgtggccggctgcctattggtttgcagtactgtcgctcaggtgcagttcccacttccgcctctttcttccctttcctgttaggcgagagctgcgaaaggcgagagctgcgaagggccaggtgtcgggcgctgtttctcggtaagctaagaacgaggctgtagcggctccaataggagcctcccttgctcagaatcctgggtaggactaggccttcttaggaaagggaaggcgagacctatggccctcgccggccttagttcgagagcaggcttctcccttcaggaaaaaggtctcaggcatggcggctatagaatcgcggggcgcgccggcttgataaggacacgtcagccctcgaggctgctgacgggtgactgtgcttcggaggggaaaagtgatactacgctgatgtggttctcgtagaaggaacggggcgggtcgtaaccgtagctacaacgtcgcgcgctgccccagccattctctagagctggaaaatggaggaggtgggtggggggaagggggtcaaagaaactctggtccttaacttccttttcggaagaaaattagatgaaccgcacttttcttttggagcagtcacaataaattaaactcatttcgtacggaaaacggactgtattgggcctcctaaagctgctgctgtcggttttcgtgagtcttgttctatatgagaaaagaagaatggctcggagcattgttaattatttgagatgtgcaaaatttgccgggcccagagagacagcagtatgggacttcagacacctccccacttaatgcctggcattttattcctgactagctgcttcacccattatgtccgcgttcctggaatttgtcataaaaagaatgatgtatagccaatcaatcgcttgtgttattttaatgtaaattcttggtagacaatttaggaactgccattttttcctctaaaaacccacttgcaactgctgctactcagggcattttgaatctgtgctctgggttgcaatcctcaaacttgccccaaataaacattctacttatatgaattgtgcctcagttcttttttttttttgagacgtaattccgctgttgttgcccaggctggagtgcaatggtgcgatctcggctcacggcaacctccgcccctccccaccccgcccaagcgattctccttacaggtatgcaccaccaccacgccaggctaattttgtatttttagtagagacggggtttctccatgttggtcaggctggtctcgaactccggacctcaggtgatccgcccttctcggcctcccaaagtgctgggattacaagcatgagccaccgtgctcggccttgcctcagttctttaggtcgacaaattagtcctccagtaatttaaacgaagtgtttcaaaaaggtatgtacttgtatgtgcgtttattcatatggaaaaagagtacgtggtggatttatatattactcatttatgtgtacggttttcctgtatatacttgtatagcactttcacttttcggaatgtttaacgtctgctatcttattttaaatattttactacagttttcatcatatagacaaaacagccctgctgcaaagatggtcaacgtacctaaaacccgaagaaccttctgtaagaagtgtggcaagcatcagcctcacaaagtgacacagtataagaagggcaaggattctttgtatgcccagggaaggaggcgctatgatcggaagcagagtggctatggtgggcagacaaagccaattttccggaagaaggctaagaccacaaagaagattgtgctaaggctggaatgtgttgagcctaactgcagatccaagaggatgctggctattaagagatgcaagcattttgaactgggaggagataagaagagaaagggccaagtgatccagttctaaactttgggatatttttcttcaattttgaagagaaaatggtgaagccatagaaaagttacccgagggaaaataaatacagtgatattcttaagcaaactttttgtggtttttacttataaatagaattccatgtttagtgtagtcccacctcaaactttactaacaagtttatatatgtatgaagggaaaatactactttactactttttgttttctggtcaatttcaaatgttgaatgaattcataaacattgagcagcttagaaggatctttaagattttgcaagagaaggaacaagataacgctaggcttgtgtatagcaggctgggttgggcaaaggatggaagttgggggatagtaagagctgaccaaatattctgtctagtaggggccgctagccaggtaatgtgtttcctgttacactagtcagatttagtactcaacagccacgtgtggctagtttattggacaacacagatgtaaaacatttccaccgcagaaagttcttttggacagtactgttagagactgtggccttgaatataaaaggatagttcaaaattgacttcacactaaagttctcaatctagtgaaagtccaagatagcataaactgttttttgaacctcttagaacactctgggaggtactcaaaaaaaattttttttttgagacaatctgtcactgtaacccgcactggagtgcagtggcacattcatggcttactgtggcctctcaggctctgtagctctgtaggtcctgccttagccttggagtagttgggtaccaccatgcctggcgaatttgcctggctaattttatttctttttttttttttttaaagatggggtctcactcctgggctcaagcaattcttgagcctaggctggtctcaactcctgggctcaagcaattctcccatctcagcctcccaaagggttgggattacagtgtgctactgtgcttggccagaacttgacagttaggaaggtttaggagttatgactgaaaacaagaaggttgaaattcacaatgaaaaaagttgagccttgtaattatgaaaggcaagaaaagttcagtatcaagtgaaaaactgggaaaaggtaggggttataagaggtcaaattctgccttttgtatatgaatttaagttgactaagatacatgggaatgacagtagttagaggaatgcaaagggctagggtgtgtaggagtaacagatggtttgcacataatcccaataactgactattatagctgcatttgattgtaaaaaaaaatgtaaaaatcatgtatacgagtttatttttaaatacatcaccatcactttttcctttttttggagacgggtctcgctctgttgcccaggctggagtgcagtggcatactcacagctcactgcagctttggcctcctaggctcaagctatcctctcacctcagccttcctagtagctgtagctaggactacaggcatgcagcactatgcttggctaatttttgtattttttatagagacggagttttgccttgttcctcaggctggtctcaaattcctgggctcaaaggttatctacccatttcagcctaaagtgttgggattacaggcatgagccacctcacctggcctaccatcactttttaaagaatgttttaattcagctattttgtaatatttatggacaatccctcaccaacctacaagtttagaaaatcctaaaatacttagggaattcttggttttaaagaccaaaagtaaattaactagaatacagtagcctgggcttaaaatctgatttgggttcatggtacttctctcgtagggtgatttttaaagattaaatgctgcttataaaacacctggaacggctgagtgcagtgggtcatgcctgtaatcccagcagtttgtgaggccgaggtgggcggatcacttgaggtcaggagttcaaaatcagcctgaccaacatggtgaaacactgtctctactatacaaaaattagatggccaggcgtggtggctcattgcctgtaatctcagcactttggaaggccgaggagggcggatcatgaggtcaggagttttgagaccggcctggtcaacatagtgaaaccctgtctctactaaaaatacaaaaattagccgggtgtggtgacacatgcctataatcccagctactcgggaggctgacgcaggagaatcacttgaatttgggaggcagagcggaggttgcagtgagccaagaccacgccattgcacaccagcctgggtgacagagcaagactccatctcaaaaaacaaaaaaaactgcatctactcaggagtatctgaactttcaaaaaagaaaaaaaaaatgccccaaataaacattttaggaagacaaacgcggtaaggtaattattttgtaagaaataatcttacagagaccctgctaacaagcccaaaacagcaattacattaacactggagagggcttttctccagtaacttttattctttcctttgttcacaaaaacgaggctgggattattgcaatgttctggtggagaggctgacttgaggtaggtcggtgggaatgaacagaatgaaaaagttaatactggttctattttccatgagtctttcaagttggttatttttccattccttatgccctagttcacgtcatctttttttgagacggtctccatctgtcacccaggattgagtgcagtggcatgatcttggctcactgtaatctcccatgctcaagtgatcctcccacttcagcctccagagtagccaggactacaggcgtacaccacaatgctcagttaagttttgcattttttgtagagataggattttgtcttcgtgcccaggctggtcttgaattcctgggcttgagcaatatgcccgcctcgacctcctgaagtgctgggattacaggcatgagccactgcactgggcccaaatcaccatttagctggtgtattgccactacttttaaaatcaaaaacattaaacattttgtcatttaatatgacaaaataataaacatttttgtcatattatgtgacaaaaataatttaaaaacccaccctaataatacaaaatgtaatcagcaaaaagtagcaatttttggccgggcatggtggctcactcctgtaatcccagcactttgggaggccaaggtgggcgtataatgaagtcaggagttcgagaccagcctggccatcatagtgaaaccctgtctctactaaaaatacataaaaattagccgggtgtggtggcacacacctatagtcccagctacttgggaggctgaggcaggagaatcgcttgaacctgggaggtggaggttgcagtgagccaagaccatgccgttgcactccagtctgggtgacagagtaagactctgtctaaaaaaaaaaaaaaaaaaagtagcaattttctgttccctttcccatcccacccaatcccaaggcacggtgactcaagcctgtaatcccagcactctgggatgcccagatgggtagatcatttgaggtcaggagttcaagaccagcctggccaacatggtgaaacaccgtgaaaaatacaaaaagttagctgaaaaatacaaaaaatacaaaaaattagctgggtatggtggcgtgcgcctgcaaccccagctactcaggaggctgaggtggaggttgcagtgagccgagattgcgccactacactccagcctgggagacagagactccatcttagaaaaacaaaaacaaaaaaagaaaccacaacaactactatgggaacatttttaaaaattataaaagctaaagtctttcctgaaacaattcctactttttgcttggtaaatgtaaattccacatgtagaataatgtatctgaaaaacacaaaaagtggtatgcttaaaaacttacatataatttcataataaacaagttttcactataatttaggacatattagtcc

SEQ ID NO: 94604 - DNA, 13553 bp, Homo sapiens
  misc_feature (1)...(13553): n = A,T,C or G
tgagattacaggcctgatgagccactgcgcctggtctatttatttttatttatttatttatttatttattttgagacggagtctcgctctgtcgcccaggctggagggcagtggcacgatcttggctcactgcaacctccacctccctggttcaaggaatttccctgcctcagcctccctagtagctgggattacaggtgtgcaccaccatgcccagttaatttttttgttttgttttgttgtttttgagacggagtttcgctcttgttgcccaggctggagtgcaatggcacgatctcggctcactgcaacttccgcctcccgggttcaagcgattctccagcctcagcctctcaagtagctgggattgcaggcatgtgccaccacgcccagctaattttgtatttttagtagagacggggtttctccatgttggttatgctggtctcccaactcccgacctgaggtgatccacccgccccggccttcacagtgctgggattataggcatgaaccactgcgcctggcaatctttttgtatttttaatagagatggggtttcaccatgttggccagactggtctcgaactcctgacctaacgcgatccacctgcctcagcctctcaaagttttgggattatagacgtgagccactgcgcccagcctatttatttgtttttaagagatgaagtctcactttgtcaccctggctggagtgcagtagtagcgtgatcatagctcactgctaccttgaatcctggactccagtgatcctcccacctcagcctctcaagtaggtgggaatgcaggcacatgtaccactgtaaactgctaagtttttgtatgtttttgtggagatggggtttttgacttttttgatacagagtctcactctgttgcccaggctggagtgagtgtagtattgcgatctcgactcatcacaacctccacctcctgggttcaagtgtttcttctgcctcagcctcccaagtagctgggactataggtgcacgccactgcgcccggctaattttagtaattttagtagagatgaggtttcgccatgttggccaggctggtctcgaactcctgacctctggtgatccacccacctaagcctcccaaagtgctgggattacaggcacgagccaccacgctgtctggagatggggtttagccatgttgcataggctgttcttgagctcctaggcccaagctgtctacttgccttagcctctcaaaagtgctggaattacaagtatgagtcaccacgcccagcctcttttggttattttcaaaagtcacttttttttatttgagacggagtcttgctctgtcgcccaggagtgcagtggcgcgatctcagctcatggcaagctctgcctcccgggttcacaccattctcctgcctcagcctcctgaatagctgggactacaggtgcccaccactacacccggctaattttttttgtatttttagtagagacggggtttcactgtgttagccaggatggtctcgatctcctgacctcatgatccgcccaccttggcctcccaaagtgctgggattacaggcatgagccaccgctcccggccaaaagtcactcttcagccatttgaaataccagtaaaccccatagggtagaagttatgctgagagttgatgaacaagttagaaaaagagcatgtggaccctgggtcagctgctgccctagaatggggaccccttctgtaagctatgtcagaatcatctaccagcagtgacagatgtcctgtaaagtgcctgcctttgtggggcaggaagtgccccccgtgaaactaccttgtgttgtggatcttttgctcctccagagcccttactcgggccccacctacagagatgctcagcaccactcttggctggactgagaaaaagctgttggttctctgtttaaaggaaagggattatatttcctttttatggttttgaaactagtgagtttcattaaatgtctagcatttttctgaagccacaaagaaagtgtctctgcaatttcactgaggttcttggaaagtcttcaagatagaattgtatgtatccccaaattctctacatttttctttcagaaaacatcccagaaaagtggaccccagaagtcaagcatttctgtcccaacgtgcccatcatcctggttgggaataagaaggatcttcggaatgatgagcacacaaggcgggagctagccaagatgaagcaggcatgatctggggcaggactgtcttgtagtattcttgaactagggccccaagtttggaggtttggggagcccagcaggaaccttcacaggccaggttgttttagaggctcagaagcccctctgtggccctctgaccctcattaattgggatcttcacagaagatccctaagatagttcaccagtcctgtgagatggaatgtttttttatgaggtagtgctatgcccataaggactgctggcctgagaatgaaccatttcattagtagctagtaatcagtggctctagatgtaggaactttcttttttttgatatggagtctcattctgtcacccaggctggagtgcagtggcgcaatctcagctcactgcaacctccgcctccggggttcaagcgattcttctgcctcagactcccgagtagctgggactacaggcaccctccaccatgaccggctaattttttttttttttaatagatggggtttcaccctgttggccaggctggtcttgaactccttacctcaagtgatctgcccacttttgcctcccaaagtgcagggattacaggtgtgagccactgtgcctggcctctgttagactctttatttttattttttgagacacagttttgcttttgtcacccaggctggaatgcagtgatgctatcttggctgcaacctcagcctccaaggtttaagtgattctcctgcctcagcctcccaagttgctgggattacaggcatgtgccaccacgcctggctaatttttgtatttttagtagagacgggttttctccatgttggtcaggctggtctcaaactcctgaccttaggtgatctgcccgccttggcctcccaaagtgctgggattacaggtgtgagccaccacgcccgggcctgttagactcttgattgccttccccagctattactttggtacatgtgaggccaaagataaattagtggcaactgaaagataaggaaatcttgaaggctgggagtccagatagaaagccctaatgccttccctctcctccactcccaatgcctttttaaaagtgatgatggatgtggcatcttggcctctcagaaaccagctggcctaatggcagggcttcctcactggaggagaagcattgagatcttcaacctaagttctcttactcaggtttctctgtctgaatgtcaagggtaggctttatttccttcagggcatttagtcctggattggtagcttgagtaattttgctcttgattgactccttaaccttccagggctcctctgacctcttccctctacttcccagtgaataccatgtttattagagattttatgtttggtagggggtagttaccatatgtcagtttaaaaatttcataagtttagcagtttgttgttttttttttttgtttttttttttttgagaaggagcctcactgtgtcgccaggctggagtgctgtggcacgatcttggctcaactgcaacctccgcctcccagatttaagcgattcccctgcctcagcctcctgagtagctggggttacaggcgcccactaccacacccaggtgattttttgtattttagtaaagaggggtttcaccatgttggccaggatggtcttgatctcctaaactcgtgatccgcccagctcagcctcccaaagtgctgggattacaggtgtgagccaccacacccagccaagtttaacagcttttgaaagtcttttttttttttaggctgggtacagtggctcatgcctgtatcccagcactttgggaggccgaggtgggcagatcacttggtcaggagttcgagaccagcctggccaaaatggtgaaaccccatctctactaaaaaattacttgggcgtggtggtgggcacctgtagtcccagctactcgggaggctgaggcgggagaatcccttgaacccaggaggtggaggttgcagtcagctgagatcatgccattgccctccagcctgggcgaccgacgagcaaaactgtctcaaaaaaagaaaaaaaaatcttttagatgaatttgaatactttttacttactatatgtatgccacactattagctaaaaggactatttttttttctttgctaggagccggtgaaacctgaagaaggcagagatatggcaaacaggattggcgcttttgggtacatggagtgttcagcaaagaccaaagatggagtgagagaggtttttgaaatggctacgagagctgctctgcaagctagacgtgggaagaaaaaatctgggtgccttgtcttgtgaaaccttgctgcaagcacagcccttatgcggttaattttgaagtgctgtttattaatcttagtgtatgattactggcctttttcatttatctataatttacctaagattacaaatcagaagtcatcttgctaccagtatttagaagccaactatgattattaacgatgtccaacccgtctggcccaccagggtccytttgacactgctctawcagccctcctctgcactcccacctgacacaccaggcgstaattcarggaatttcttaacttcttgcttctttctagaaagagaaacagttggtaacttttgtgaattaggctgtaaytactttataactaacatgtcctgcctattwtctgtcagctgcaaggtactctggtgagtcaccacttcagggctttactccgtaacagattttgttggcatagctctggggtgggcagttttttgaaaatgggctcaaccagaaaagcccaagttcatgcagctgtggcagagttacagttctgtggtttcatgttagttaccttatagttactgtgtaattagtgccacttaatgtatgttaccaaaaataaatatatctaccccagactagawgtagtattttttgtataattggatttcctaatactgtcatcctcaaagaaagtgtattggttttttaaaaaagaaagtgtatttggaaataaagtcagatggaaaattcattttttaaattcccgttttgtcactttttctgataaaagatggccatattaccccttttcggccccatgtatctcagtaccccatggagctgggctaagtaaataggaattggtttcacgcctgaggcaattagacactttggaagatggcataacctgtctcacctggacttaagcrtctggctctaattcacagtgctcttttctcctcactgtatccaggttccctcccaraggagccaccagttytcatgggtggcactcagtctctcttctctccagctgactaaactttttttctgtaccagttaatttttccaactactaatagaataaaggcagttttctaaacttcctgtatcctgttgtttgtgttgctctctccagggctgggggtaggaggatgcaaggacttcctggcctagctcaccctggagaggtttgttgagtgcaaaggactagcttgtgccccacctcccacccacccagcagctaatctggtccctcccaacaacatggaaatgattaccctgtaccgcattctggttcagatttgggggtagggtgaatgcagcctgaggaggccagggagggaggactccggcagcgtttccttggcctcggcgagctactgggctccacttaaggaggctggggcagagcttccaggactctgcccggttagaaaacccgcacgagggcggtgccgctttggagacagggaggagggagaccggaagcctagatccctctggctgtcccctgcactgccggtaacatggcacaggagaggagggctgtttgtgcacgggcagctcctgcagctgctgccgtcgcccaccagcctcctatgccaaaccccacatcctaactcaggaacctctgagaaaaaacggagccctcgagggccccagcccttggaagggtaacctggaccgctgccgcctggttgcctgggccagaccagacatgcctgctgctccttccggcttaggaggagcacgcgtcccgctcgggcgcactctccagccttttcctggctgaggaggggccgagccctccgggtagggcgggggccggatgaggcgggaccctcaggcccggaaaactgcctgtgccacgtgacccgccgccggccagttaaaaggaggcgcctgctggcctccccttayagtgcttgttcggggcgctccgctggcttcttggacaattgcgccatgtgtgctgctcggctagcggcggcggcggcggcccagtcggtgtatgccttctcggcgcgcccgctggccggcggggagcctgtgagcctgggctccctgcggggcaaggtactacttatcgagaatgtggcgtccctctgaggcaccacggtccgggactacacccagatgaacgagctgcagcggcgcctcggaccccggggcctggtggtgctcggcttcccgtgcaaccagtttgggcatcaggtgcgccgggcggagcggggcggggcgggggcggacgtgcagtagtggctgggggcgccggcggtgtgctggtgggtgccgtcggctccatgcgcggagagtctggctactctctcgtttcctttctgttgctcgtagctgctgaaattcctctccgcccttgggattgcgcatggagggcaaaatcccggtgactcatagaaaatctcccttgtttgtggttagaacgtttctctcctcctcttgaccccgggttctagctgcccttctctcctgtaggagaacgccaagaacgaagagattctgaattccctcaagtacgtccggcctggtggtgggttcgagcccaacttcatgctcttcgagaagtgcgaggtgaacggtgcgggggcgcaccctctcttcgccttcctgcgggaggccctgccagctcccagcgacgacgccaccgcgcttatgaccgaccccaagctcatcacctggtctccggtgtgtcgcaacgatgttgcctggaactttgagaagttcctggtgggccctgacggtgtgcccctacgcaggtacagccgccgcttccagaccattgacatcgagcctgacatcgaagccctgctgtctcaagggcycagctgtgcctagggcgcccctcctaccccggctgcttggcagttgcagtgctgctgtctcgggggggttttcatctatgagggtgtttcctctaaacctacgagggaggaacmcctgatcttacagaaaataccmyctcgagatgggtgctggtcctgttgatcccagtytytgccagaccaaggcgagtttccccactaataaagtgccgggtgtcagcagaactgtgtgtatgtcctgtgtcattgtcatttgggaattctttttcttttctttttttttttttttttttgagacggagttttttgctctattgcccaggctggagtgcagtggcgcaatctaggctcactgcaagctccgcctcccgggttcacgccattctcctgcctcaacctcctgagtagctgggactacaggtgcctgccaccacgcccggctaattttttgtatttttagtagagacagggtttcaccgtgttagccaggatggtatcgatctcctgacctcgtgatccacccgcctcggcctcccaaagtgctgggattacaggtatgagccaccgcacccggcctggcgatactttttctaacctcattgtcatagtggtgggaacttaatcctccttcccttatcctagccaagtctgaactttctgtccttttgtctgcagcgtgtaggatccactctttcctttgtgggaagtctggctcctggcctgcatttctgccttcaccagaacatgcaaagggccatctcaagacccagttacaacaaagtccttacttcaaaaaagacacaaggcaatggttgactgcctaactcaaatgatagacttctgactacttgctgcacgctgaaatgactgtcacaaaataacatgagcccccactcacatttggagtcatggcctctccaattgttaggtccacacaatcccattttacacggaagctcatgcaatgttataaattctgttatctggctagatctttccatgttgctaccaagtgcctgtatctgctgtgacgatgatcttacaagtttctgcctcatatattcaagagtgagaaaactataatttaactggcccttctgactatgccctgcccaacacttaacgtgcaattaattgcacattcaggcccaggataagggcttgtctttgaagccagctgctgcttctcgggcaccactcaggtccagcctctccatctgttgaccctgctgccaataatctttaattttttttttttttttttttttttttgagacagtcttgctctgttgcgcaggctggagtgcagtggtgtaatctcggctcactgcaagctccgcctcccgggttcacgccattctgcctcagcctcccgagtagctgggactacaggcgcccgccaccacgcccggctaatttttttctattttttagtagacggggtttcaccgtgttagccaggatggtctcgatctcctgacctcgtgatccacccgccttggcctcccaaagtgctgggattacaggcttgagcagcaataatctttcaagacagatttggagccatttcctaacgcagtgcaggggactgcagggcctgggtgtagcttccgcttgtgcaaacaggtacccagagacatggtagtgctgttcacccgctgactgtggaccagaggttctggagtcccagcatttgtgttcaaattcgtgactcaaggtccttcttagtctgaaccaactctcaaggacttttcctcttgccctaagcagtgatctttgctgctgctttccccctttgtctgcccttaggtcactaaggattgtagggccttctggacctgctctggctccatcctgagaactcctgaacaggcccacctccctctggttctctctgccccagcctttgagtcccccttggggtgacccaggtagaactatcagcttcccctttggacctcactctacttgtgttgttccttggaactctcaggagtctcactcttgcccaggctggggtgcagtggcatgatctcagctcactgcagcctccacctcccaagtttaagcgattctcctgcctcagcctccccagtggctgggattacaggtgcctaccaccatgcctggctactttttaatatttttagtagagatgggatttcgccatgttggccaggctggtctcaaactcctgacctcaggtgatctgcccgcctaggcctcccaaagtgctgggattacaggcgtgagccactgcgccctgccagaatggaatgttattatattaatagatcaatatttgtgatgaatatcannnnnnnnnnnnnnnnnnnnatgccgggccctgtgggccctgagatggctagcccctgtacccctcctagactgttaacttctggggaagaagattagtcattcataaatgcaatcaaggctcctgagtggccattcatggacgctcacgcctataatcccagcattttataatcccaagtaatccgaggagggcagatcacttgaggcaaggagttggagaccagcctgaccgacatggtgaaacccccgtctctactaaaaatacaaaaattagccaggtgtggtgtcgggcgcctgtaatcccaactactctggaggctgaggcagggagaattgcctgaacctgggaggcggaggttgcagtgagccgagattgcgctattacactttagcctgggcaacagagcgagacactttctcaaaaaaaaaaaaaaaaaaaaatccactcaaatggtaccaaggctttttgacatttgtagacttcaaatctgactcctggaatggagaatagcaacctgtaaatctgggtggacccagattgcctgtgacccctaatgtcctacatgtctcttccccaaaagcactttgctccctcattcattcataatccagtcctgtgccgtgtgctctgccaggtgcctgaagaagtcagaaggacagtatataattatcaaaaaagcatgttttgtgctttgagaataggaaaaaaagacaagaaaaaaattgtgcaccttacactagttaaaaaaaaagaataggccgggtgcggtggctcacgcctgtaatcccagcactttgggaggccgaggtgggcggatcacgaggtcaggagatcgagaccatcctggctaacaaggtgaaaccccgtctctactaaaaaaatacaaaaaattagccgggcgtggtggcgggcacctgtagtcccagctactcgggaggctgaggcaggagaatggcgtgaacccgggaagcggagcttgcagtgagccgagattgcgccactgcagtccgcagtccgacctgggcgacagagcgagactccgtctcaaaaaaaaaaaaaaaaaaaaagaataaagaagaggaccaggcccagtagggaggctcatgcatgcctcctggaaaaagtgacagtgaggctgggtgcggtggctcacacctgtgatcccagtactttgggaggccaaggtgggcagatggcttgatggcttgaggtcaggagtttgagatgagcctgcccaacacggcgaaaccacgtctctattaaaaatatgataattagctgggcgtagtggcgggcacctgtaatcccagctactcaagagtctgaagcaggagaatcacttgaacccaggaggtggaggttgcagtgagccgagatggtatcactgcactccagcctgggcaacagagcaagactccatctcaaaaagaaaaagtggctgggcgcggtggctcacacctgtaatcccagcactttgggaggccaaggtgggcggatgacaaggtcaggagatcgagaccatcctggctaacacggtgaaaccctatctccactaaaaatacaaaaaattagctgggcgtggtggcgagcacctgtagtcccagctactcgggaggctgaggcaggagaatggcgtgaacctggggggcggagcttgcagtgagccgagattgcaccactgcactctagcctgggtgacagagcgagactccctctcagagaaaaaaaaaaaattgagactgaaaagaagtcaagaagcagttggttaaagaataagctgatggcgggtgagcaggcagggagtatagtgtgtgagatcctgagatgggaaggtggcattcttgactaagtcagcaacaggaggagcaggttttgggggtaggtggatgtgttcagattcagctatactgcattagacatccagacagaggtatctggggcaggcagttacaagaggcgcagaagaagagaatgttgaaaggcaatggtctagccacgggagcagtagccactggagaggatgaggtcacgtggggaaagtggcaagaaaaagattaggggacctgggcctgaggcctatagattcacaatccttccagatgagatggcagagagaaatagctggggaggaacaaggttggagcaaggagccaagggaagggacagttcctaaagaatagttagctggaacccatgcttctggactgcctgcagtctcggggcagctggaaccaaagctagaaagccatgtgtctaggaggtaccaggtcctattctaggagatgaatatacagtgcccaggagtcacccaggtacttgtgaaaatatatgttccacaacccacctccagagacaccaaagtggaaagtctagggacctagggtcctactcagtgttctaccagctggacctgtgagaagagacatcccacttcaactctcccctttcctgtacagggtcaatgtggcctaggccacactctctggttaggctacaggataggaacccagaactttccaataaactccaacttctctccaggatgcctggtgattgacccctccttgccccatgccacccccaccatctcagtttatgccttggactacgagtgaagggaactttttttggtttcccctgaaattactcagcttcagtaaagggaacttctgaactcccagtatgcctgatcctggctggagaacatttctcctcagactttaagctgtatgcctcctctctcaactagaagtcatttctttctttttttttttttgacagggagtctcgctctattgcccaggctggaatgcagtggtgcaatttcagctcactccaacctgtctcccgggttcaagcaattctcctgcctcagcctcctgagtacccgagactaatttttttgtatttttagtagaggcagggtttcaccatgttggccaggctggtcttggactcctgacttcaaatgatccacccacctgggcctcccaaagtgctgggattacaggcgtgagccaccatgcccggccagtcctttctaactctctcttctccaggaagtttcagagtaaagccagttaagacttcactgtcttcccccaacacacacagacacactctcacacatacacattcttttcattcaaccatgcaactgctgctgctctgactggtacccaccccaccccattgtgaatcagcagctcaaataaacaagtaaaagagtagaaatcacattcagcctatgtgaagtcctggctttaaaagcagaaatggctgcagagcattgcttgcacagaaaacacatacagcatttaggccactgacctaggttcagaaacttccatttcagcagttcttacagaagggctgcttttggggttttttttcaaacattaaatctgataaaattaggtcaggcatttcttgcacaattagcagttgatcaaatgacttccttattctgactcaacgtagtcctaaaaacaacatttaaaacaagtttattttcaggctcagtgcagtggctcacacctataatccaagcactttgggaggctaaggtgggcagattgtttgagctcaggagtttgagaacagcctgggcaacatggcgaaacactgtttctacaaaaaaatactggccaggcaaggtggctcatgcttgtaatcccagcactttgggaggaaaaggcgggtggatcatgaggtcaggagtccagccaatatggtgaaaccccgtctctactaaaaatacgaaaataagctgggcatggtggtgtgcacctatagtcccagctgctccagaggctgaggcaggagaatcgcttaaacctgggaggtggaggttgcagtgagctgagattgggccactgcactccagcctgggtgacagagcaag

SEQ ID NO: 94605 - DNA, 49979 bp, Homo sapiens
  misc_feature (1)...(49979): n = A,T,C or G
taaggaaaaagaaaacagggaaaaataaaacctcatcaatatcttccaacagttaacaggagataccacattcatgaaacaaaaaataggttataaaataggaatagagggaacaagaaaaagctcttagaaatgagaaaaaccttggtagaagggctggaagacaaacttgagaataacttccagaaagaaaatgaaaaaccaaagggtacaaaacatcaattagacaggaggaatgtggttttcttttatgagatatattgtacagcacggtgaatatagtaaataataatgtcgatttcaaaagtgctgacagtaatctcatatgctttcaccacaaaaaacttaaagtatttgaagtgatgaattatgttaacttgattttattatttattgtatccataaatcgtaacatcactttgtaccccctaaatatgtacaagtataatttgtcaatttacaatttaaaagataaaaacaaaaacaaaaattttagaggggggaaaaagaaaccttaagaaaattatgagtgccaatccagaaagtccaagagtagaattctagagagagagagagaaagcaaataggaagaaatcaaagcaataaatcaaaaaaatgcccagcgttgaagaacatgagttgcaaataaacaggaccaaagagtaggcaagacgatggatgaaaacagtctccaagggacatcactgttctgggagttctgaatttcacagaaagaaaagcctctgaggccagatgcaaagccttcactcccagcacttcgggagtctgaggcaggagaatcacttgaggccaggagttcaagatcagcctgggcaacatagagagctcatgtctacaaaaagtttttaaaattatccaggtgtggcggtgcatgcctgtagtcccaggtacttgggaggccgaggcaggagcatcactcaagcccaggagattgcagctgcagtgagctatgacagcgccaccgcactacagcctgagcaacagagcaagacgctgtgtctcaaaaaaaaacaaaagaaagaaagaagaaaaaaaagaaacaaaaaccttcaggtttcatggaggaaaacatagtcacacacaaaggctctaaaaatgttacgtatcaataaaagagaatcagaacggcttaagacttcaacaacactggaaacttagagaccgcggagcaaaatgatgtccaaattcctactcaggataagagcagaacgaggcactttcgtacatacaaattctgaaaacttcatctgccatgcacttctcaggcaactagtgaaggatgtgctccatcgaagtgagacagtcaaatcaagagaatgacataggttccagaaaagtgaggctccaacacaagagggagtgaggagagttacaggaagatttcaggcacagacaagcctgcagcagattggaggcgctgggagagatttattcaagataaaatgataggaatactaattttcttcaaaagaaaacggacaatttcttgaaagatttagataattgcttcagaatttggggttgaattgtagtgacaaaatatagaaaactgagcaagcagcaagcaaacaaaaacaaataagacttgtaataacccaggaaaacaaaaagttatccagaaaagtgaaaacaatcctattataccacttcgtccagctgtaaatggcaatatgtagtcataatataaacaatcaatactgaactaaccaaattaaggatatatcactttgggcagccatggatccgtttgcactgagaaggcagagggtgaaagaaagctaggaacttcctacctattctcagtgtcaagcgaagagacatcacatgaaacaggggtaggggacacaaatacagacgtcaagcaaatatgctctttagagttggaggcaaagatcaaggaaatctactaaggctgaagtagatactctgcaggggaggaaacatgattaggggaaggatgttggcacttctttcttacaagcctttctaggattatctgactctacaaatgacatgaagctgtaaccttgatttgaaataagattaatatgaatgctaataaaaagtagtaagggagagtatgtagtcaatgtattcttaccaaattaacaacaagtatcaacaagatgactaacacaaccacatgatgtccagacacgtctcagaacaaatgtctagctcatcttcaacggtattcgaggaacttcagtgtgcttggtaaaacaatagcctactagggatttcacttctaaaatgtctctgactttagaaataccaaaaaataacatgtaaccaagttttaaaatattatacacatgaaaaaaggttcttttcattattttcttggtttccagatgttgaacgttgtggtgcttttacaattgaagagaaaaagcattctgacacattatactggttggggttctctgcttttctacttggtcaaaaacctttacacgcattttggactttgtgtcatcataacttggcaattgggaaagccgcatgatatgcttctttcagaacttggttacttcttaccaaaagagggaaaagctttcgtatcaccatttgcctatgggatggatgcacaatgaacgggccataccaaataaaaatatcactttgtactccaaaaagcatgttctctgcttaagccctttctgtaagtttcagctgggacgcactaatggagaatccatatgacccacgaaggatcgtaagatatcccagtggacccggcacaatcatctcaaattctgttcaggtcagagtatcttagataaaactcactgaagggcatcaagtccttcagtacacagtctgagccaagccctctaccatttgccatggcaagagtataccaaattctaaacctgttgctcacgtatgccaccaactataaatgtcagcctcctctttcctagtcttcctgtccactcagcaccacctggaaaaactcttactcgtcttttaaaccgcagttcaaggaccacattctgtaggaagactttccaacaggtaaccacagcctatttcctatgtccacaccttacacatatttctatcattgcacttatcacaccataatgtaattactcttctacaaataagtctctcacactagaccacaagctgcctgaggaaaagaaaagtctatatcctctttttttgttggctttttgagacacagtctcactctgtcgcccaggctagagtgcagtgctacaatctcggctcactgcaacctccgcctcctgggttcaagcgattctcatgcctcagcctcttgagcagctgggattacaggcgcgcgccaccatgccaggctaatttttgtatttttagtagagacagggtttcaccatgttggtcaggctggtctcgaactcctgacctcaagtgtccacccgcctcgacctcccaaagtgctgggattacaagcgtgagccactgcacctggtcgaaaagactatatcctctcaacctttgtatctgcagaacccttaaccctacacagcaatttccagcaaatatttttttgaattgaaatgaagaagtgaggtcatgaggctgaagtcagacaactggaaggccaaaacaacaaaacctggaaaaatacgtatttactcaagaagaaattctcccaccaggccactgagaagttagctttgcccactggagaggacactgtaacagggattcaagtaagcctagtggcgctgagggacgtgatataggtcaactatatctttgaggtgctctccttacactcaatgcacttttacccgaatgacgttaatttgactcctgataagatgagctaagtcccttcaacagtgcttggcaccaagcaaaactaatagcagtaacaggaaagtttaatcctcatgatgaattatttaatggggtttcaaacgctgtccctgagacttgaggcagtaggctccagctccattttccccaagtctaaaacttgataggttgatgtttcagactcagagattcggtaatccaaatgatggaaataattcttacccaaacaccttttcaactatttttaaatactgttgccaagcatcctaatatcatgtgtacttaatgaatttagcctagggatacttttacatgtcaaaaaatcaaaatataaacctaagcactacgtttcatccagtgtttcagcatcccagatttgcttccctaaatgaacattaagcttattatgcaatgtgccgctaccaggagccttagacaaaaccctaattgtgacttaacctatcttaatagggttttaaggaagttagctgctaagaaagtgactatccttaagcagacaccaaataaatgtgaagtcattgattgagggcttagggtataggtagctatgaatctgaggacataaaacgcaaaactgaggggcaaatcgtcatgttccttaagattacgactcatccacattccttcagacgtttaatttcaccataataggcactgtttaataagcaaagcccaagtcgacttccttcgattttacatggcgtccaaacaccatgtcaagtctgaccctctcattttttaagtcgaatggagaggatatgtagcagctagccttgagcacctaaccacttttcaaaggagctacgcacaaaaataccctagcaacatgccacggtgtcagaaaggctcaggttcccaacaccatgcgggtcagccattaggaactcaggaagtgtttcctctaagcgggggaaacctaggaaggcttcctgaacgaggggtatttgcgccaagccttgacgtgagtctcgaacagttgcagtgcctccaggccacgcgggagggaggaaaggacaccccgggccggggcacaacccgcgggccggagccgcccgcgcccatcccgctcaggccgcagccaggcacggcaccctcccgtccccgagccacgtcgctgctcgtgggctcgcggagcactccccaggtctcacctcgggccccacaccagaaggagaaagctaggggccgcgccagctccgccctcccccgcggggcggcgggccccagcccgggcacaggaaggccacgtccccggggagggacgcccgactcgatggtctgcgcagggcccgtcggccccacgtgacgtgcgcgcagccaatcccagagaggccccccgatcatcgagacggcggcggtggtgggctagacgagtttcgcgcgggcgctcgccgtcccccgcccagtcgtactcggcgccccagctcggggctggcgccatcttcttggaagacaggaagagaagccaagggctccctccccgggaatggtccggaatcccgcaacaattgcccttccgggacggctttttctttttaagggggacttggttccttttaacaaagggctttcccccattcggttaccaccgaaggcaaagaatctcttgaccgnnnnnnnnnnnnnnnnnnnnnnnnnnnnnnnnnnnnnnnnnnnnnnnnnnnnnnnnnnnnnnnnnnnnnnnnnnnnnnnnnnnnnnnnnnnnnnnnnnnnnnnnnnnnnnnnnnnnnnnnnnnnnnnnnnnnnnnnnnnnnnnnnnnnnnnnnnnnnnnnnnnnnnnnnnnnnnnnnnnnnnnnnnnnnnnnnnnnnnnnnnnnnnnnnnnnnnnnnnnnnnnnnnnnnnnnnnnnnnnnnnnnnnnnnnnnnncttggtaaaaggagaagaggctacgcttgacctccccccccacccccagcctctatatggccaactgccgtgggaggagcacggcgcttgcgcagaggcggacaacgcggacgactctgggcttgcgcactcggaagccggccgcatgggggaggggaagaaggccaggtcgcactgagccaggaagcagttggcaaaggggcggggtgacgcggtgacgcaatccgcctgcgcgctgggcggggcggggcgggctggggcgggctgtgagcggaccgcgagcgctgggcgggtccgcggcgcggtcggtcggcgcctattctcgggctgtttggcgggtgagtgtctcgccggtgtaccccgcacaagttgtgggccggccctcccgaggagctgcgggggacgcgccgctcgtcccatactctcgggcggtggtcggctggctctggggtgccggcggggcggtgtgggggaggggcggccgagcccaggctcttcggcacttatcgtgggctcccccgtcccgggcggtcctagtgccggcgacagtggctccgacacgggcaggcccgggcgcgggagtggggattccggtgaccccttgttgaccctgcgggaattcctctgcactgtcgtcggtgctgggcctcggggcgtcgagtgcggtcgaggtcgggaggtttggtgcttggagggaggatacaggtttaggcccgacaaacacttagagcttgtgtggccatcttgtctttctaacggtgccatttcctccctgaggcgtggaggactggccagcccccaaacctccaagcccatcggctggatgccgtggataagcgaggggagagcgactaggccctgtctgcgggtaccttcggcgaggagaggcgacgaaggtctgcaccagcgaggcacggacaggcagcagggggtagggtatagggttggrggccgccgagttggcccggggatgaggagcaaacctgtggcttccgtggtctcagtggagtcccaactgtgacctggcctactggcccagacaaacctggcttgcttttttaccttttcggtctaattcttgtcagtgccaccagaccttgtcctctctccacggaaacacacgaaccaactacactgaacttcttgtagttcaaacttctgcacctttggccattgcccaaactcttaaatctggctacttcccaccttaactgccttctccttacctagtctgtgcttgtgggattccgcccaaattagatttcctccagacaggcttaggtgtttacctgatgttccagatggtatttgtccagtggactattggtgctgtgagggcagggcacatgttgtcacccatactcattgcctcggttggtgtctagcacctagtaggttctcaaatactttttgaatcacagtgcctgccgatatatttaatgtttcaaaatagttctgccgtcataaagaaaaacatcatggtgtaggggtcatgaaagctgattcttgatacttctgatttgagcctcattgttttcagtgatttttgatagctcccattaatgggttctttgcaccacccagcatcctaactcatgatgtgtactgttatgtataatcttggcattgatctcattagctataaaggttgtcctgattttttttcctcaacttccaccttgatttctctcaccagtgccacagccaggaataaagaacaagagcgttttaattagatcagatttacattctgactggctcttaaactagcaaggtgacctagggaaaggggccagggtttccctctatcattcataaatgtaattcagggcccctttttatccccaataccagcatacagaaactgctgtaaaagaagaagttgtgggtatttttttttttttttttgtctggaggaatggggacaccaaaactcatttggcagcagaggtgaggtaaggccatttgtattgtctgttctgttagtagtcatacatgccacttatccctgccccagtccctgttaggagtgttatgtgggtatactgaacgtggaccttccccgaatccaaagaatccagatgctttgaataagatcatggaccttccgggttctacatcgccagatgttgttcatcttctatcttttgttttgcgaaaattggttttttatgtgtattggggttattctgtggaagaaataagctgtgggtcaagattaaagaactttaaacaacttctggcatgtggaataaacacgatctgaaggaacaaaattttcatttgactacatttttggtccaatttgcacccagtgtttaagttaatcacagtgcttggcagtttgtgttgctggatcaaggctttctcactgaaaaccatgtgcttcagaggttcataattcctctttcaccttccatttcacattagttaataaattatgagagaaaacattgtggatccaagttatgtttcagaaaaaaaaaaacaggaaaaaaaaaagatggcaggagaaacttggtaaagtcaaagcaaagttgaaatgtcagtttaagacaaatagtttctccattttcccatatgtgtgcacagggttcagtgaggctgaggggttctgtggaggtgcgggagaggtgctctatggtatttctatgttgcactgtgtgggtttgaaatcagatacatgtaataggtgataaggtaagtgcctgctcttttctatcctcagcattggcatttaatctttccatgtgaacttaaagctcattttatccaatcctttaagaaaaaagccacaccrttagggattccagttagaaatggactaaataacatactcatttggggaaaataaaaatgatttgatttatgtaggacctgttttctagtttggtccctacttgtttggatttttaaaaattctgttgtaaatgatgtgcccccatttctattccttgatatttgttgctggtacttgacttacttgagatcttatatttagctaccttactaaattatcgtattctagaatttttttaaccagagtatttgtattttctttttttttttttttttgagacaaagtcttgctctgttgccaggctggagtgcagtggtgcgatctcagctcactgcaccctccacctcccgggttcaagtgattctgcctcagcctcctgggtagctgggattacaggcaggcgccaccacacctggctaatttttgtatttttggtagagacggggtttcaccatgttggccaggatggtctcaatcttttgacctcgtgatatgcccgtcttggcctcccaaaatgctgggattacaggcatgagctaccgcacccagccgagtatttgtattttctgtgtattcagtccaatcagcaaaaaagtgttttcttttgattttcttgtttcattatattcagtaaactcaccaaggtagtattaaataatcatggtgaaattgcaatatctggatcttacttggatcttgattcacatgaaaaaaatgagagaatagagaatatgaatactgattggatatttgattgcattaaagaactagctatgtgtaaggtttgtcattttaggaagcccttatttttagatatgtgtagtggaatataaatgaaatgttacatctcgtatctgcttcataatcatccaggcagtggcattgatgattgtggaaatagatgaaacattattgaccttcagttgctaattgttgaagctggataatggatagcacatgggggttttgtttgctttttgtataggtcttcatgtaaaagttttcatgtaagtgcttaaaaataattatggaagggcattcctgccgaattatcggttgtaatttaaatagatttaattttctattgtttagaaaacagtatttgcctttggttttcagaaatatcctgaattagatttaagcagttttcctttttttctttttttgagacagtctcactctgtcacccaggctggagtgcagcagcaccatctcggctcactacagccttcacctcctgggctcaagggatcctcccacctcagtctcccacttagctgggattacgggtgcccgccaccacacccagctaatttttttgtattttttgtagagacagtgtttcaccatgttgtccagactggtcttgaactcctgagctcaagcgctcctcctgcctcagcttcccaaagtgctggtattacaggcgtgagccaccacactctgccagcagttttcttactgttttcattatgattggttgctgaatttcatatgcctcatcagcatctattaatgcatgattttttttcccctatactgtgttgttggattaatattggtagatgcttttgatacattcctggaatctaattgctagcaaatattgtattcaggatttttgcatttatatttgtgagtgagattggcctatggcgttcattcattcctttgttcctttcttatgtctccatctgggtttgttattaaaactgtgctgtcttcataaaacaaattgttttcccttttctctatagaggcttggaatagttaaatgactttggtcttgtccaaggttannnnnnnnnnnnnnnnnnnnnnnnnnnnnnnnnnnnnnnnnnnnnnnnnnnnnnnnnnnnnnnnnnnnnnnnnnnnnnnnnnnnnnnnnnnnnnnnnnnnnnnnnnnnnnnnnnnnnnnnnnnnnnnnnnnnnnnnnnnnnnnnnnnnnnnnnnnnnnnnnnnnnnnnnnnnnnnnnnnnnnnnnnnnnnnnnnnnnnnnnnnnnnnnnnnnnnnnnnnnnnnnnnnnnnnnnnnnnnnnnnnnnnnnnnnnnnnnnnnnnnnnnnnnnnnnnnnnnnnnnnnnnnnnnnnnnnnnnnnnnnnnnnnnnnnnnnnnnnnnnnnnnnnnnnnnnnnnnnnnnnnnnnnnnnnnnnnnnnnnnnnnnnnnnnnnnnnnnnnnnnnnnnnnnnnnnnnnnnnnnnnnnnnnnnnnnnnnnnnnnnnnnnnnnnnnnnnnnnnnnnnnnnnnnnnnnnnnnnnnnnnnnnnnnnnnnnnnnnnnnnnnnnnnnnnnnnnnnnnnnnnnnnnnnnnnnnnnnnnnnnnnnnnnnnnnnnnnnnnnnnnnnnnnnnnnnnnnnnnnnnagcaaaactccatctcaaaaaacaaaaagaaaaccagcttttggatttgtttacccttctttttccccccctcataattcattttttctctttattgatttcctgttttatctcctaagttttgcttttatcttccttccattgctttctagagattgcttatggctttgcttttgttaccctccttgatcctggggatatccagtaatgtaacaaattactgggagttacttttcatctttttccacccaatttaagcagataattatttgagaacattgactgtaaaaatgtttttcaaattttgtttaggcttttttttatggtagatacatgacttcaaacattttttaaggtattgattcaaatttctctatgtctgctaaatcagatgtatttgttgtattactcagttcttctctgtccttgcacatactgtgtttactgaatctgtccggttctcagagaactctrttaaagtttctcacttgaatttttttttttaagtttgtatttttcctagtccttgctttatgtgtttatctacagtgattatttgaatatacaggcttatgaatattacatcttccctataaattgtttcttttatcattatagcttgttatccctgttattctgcttatttttactttaattcccaccttggctgatagtagtgttgtctctcctccatgtttgcactagcctgctattttttaccttgtccctttattttcagcctctctttgttccttttgctttaagcatatacgttatagctggacggtttgttgtttttgttttttttttcccttggtttttcaggccaatctgtcttctcctttaagcagagaatttggttatttcacatttatactgataactgatattcttgaattttgtccccattgtcttgatttaggattacttctgattttgtttcttcttgttccttttccatatttttgctggtttgatgaagttgctgtttcctccatatttttctcttaatttggaagttctcattgttattttctttaatgattacctttttttttactttcataatcagatacttatctctgtattatttgaaaannnnnnnnnnnnnnnnnnnnnnnnnnnnnnnnnnnnnnnnnnnnnnnnnnnnnnnnnnnnnnnnnnnnnnnnnnnnnnnnnnnnnnnnnnnnnnnnnnnnnnnnnnnnnnnnnnnnnnnnnnnnnnnnnnnnnnnnnnnnnnnnnnnnnnnnnnnnnnnnnnnnnnnnnnnnnnnnnnnnnnnnnnnngataactggggacctttccgtttcaaagggaaacagaggccccagtttccaggaagtaaattttgggggaggggattcgagaggcaaagtaaaagaagctttttattaggttttaagctccaaaaggaacccaatttggcagcagtctctcttttggggttgttactaaggttagccaccagactccatgctttccaaagcttcagggtttctaaaatttgtttaaaaattccacatatctctggctgggcacagtggctcacacctgtaatcccagcaccttgggaggctgaggcgggcgggtcatgaggtcaggagatcgagaccatcctggctaacacagtgaaaccccatctctactaaaaattwaaaaaaaattagccrggcatggtggcgggcgcctgtagtcccagctactcgggaggctgaggcaggagaagggcgtgaacccaggaggtggaggttgcagtgagctgagatcacccactgtacttcagcccgggagacaatgcgagactccgtctcaaaaaaaaaaaaagaaaagagaaaaaaaaattccacatatctttaaaaatattgtcacatttttcagacactcagatgccttcagtactatttcctttcctcataaatgtagttcacattgctctctgtaccccagtgtcaaaatctagttctcaggtagctctaggaaactccagtgggtggcaaacatgttcaagttacagtgctctatgtaatgaagtcccttactccttgaaaggtttcaaagagagaggggaaatgacataattccagaggtcagggaagtatgtatccgtgtgtatcccatttgtgtccctagtgtctaacatatagtcagtactgaaaaaaaatttgaatattattgaaaatatggaatatgtgcgtacatatatatatacagttgcttttatcaacttaaaaatttttttaattttttaattttttgtagagatagggttttgctatgttgcccagattggtgttgaatttttggcttcaagcagtcctgcctctgcttcccaaactgctgggattacaggcgtcagccactgcacccagccaccatctaattttttttttttttttaatggagtctcactctgttgcccaggttggagtgcagtggcatgatctcggctcactgcaacctccgcctcccaggttcaagcgattctcctgtctcagccttctgagtagctgggatcacaggcacgcaccaccacgcctggctgaatcagtatttttagtagagacggggtttcaccatgttggccaggctggtcttgaactcctgacctcaagcgccaccatgcctggctgaatcagtatttttagtagagatggggtttcaccatgttggccaggctggtcttgaactcctgacctcaagtggtctgcctacctcggcctcccaaagtgctggaattacaggcgtgagcatcacgtctggcctaatttttttaatcraatttatttttgtaatgatagatgcttgtcttattcctagggaaatatttgaagtaattgagatgctgtcacctaaaataatcaaaaggctcctgattcagttaaaagaattcatttaagtacagagtgtaagcgagctacaccaaagaatggtgattagcgctcccagggtggggaaaaatgaggattgtttatataggcaaaatggaggtgccaaacagaattataacattttcrgaactaaggctcatttaaagatacaaatttgattggctactattgattrcacttgaagggatttgtttaacttccttttgtaaagaagtaacagtcataaggatctctcatctcccagtcatttagtctagttttgaataaagaatagggggtctggttaatatatacatctaaacacaaaagtcagaaagaataaaagtagtgatgttacaygagccagctgtcagtgcytaacttttccctttggcctaatgcatttggaaggtcctgaaattgtattttctttttacattgcctatgtatgtgtaagtcttcttcaggtcagttcacgctgttaaatatacgtgcgtatacatacatactatgtatgtgcgtttatgtgtgtctgtgtgttttttttttaacagacgaagcttcacaaaagatgtctaaggtaagatcatacttcatgtatctacagcataaggagaaattgctttatgttttcagactgttgacagtcgggacttatatgattcattatttttaatacaactgatacatttgattcattaacacaaagagttctaatttagttgtctttttttttttttttgagacgggagtcttgttctgtcaccaggctggagtgcagtggcatgatctcagctcactgcaacttctgcctcccacgttcaagcgattcccctggctcagcctccggagtagctgggactgcagacacgtgccaccacgctggctaattttttggattttagtaaattcggggtttcaccgtgttggccaggatggccttgatctgttgacctcgtgatccacccgctttggccccccgaagtgttgggattacaggtgtgagccaccgtgcctggcctaattgtcatcttaaaagcttggagctttctcttttttcaggcttctactttcttttctctacacacatcagtaacagtcctttggcccccttagttcattcccagcagaccagataatttagaattctgataatttattatgatgaamttgatggggctcttagacttgataaattggtttaaatcagcctttgcaagttagttcagagataaattagtgctaaagaacatattctgagaaaagcagaacttgtggttaacattgcaagattattatttctgttttttttttatctttgaatcctgtgggtgttcattactgtccaatgcaaaatcatcataccagtttttgcattttataccagtgttagcatggaacacagataagcaaaaaaaaaaagtcattatttcaccactcaggaataaccactgttaatatgttacatatattctttttcacctgtgtgtgcatttgactatacatttacaaaatgtaatcctaaaggaaatactattttgtatcttgcctttttcaattaataaattgatttttaaaatttcttctcattttcagtatgccactgtctagattctggttacttctgctattcttgccttctcatatctctgtcctctctctcatcagatacccttctgtcaaggaatattgatgcttcagtgtagtcatctatgatcttctcattctgtcttttctttcttggtctttgacactagatactcaacatcccacccctaatttgcctgcctcacccttgatgaaactctgttctatagagctagaagcacagcaagagagatgcttttttcctcgatacttttcagaaatgcattgcacctaatacctgggagaagctattctttagccaagtttgttgaatgaaaccattcattcaaagtactgtcagctgtagcagtactttgtaagcttgactgattttcctggaactccatagtctctcaagtcgaaatttgaaattgcattaagatgtattaagcatgtatcttctatgtattgttaaattcctaaacagaatactgattaacaaaatgttaattttcagtcgcatacaactaaggagttatactagataagtttttctttttttaatgctcctagttgaatactactggttttctgatagaagtatgacyttctggaagtgtttatactttttaaaaaatttgtgaaaamtgataacctatgtttgtttcatgtctaactgattatatcttaaaagcaactactaaggtgtttattagtttgtttgttttttaatcttatttagcaacagccaactcagtttataaatccagaaacacctggctatgttggatttgcaaacctccccaatcaagttcaccgaaaatcagtgaaaaaaggttttgagttcacactgatggtggtcggtaagaaattaatctatagtctccaacttactaaataaatatctcccctttccaatctctggagtatgataacgtgacctataaagaaagaggaaaatttggcagagtcaaataacttgagaatttgaacaaatatatgtgtattcattagaaaatttttctcaggagcaaaattatttttctgtcactttcttatttatatgtagtgaaagtttactcattgtgtcagctaggctccaaaatggcccccagtgattcttatctcctggtattcacaactttcttgtcccttcctgcattgaatagggttttacctgtgtagccagtaggacattgtggagatgaaagtgttgtcattttctaagactaggtcataaaaggcattatggccccccaccttgcctcttctcaaattactcactctggaggaagccagctgtcatgtcaagagaacactcaagcagccttacagggaagcccaccaagtaaggaaccaaggcctgccaatggctgtgtaagtgacccgtttcagaaatatcctccaggccaggcatggcggctcacacctgtaattttagcactttgggaggccgaggcaggcaggagtttaaaatcaggctgggcaacatggtgaaaccctgtctttacagaaaatatgaaaactagccaggcatggtggcatgtacctgtagttcctttcccctgagtccaggaggttgaggctgcagtaagctgagatcatgccactgcactcaagcctcaaaaaactgggtgaatgaaaccttgtctcaaaaaaaaaaaaaaaaaaaaaaaaaatccaggcatttacagtgtaacattcacaatgtctaatgtctaatagaaaattgtgtggcatcaaagaaacaaaaactgtacataatcaggagaaaaagcaggcaatagaaacagatccagaaatgatagaaatggatctcgatggcaaagaagaactctattacttaaaggaaagcatgaatataataagataaaggaaagatacaacagaaaaccaagtggaacttctaaagattaagatacaaccgaaataagaaattttcatgataagcctgacagcacattatacactgcaggagaaaaagcacagtagaagcacagtaagggaaaagctggaaaaaaaaaagaaattgaatgtgccctcagtgtcctttggtacattgtgaacagtctaatatatggattatattcacagagaagacaggaaagcaaaaaaaaaaaacatgaaaaaataatgcctgggaattgtscaattttcagcaaagttgtaaatgcacagatccaagaagcttgacaaataccaggcaaaataaatataaagaaaactacaccaggacgcatcataacacgctaccagaaactactgatgagacaacaagcagaagaaataatagagaaaagcacaccaaagcctgtaataagcaaatagaccatagataaacagaaaggtctttaaaagtagccagatcaggcctggtgtggtggctcatgcctgtaatcctagcactttgggaggccaacatgggtggatcacttcagcccaggagttcaagaccagttcaagagcaacatggtgaaaccctgtctgtacaaaagatataaaaattagccagccttggtgggggatgccggtagtcacagctacttgagaggctgaggcaggaggatcacctcagcctgagacgtcaggcctatggtgagctgtcatcgtgccactgcgctccagtctgggtgacagagtgagaccttgtctcaagaaaagaaaaaagtagccagaacaaagaaatttattacatacaggggattgaagataagaggagtgaccactgaattgtcattaggaataacataactggtcgggcgtgatggctcatgcctgtaatcccagcactctgggaggccaragcgggtggatcatttgaggtcaggagtttgagaccagcctggccaacatggcaaaaccccatctctactaaaaatacaaaaacctgggcgtggtggtgcatgcctgtgacccagctacttgggaggctgaggccaggagtatcacttgaaccagggaggcagaggttgcagtgagccaagattgcgccacagcactttagtctggcgacagagcaagactccgtctcaaaaaataaaattaagtagaaattggctgggtgtggtggctcatgcctgtaatcacagcatcttgggaggctgaggtgggcagatcacctgaggttgggagttcaagaccagcctgaccaacatggagaaatcctgcctttactaaaaaaaaaaatactaaattagctgggcgtgttggcacatgcctgtaatcccagctactcgggaggctgaggccggagaatcacttgaacctaggaggtggaggttgcagtgagccgagatcccatcattgcactccagccggggcaacaagagagaaactccatctcaaaacacggtggctcacgcctgtaatcccagcacttgaggaggctaggcgggtggatcacctgaggtggcaagttcgagaccagcctgaccaacatggagaaaccccatctctagtaaaaatacaaaattagccgggcatgnnnnnnnnnnnnnnnnnnnnnnnnnnnnnnnnnnnnnnnnnnnnnnnnnnnnnnnnnnnnnnnnnnnnnnnnnnnnnnnnnnnnnnnnnnnnnnnnnnnnnnnnnnnnnnnnnnnnnnnnnnnnnnnnnnnnnnnnnnnnnnnnnnnnnnnnnnnnnnnnnnnnnnnnnnnnnnnnnnnnnnnnnnnnnnnnnnnnnnnnnnnnnnnnnnnnnnnnnnnnnnnnnnnnnnnnnnnnnnnnnnnnnntaatgtaaatcttttgttgttgttgttgttttgtttgtgtgttttgtttttgagatggtttgagatggagcctcgctctgttgcccaggctggagtgcagtggcacgatcttggctcactgcaagctccacctcccgggttcacgccattctcccacctcagcctccaagtagctaagattacaggcacccgccaccacacctggctaattttgtttctgtatttttagtagagacggggtttcaccgtgttagccatgatggtctcgatctcctgacttcgtgatccgcccgcctcggcktctcaaagcgctaggattaatataaatcttacacagacatcttcatgaaatagatgagtaggaaacacctaccagcctattttattaagccagcattatcctattacaaatgacaagaaaactacagactaatatatgttagaaatgcttgtttttcggtgccataaagaaatagtacttgaacataaattcagtttcctcagcaaggccatttttactttctacagaaagggtacactcgccagcagttttgtcaagagggtacaccgaacaaagaggatcatttgtaacctgggtcatttataacctgatgcgtctaccttactgctgtgtctggtttccactggctggaacggtacctcacattctgtatttgtcctgattggctagcaacttagaacttcttaaaagaggcaaaggcagaggagaacaaaggaaggaggaatgttgagaaaggtaaaatcaccttcaaataaggaagagcaacaggctatgacctaatgcttgcttggaccagcataagcatgccagggcaaatatttaggctgaattgtgcgagctaagaacataaagtactttgatttcctcattacggccagcagatatttaagaatgttagcacaggtctttgaataaattatgcttctaagagaagttagtattattcctaattagacggggagtaaagcctttaaagaggagcctctactttttacatatacacgagctagacatggacatcttaattaaatcttaccgagtccagcaatatatctaaataaaaagtcaatgcactgagtcctgctatgatgcaacccgtgtgtttctaaaaaaatcaccatgccatacagcatgatgaataaacaccacagggcttgtgcagaaaacagggacacaatactcagaaccttcatcagcgacacaatgggaaaaaagataggaacgtaagaattataccagtccacatgtaaatggttaaaaaataatgactgcaccatagaagccctgaggttggtttgtgcaagtggacatcaggagggttgcagcttgtgtgcttttgtgtagctgtggagggagggttttctaaagttggaaagtcataacactacgtgtaaatgggtgtggctcataacaggcagtgaagaaagatagctgatagatatttaggggtgtgtgttgggaatatccccaagtggtttgattctgttggatgcagaattaaacactgtcttctgtattctcctagtttctcaccaatgagatcatatataataagcaaatacgaaatttgtattactctgctattgttccgtaatgtatcaatcccattggaacaaattctcattttcaaattaggactgactaaacaaatggagtttatcttaggaatacatgatgcaacattcaaagtcattgtcatgcagtgtagttatcaaggaggaagatgatgttagctgaaaaacgaatttgtaaaaatccaggacccactaaagataagaaattaggctgagtgcagtggctaacacctgtaatcccagcactttgggagcccgaggctggcagatcacctgaggtcaggagtttaagaccagcccccccaacatggtaaaacttcatctctttagtacttttgtaaagtactgaaattagccggccgtgatggtgggtgcctgtaatttcagctatgctggaggctgaggcgggagaatcgcttgaatctgggagggggaggtttcagtgagccgaggtcatgccactgcactccagcctgcatgacagagcgagactccgtctcaaaaaaaacaaaagaaaaaaatcacaaacaagagtattaataattttaagacagtaccacttaacagtcacaaaaaatattgttcagagataaatttaacaaaacgtgcaagacctatacactgaaaactacaaaacagtgctgagagaaattaaaatctaaagttgttaagatctgccccatttgtggattggaactattatgccctttctcccccaaattgtcccatattttttctgagacagtcttgctctgtcatccaggctagagtgcaatggtatgattttggcaacctccacctcccaggtttaagtgattctcgtttctcagcctccccaagtagctgggactacaggcatgcgccaccacgcccatctaatttttgtatttttagtagaaatggcattttgtcatattggccaggctggtgttaaactcctagcctgaagtgatccacccttctcagcctcccaaagtacaaggattactactggcatgagccacagcgtccagctccaactttcagaaataaaaattaacaagctgattcggaagtttaaatgtaaatgtagagggcctagaacagacaaaaacagtttagaaaaagagcagagttggaggattacagtccctgatttcaagacttaacagcagtaatcaagacagtgtggtaagggtagatacacagatctactaaacagagcaacagccaagaagtagacccatcaatataataagttcaattgtttttttggtttcgttttttgagaaaaaagccaagttgattcagtgggggcaagtttagtctttttacagtctgtaacaactagatgattatgtgtgaaaaaatgaacttcaactcctgcttcacactgtatatcacaacctgaaattatagtagatttaaatgtaaagctataaaaactacaagaaaatgggcaaaaaaatttttatgactttgtagtaagcagatttcttaagacatgaagaatagaaattataaaaacaattgtgcattattaaaagtttgccttcttgaaaagacatcaataggaaaataaaacgtgaggaactcagaaagtattcatagtaccatatctgacaaaggatatgtgtccagaatatataaaaatattgcacagatcagtaagacgaatgacccacttacaaagagggggcaaaagatctgaatagacatttcactaaggaagataaacaaatagccaataaacccacataaaggtgtccacatctttggtggtcaggggaatacgcattgaaaccatgagatgccactacccagccactaagaggcaggcactccaggtgtcagcaaggatgtgaaacaactggaactcttactagtgagcatgtaaaaatgccacaaccagtatggaagccagtttggtacttccttaacagttaagacccagcaatactgcttgtatgtgtttacccacaagaaatgaaaacatgtccataaagatttgtatatgaatattcatagctacttttctcaaaatagccccaaactggggacagcagaggtatctagagagtggattaacaaattgtggtgtagccatacaatggaatattgccaagcactacaaagaaacgaactactcgtagatgcaacaacatgcatcagtctcagagctttgttgagcaaaagcagccagacacaaaacaggccatgttgtatgatgccatttaaaagttttagaataagcaaagctgatacatagtgacaaagtagattggtgtttgcctgcggtggggactggagagggtagacttcacagttacacaaagcaactctagggttatgaaaataatctttatcttgagtggagtttgattatctgagtatctacttttgtcaaaactgtacagtttaaatgggtgtattttagtatttgtaaatcgtgcctcaaagtggctttaaaataaaacaggtagggggttgagggtgagtagtgaaaagtaaaactagaaagccacaagaatcctcaacttttaaattgtagtattaatagctcaagaaaaatgggtgtatcaggaaaaccctaacacacctaattagtaaatgagagactattgaagaggaaaggcagtttttaaaattttgtcagacttctaaagaaacaggtaaaggggcattgcaccaccgtttattaaaaggatgacttaatgggataacaggcatttagtcaaatttttacactcatatttaggcatgttcaacacattgttttgttcttttcatgtgtgaaaattgcagttcacttaaaatgcagtcctaattttgtatgtctgcatgtttctttttgttttgttttgttttttgagatggagtctcgctcagtcgcccacgctggagtgcagtggtgcgatctcggctcactgcaagctccgcctcccgggttcacgccattctcctgcctcccgagtagctgggactacaggcgcccgccaccacgcccggctaattttttgtatttttagtagagacggggtttcaccatgttagccaggatggtcttgaactcctgacctcatgatccgcctgcctcggcctcccaaagtgctgggattacaggcgtgggccaccgcgcccggctgtgcgtctgcacattgcaaattcacttatttgttcttgattttcccagaattgttttattctgtaagggacagggtctcactctgtcacctaggctgaagtgcagtggcatgatcatagcctgctgtaatctctaactcctgggctcaagcaatccttctgccctagcctcccaagtagctgggactctaggtacaagccacaacacctggctaaggttttggggttttttttactttgttttggttttttgggagatgggggtctcactattttgcccaggcggggtcttgaattcttagcctcaagtgatcctccagccttggtctgctaaagtgctgggattataggtgtgagccactatgcccagccagaaataatttttcaaaagagatgtgtactccttcctcatgctttgcagaacttaacagagggtggtttagggtacccagaggacagtccagcaccagtagtaccaagatcagaagcagttctccatgcagaattgagacctagatgatcatctgcaatgaagcagtgggatttgtgcttcccttcaaatgtaaaatttaatttttggtattttnnnnnnnnnnnnnnnnnnnnnnnnnnnnctgaaattagtcgtgtgaactcaacaaagtgagcgggaaagttgcccgacatatgacagttgccagtgctgggaaacggggatggatttaaagcaggaagaagacaaggtggcagaagggggaggttgcagagtgagggtgtgcatgtgagcccaccagaccacaggccctgtcctgctcacacgtttctgcagctcgggaagcacaagggttgttgacactatgggatagatatgttcagttttctgaaaatgtggtgagtttagtgactagcagaactgataattgaaaacctgctttgcattctatttgtcaaaaataaaaaccaacctctaaagtacattcctcacatttgtgaacagttatgtttctaattatatgatgttcaagttctgtagtctcatagacctggattcaaatcttggccctgctctggatagtactctgaccttgggcaaattagagtttctttgagtaccctcaaagatcatactgcaaacatagtagtactgtaggtactaaacacagaatgatgtttgtgaggtacttagcccagtaccaggccttatgtaaacacttaaccgattsaatggtgtcatatgaataaggtcatgacaaggtttttctttttatttaaaggtgaatcaggtctaggaaaatcgactctcataaacagcctattcctaactgatctgtacccagaaagagtcatacctggagcagcaggtaaaaacattcttatgttactgtaagtgtaattctacatgaaagatgctgaagactgcctaattaatattttatgtcttagctgtgtgttttgtttgttcttgttcagctttgaacacaaggaaaacacttttatggggtaggtgtgctgcaccgaggtccttggatttgggttgtagactttctttgacacgtatccatggatccatcctctcttgagtttgtctgtaaaatgtaataagtagtttctgcctatattaaatatttgatggaaggattaagtgagaatgttttacatcaaaaatgctgtgtaactagaagattactaggatagatgttcgaattcatctactgtcagaaagttccagcacaggacaccagcatccacaaatgactgttgaatgaaataggcacacatagtgagagcctaagacttgggctgctgcaagaatatgtagccctttcagaatatttttgaattcagtttttaaatgaattcgtaaattgctttctttttcccaggaacagaaattataatttttaacatttgtgtttttaaccttccccagtagcacaataatcttagctttaaccttcccctttctgacttctctgggatctttttttcttaatccccatggtatctttggagaacctacctctgtagagaggcagtagactctgaagtcacctgtcgtaagaacgtgagctttcctcttcacatgctgcttatattccctattaagtttgtttcttttctagaaaaaattgaaagaactgtccagattgaggcttcaactgttgaaattgaagagcgaggggtcaagctacgcctgacagtggtagatacccctggctatggtgacgctatcaactgcagagattggtatgctcccccatgcccagggatctgcatttgtttasttaatatacttcataaatttatagatartgttaatgagtgattattaagtttgggattgctgtatataataaaacacctagacaatttaaagcgtgttaaatgttgactttttaaataaggaattttatagagagtaatttttttctggtactctactgtaatttgagatcgcaaagccagtcatccatagactgctagtataaatgaaacacctggatttgagccgtggttggtgaccgagatactgtagtacatcctttctatgtggaaggaagtgaaacctgttagagagtgggttgagtcgtagtgtctgtaaatgactgctcattggcatcattttcacaaataaggaaatgaagaagtagaagatagagcagtctgtcacctgtaccgtgcaaagaatgccacttttgttgtacaaactccctcctggttctattcctgtcaacataaagcatcaggtttccaccactagatgaaaaggggaaggttctgttatctttctcctacatttaggaatttctcccttcttacatgtgaaagtgctgtactgtttcccagctcagttaaatgctgtttcccagctcagataaacctgttcttgacccatgttctctaccaccctgttcctctgccccttttcacagtcacgttcctgaaaagaattggcagccctggctgggtgcgatggctcatgcctgtaatcccagcactttgggaggctgaggtgggctgatcacaaggtcaggagttcgagaccagcctggccaacatggtgaaaccctgtctctactaaaaatacaaaaattagccgggcgtggtggcgtgtgcctataatcccagctacttgggaggctgaggcaggagaatcgcttgaaccctggaagcagaggttgcagtgagccgagatcacgccactgcactccagcctgggcaacagtgcaagactcagtctcaaaaaaaaaaagaacgaattggcagccctgtctacactggccctctctcaggtgcatcataacctattccattcaggcttttgactctcagcacttaggggcagttatgcttggcatagtttccaaaaacttccatttgccaaatctaaaagtcagtcttctgttctcatcttgaaaatgaattattaaattatgtatatttgggcggaggcacttgttttccctttgaagtcagggaccccctgttttataccctatgattattgttaatgtttctgtttctctcagttttaagacaattatctcctatattgatgagcaatttgagaggtacctgcatgacgagagcggcttgaacaggcggcacatcattgataatagggtgcattgttgcttttactttatttcaccttttggacatgggtaagtaattgtttatcgtggagaaatgctttactacatgggtttgtaagttttacccaaactgtgtattttaatataagaattaagataatttgagrgagaagagttttgtatgtattttttttaaataagtgacaattctaaaattaattttagacttaagcccttagatgtggcrtttatgaaggcaatacacaacaaggtgaatattgtgcctgtcattgcaaaagctgacactctcaccctgaaggaacgggagcggctgaagaaaagggtgagtgaggctggcgtcctgccctccctctgggtgcgactcgggggcatggggatgaagaaaggagtgtgttcccacgctcagtctgctcaggtgtcgggaggcagggcgggagaatttttcctgcattttagtggtggttttcaaggagaacctgatggttacaaattttaatttttgccttcatgaaggtatcaaatttctattctttaaattctccttatatttaaaatgccctcgatgagtagcagttggttacacacaagtaccttccatgggagttaaatgactcaaatatagaaatgtgatctctccatgaagtttgttattttacctaaattctttactgcaaatgacccatacaaggatgtatctaagtagactggttctctgttctgtttggaaacatagcagttgtcagccagcgaagcgcctctcacccgccagcagctcctgtggtgtcccagttttagtgcctcttccgtgtatgtctgtaaagcctctttattgattctctgctatatatttttaaattgcttactttgttctgattatatgctccttaagaaagtccaaatagtttatatatgctaaactctaaaaatacaaatccctaactgaacataccggtacgtgcataaaaatacaaatccctaaatgaacataccgatctgtgcgtgtaatcacagttgctggggcagggtagggggatacagcagggggttcaggcaggaggatcacttgagcccagaagttggaggccaacctcagcaacatagcaatacgctgtctctaaaaaaawatatatatatattttatatatataatatataattaataaatatatataatatatattacatatatattatatctatattatttatattacatatgtaatatatattatatttatattatttatatattatatatattatattatttatatgtaatatatttatattggttatatatattatatttatattatttatatataatacatattatatttatattatttatatataatatatattatatttatattatttatatataatatatataataaatatataatatatataataatatataattaataaatatatataatatatattacatatatattatatctatattatttatattacatatgtaatatatattatatttatattatttatataatatattatatatattatattatttatatgtaatatatttatattgtttatatatattatatttatattatttatatataatacatattatatttatattatttatatataatatatataataaatatataatatatataaaaatatatatatttaatatatctataatatatattatatatattatatataatatatataattgtacatatatttattatatatattatatatataatatatattataaatataatatataaatatatttataaatatatataaatattatatttatacattatatttatatacatattatatatacatttttatatattatatatatataaatataatatacatatattttttaaaataaaagagtttctaggccgagtgtggtggctcacrcctgtaatcccwgcactttggaaggctgaggcaggcacatcaccagaggtcaggaggtcgagaccagcctggccaacatggcaaaactccgtctctaaaaaattacaaaagttagccgggcgtggtggcgggcatctgtagtcccagccactcaggaggctgaagcaaaagaatcgcttcaacccaggaggcagaggttgtttgcagtccagcctgggtgacagagcaagactccgtctcaagaaaaaaaaaaaagaatttctgtaattacccacagaaagaacaactgttaagtatatatccttctagaacatagcttatgtttttggttttgcagaatgaaatcacatagtaatactattctgccatttgatttttctatttaaaaatatttggaagcatcctcatatatatactgtatcctaattcttcctggatgcacagcattccaccatatgaatatactctaacttgtccagtttcctgctgatgaatatttggcttactttttgttttactctggccccttttcttctttgaccaaatttactgtttctttgccccttgctcgctgcttttgctagtgataccctctgcctggaacagtcttccctcagatacctgtgtggggaactccctcactgagcccaacgctgcacacaagatttcacatctccatcccctgctctgctggtagcactccccccacactgcataaagtatttctctagcgtgttttttggcttctcctgacccctgaccccaggtcctgagatcaggaatctgctttgttcacttatgtattcccagagttccgaataatgtctggcacataatagatttgttgcataattgttgtaatgaacactggtgtacatctatcttttcacaattgtgtgagccaaacgaattcttaggaaataagtatacatttaaatttttgaaggatgactaaatttgctctaaagtaagtttgtaacaatttacatttccaaagtgtactcttctctccaccccctaaaactgtcctggttatgttgccagtttttgtaatgtgtttcctgtctgagaaattgtatctcatttgaatttgcctttccttgattgccgatgtgagtatctgtgctggtgttgatgccggttggtgtattctctcaggttgcagggacttggctcttgcttttttattgacttaacacatatacttatttttagatgttgactatcacgttgcagatgatttcacctggtttgactttcattttttcacatttttcttggtgcttttttccaaagcaatttttaagcagcatgtagtcatgtttggcagccttttcctaaattgtctcaagtgcctgccagttttttagaaagtatttgaacctttgaagaacccctggaagcgtagacgtttttatgctaataaatactttagyaattcctacttaagggaacttcaccttttgtactctgctatattaaatttctttgaggtagaaatgggggtggtgtcagggttagaatgctgtaattctaatctctaatcctgtatgcgaaacatttagtgctggattacaacatctgagatgaatcgaaatacttcgagcttttatcccttccttcttgggcctcattaatcacttctcttcctccagtttctccttgatgcctaccagtttgttcattctgccctatctacaagaacctcttgcctcctgccagcctctactagcttcttgccttcaccagcctttcttctagtcagacacttactggtagctgttatctgccctccccatgatcctgttcactcaggcttcctgtcatccacctgcaattgctctctcatgggcttggccaacagttcagttctcagatgtgggccccacctgtggggtttgtgtgattggcaattctacttctgaaacttcccttccttggctgctgaaccactgtgtttgcttttctatctgctgttttttaccaccttccttcctgatccctgaaggtcagtattccttagtattattttgatcacattatttctgtggcttctgatttgcccttccaggtatcttatttcttgttgtgaaccacatttacccacaggagtcctcttttgaccactgatggactcctgtccttccagctcccctgtctctttaaatggtcccacaattcttgaaatcatccagactgagaaatgtgtaaattattttttactcatcacttctgactcctctgctcacttttaaatagcttactaactgtttccgarctcttctctyctccaaagtgtaagctccatctttatgaggccagcataggacaaaagatgaggttagcatggatggatagtagaccaggaaaggggccgtaagatgaggacaggtgagcaagttcatgcttcttattgctcagtttctcccagagataagatggttcctcccatttaggaataaggatttatgaaaagactgaaggtcgagttacagagtaaaggatgtagagaggagggccttttctggagttctgaattagtgcagacattgtactaagaccaaatctctgaccattcaaggccctttttaggtcacattaaggctttccattcttaaaaaccagaaagcaaatccagtgcacagtttgaggtcgggatattttctgctcacgttgctcttgttctctcttccctgaatggctcaggtactgaggtgagaccaaacaaaactgtggcctgcctggtgcctgtgagaatgcccaccatgcaatgagcatttgagtgctagggttttaattgattgactgatgaatgcattcgtatttcaacttcagcccagttctttctcccctcaagccccatcccccacactactgcctgcttgataggtccgattgtgggatttcactgctgactgctggctgcctgttgaatgaaatacagatccccaggtcgctagcctggtgttgatggaactctccactttgtaattccaatttttgtttccttatccaactggatgtcttagattccaaccttttgaatttcttattctcaaaatgcaccccatgtgtcctctnnnnnnnnnnnnnnnnnnnnnnnnnnnnnnnnnnnnnnnnnnnnnnnnnnnnnnnnnnnnnnnnnnnnnnnnnnnnnnnnnnnnnnnnnnnnnnnnnnnnnnnnnnnnnnnnnnnnnnnnnnnnnnnnnnnnnnnnnnnnnnnnnnnnnnnnnnnnnnnnnnnnnnnnnnnnnnnnnnnnnnnnnnnnnnnnnnnnnnnnnnnnnnnnnnnnnnnnnnnnnnnnnnnnnnnnnnnnnnnnnnnnnnnnnnnnnnnnnnnnnnnnnnnnnnnnnnnnnnnnnnnnnnnnnnnnnnnnnnnnnnnnnnnnnnnnnnnnnnnnnnnnnnnnnnnnnnnnnnnnnnnnnnnnnnnnnnnnnnnnnnnnnnnnnnnnnnnnnnnnnnnnnnnnnnnnnnnnnnnnnnnnnnnnnnnnnnnnnnnnnnnnnnnnnnnnnnnnnnnnnnnnnnnnnnnnnnnnnnnnnnnnnnnnnnnnnnnnnnnnnnnnnnnnnnnnnnnnnnnnnnnnnnnnnnnnnnnnnnnnnnnnnnnnnnnnnnnnnnnnnnnnnnnnnnnnnnnnnnnnnnnnataacatcaaaatctatcacttacctgatgcagaatcagatgaagatgaagattttaaagagcagactagacttctcaaggtaagaactggcttcagatccacaacataaataactcctgtttactgttgtccatgttgaggtgagagagattgcctgggtatgttcagttacgagagtatttttgctttcaatatattttaagacctcatgcagtggctcatgcctataatcccagcactttgagaggccaaggcagatggatcagttgaggccaggagttccagaccatcctggccaacatggtgaaatctcatctccatcaaaaatacaaaaattaggtggatgtggtggtgcacacctgtagtcccagccactcgggaggctaaggcaggagaatcacttgaacccaggaggcagaggttgcagtgagccgagatcgcgcctctgcactctagcctggcgacagagcaagactctgtctcaaaaaaaaaaaaaatttgatacagctatcacctaaagcttagaawttttattgtaggtttaatttgttttcgtacaatttgtcccatgtagaaagtatctgacacttttcaagaaaatgttacatacccccagctttccaattcagttttgtagtcaatagcaatgtgttaagtctgtgctgatgttctcgtgttgccagtgaactctggggttccctgtgtggagcctgtctactctgtgtgtctctttctaggctagcatcccattctctgtggttggatccaatcagttgattgaagccaaaggaaagaaggtcagaggccgcctctacccctggggtgttgtggaagtggagaacccagagcacaatgactttctgaagctgagaaccatgctcatgtaagacatttggtgtgttccttctggcagaatttggcgtgaagaatatggatttcagacggggtgtacacttggcccccaagatagttgcagccagcagcttcattgccgccctcagtgtttctcacatcgcagaagtggtgtggggctgttgcagattggtgctgagaaccctcacccaggggccctctgtggcactactaaactagcgcttctgcctgtggcctgtagcctgcagtacctttccttcttgctaagatcttacatctttgatgttaaaaggagaaaaggagactagaacctaaactggggtctgagaggtccccagtgctggtaaggaaacagtcaggctgtataggcccctggtccactgctccaggctgagccacccctggtgccctgctcaccagtctgagactcattgtatggccctggttagctttttgtgtcttccatttattattaatagcaattacagacctgactacaaaaatagtcttctttaaaaatgaatttcatggctgggcgtggtggctcacacctgtaatcccagcactttgggaggctgaggcaggcagatcacgaggtcaggagttcaagaccagcctgaccaacatggtgaaaccccatctgtacttaaagtgcaaaaaataaattagccaagcgtggtggtgcgcacctgtaatcccagctactcaggagcctgaggcaggagaatcactgttgaaccaggaggcagaggttgcagtgagccaagattgcaccactgcactccagcctgggcgacagagcgagactctgtctcaaaaaaataataaattaaataaataaatttcacatattgtaacatgcayacattgcttttactcttgaaaaaagaggctgaggccgggtgcggtggctcatgcctgtactcctggcattttgggaggcccaggcgggcggatcacttgaggtcaggagtttgaaaccagcctggctgacatggtgaaaccagcctggccgacatggtgaaaccagcctggccaacatggtgaaaccctgtctctactaaaaatacaaaaaaattagccgagtgtggtggtgggtgccggtattctcagctacttgggaggctgaggcaggagaatcgcctgaacctggaggtggaggttgcagtgagccgggattgcgccactgcactccagcctgggcaacaagagcaagacttcatctcaaaaaaaaaaaccaaaaagaacaggctgagagtattgcttaaactatacctctttaatcagaggacttcaaagaatgactgatgtggataaatcagtgttttgattagctgaaagtcgctacatatttgccgcatgtctcacttagtttagcaatttgtagtgagttaaaataagtaagcatgttaccatccaagctgtgtcaaacacaatttaatggttgtgtaagaagttaagcgcactcagcccctccagggctgcatccttgtggctatcctgatccccattattgaggggrgtgtagaggctgaagacagggtttggggactttactttagtgtcagttgtgtgtttctcacaatgaggtagagtgagccactccttggctatctcaatccatttccctggatcctgaatcaataggaacgtgttacaatgtttgctcattcttgcctgcttttaagtattttgaataagctaggcaattaaaaaaaawtttttaagagtgcttcataagatgaatggaaggttaagttgctgactaatattcttggatccagaatattagtccttcactttatggtcttgtacatagcttaagctaaccaactcttttttctcatatgagagtaatatataaattttgagttataggaggcatgaatattttcattacattttccgtaagtccttttagaagagtgtcttctatttcagacattgttgacctgaaaatctcttaaaatctgtctgccatcctgtggtagtgatggcctcacacaggggtggcagtgcctctagcagaaatccccctgagagactcagtcgagacctgtgtttgtatatcatttattggggaagaaagggagagctacacctcactagacatttccacggccatactcattatcctgaaatcccagcagctttatgtacaatttaccaagtaattttaattactgctatttcttctaygtacttgatgggtggttttttttctcatgagaatgtcatgtgcrtgatgccaccttggtgcattcctcttctctttcagcacccacatgcaggatctccaggaggtgacccaggaccttcattatgaaaacttccgttctgagagactcaagagaggcggcaggtcatcacactgtgcccctttctctgtattgtgtcaccctgagccacaatgttcctcctcctctatgtgttcagctcagccttcttgaccattaagcaacatggtttggtttcctactcaaaagttattataaaagagttgttaatttaatcaaattatgctcttttagcctttttaagaaaaagtacatttaatgatatgcacgtaaaaactttaggccaggcacggtggctcatgcctgtaatcccagcaccttgggagaccaaggcaaggtagattgcctgagcgcaggagttttgagaccatgagattacatggtgaagtcccatctctacaaaaatttaaaaaaaaaaaaattaatttagccgggcatggtggcacacacctataatcccagctactcgggaggctgagttgggaggagcagttgagcctgggaggtgcagtgagccataattgcaccactgcactttatcctgggcaataaaacaagaccctgtctcaaaaaacaaacaaaaactttagatggaaaggccagaggcttgtgtcgagttctccttcaaaagcatcactctgtacgtgaggacaaacttgttgccattaggaaactgcagcacctgagttaagggtgaggccaggatgagtggcatccaagcagccagtggccgttgaagcagcagcttcgatcctcgcaaagtcctgcagccatcctcactcaccttttctttttaaccattctaatatgtttttatataagttttctgggaggccaaggcaagtggatcacttgaacccagtagtttgagaccggccctggcaacatagggagacctcgcctctataaaaattttttttaaattagccagatgtggtggtgcatgcctgtggtcccagctactagggggaggattccttgagcccagtaggtccaggctgcagtgagctatggtcgcaccaccacgctccagactgggcaacagagtgagaccctgtctcaacaacaaaagtttcctgtgttgtaattcattaaaattctcacattctaataatttgatggatttctagatacatatgttgtacacrttgaagtctaattatgagtttggaaatgagacattaagaaagattttagaggcagcaagaaaattccaccctctggaagctgagtaggcgctggccctgagatggagattagtgtgctttgcagagcacagttctcaggtgtgcttggggagcttaccctttgcccctcgttcactcacgcagatcctgctccttaaatgtggtgactacattcgcattaataaagaataacatctcaaagcaaattcttcagataatacctatttttgagtgggtaacagcaagtgttgtcgctcaagcttagagtaagaaaagtctcttgaatgttccatttcatgttgttcgaactttttaaaatcattctgttccctttttattcattatatctttaattagaaaaatgataggctgggcgtggtggctcatgcctgtattcccagcactttgggaggccaaggtgggcggatcacttgaggttcaacaccagcctggccaacgtggcaaaaccccatctctactaaacacaaaaaaaattagctgggcgtggtagcacgtgcctgtaatgccagttacccaggaggctaaggtgggagaattgcttgaacctaggaggtggaggttgcagtgagccaagatcatgccactacactccagcccgtgcgacagagtgagacaccatctcaatataaaaagagaaatgataaatacatgtcattttaaattttaaagtagaatttttkgggggggtagcaaataactatttgttgcagtgttatgattctgatttctttcgattcttaggaaagtggagaatgaggacatgaataaagaccagatcttgctggaaaaagaagctgaggtaagtaggaaagtactattggttggttggttggttggttgttttgtttgttttgagacagagttttgcaccattgcccaggctggagtgcagtggcgtgatctcggctcactgcaacctctgcctcccgggttcaagtgattctcctgcctcagcctcccgagtagctgggactacaggtgcccgccaccatgcctggctagttgtttttgtatttttagtagagacggggtttcatcatgttggccaggctggtctcgaactcctaacctcaggtgatctgcccaccttggcctcccaaagtgctgggattacaggtgtgagccaccgtgcccagccaaaaagtactattcttgtgactgaaggtgttttgtttacatccgtagatatcattggtaattaacttaaagtttatagttttttttttaatttgttgaggaggatacatataactactttattactatatatacacatctatatataataataaacatggatatttacatagcatacatgatgcttcatatatttagctgaaagactttggagacaatttagtaatgtcactgatatttgtaagtagatcataaatatggaaatatgctctgttgtaaaggtggcattcagatctgctggagttttggaaggcaaacacattattcagtaaacaataggatcataatgggctagccttttggaaacaaaaagaaaatacttctttggtcaaattaattcaatattgatcaaatatttaaatgttaaaaataaccacaaagtcacctgaagaaaatttaaatgttttataatactttcctggaggcatttctgaacacatacaaatcataatgataaggataaagatgaattaacatttactatttttggccaggcactgtgggttacacttatagtcccagcactttaggaggccaaggtgggagaatcacttcatgccaggagtttaagaccagctagggcaacagagtgagacccccctcgttctctagaaaaaaattaaaaaataattagccatgcatgtcggcatgcacctgtagtcccagctactcgggaggctgaggcagaaggatcccctgagcccaggagttcaaggatgcagtgagctatgattgtgccactgcagtctagcctaggtgaaagagcaagatcccatccctttaaaaaaaaaaaaatatatatatatgtatatgtatgtatatatattatttttattgtgaggccttcattgccctccagaaaagctgattcattcccattcccctttactttgcatttctcactgtcatcagtctctttccctccttttaggttagaaaacttctcatattggccgggcgcggtggctcacgcttgtaatcccagcactttgggaggcggaggcgggtggatcacgaggtcaggagtttgagaccagcctgaccaaygtggtgaaaccccgtctctactgaaaatacaaaaatcagctgggcgtggtggtgtgtgcctgtaatcccagctactcaggaggctgaggcaggagaatcgcttgaacccgggaggcggaggtagcagtgagccgagattgcgccactgcactccagcctaggagacagagtgagactctgtcttaagaaaatttatcatattgtcttatctttctttggttattgtttctgtttggcttgcatattcgtatcatttacttgattttctctttagctgttgctttttttattgattggtaaaaagtctttatgtaataactcctgtcatattttgggaaggtgtagaagttgaaattttaggaatcacrgaacacccagaaataatgttcaaagacagcaaaccttgaaaacctataatgtgtgtgtgtgttcacagctccgccgcatgcaagagatgattgcaaggatgcaggcgcagatgcagatgcagatgcagggcggggatggcgatggcggggctctcgggcaccacgtgtaaggtgatgtgcacatatcaagaagtcagaggtaggccctgttgtcccttagcctggaagacaggcagttactaacattgtgtcagcttaaatatgacaggttcctccttaagcctcattaatattttgcattttgaagtaactccatcactaatcttaaacaaggagagattgctcctgaaaaacagaagccactactttgccacctactttctagtaaagatttttcatatttttgtctcttcttttttttttaaataatttcaacttttattttattggggtacatttgcaggttattttctaagcttgcaaataccaacattagaaggaaattatgtattaaagcacttttattagttgtattattggaaatttgttaattgttaaaacatctctttaaagggaataaaaacgtgttattaaaacagcttgtacagattaaaagtagagatggcacaaggaagaagaattatgtgaggtagataagggttccctggatggtgactgctgacctcctgttcctcagatagctttgtcccgactgatggtcattagtgaatagatctgtctggcatggtgtatgctggtctgcctgcttgaaaagaatctgcagactccagagactcaggaccaggaaaaggcagatgcccactcccctgtatcttatgtatcttatggacaggcaggctctctgaactgtccaggtggccactcccatcacttgccagaggaaaagcatgaaaggtaaagttaagtaatgacctaagagtccaaagaagagggtaggtcacatggagctggggtaaaggcaaacaaacctcatacaagagatctgattagagcttgaaagagagtttgagttggccaagatctgaggatgaaacgctgggaatttggtagaaggtctctactacaattcagggacctcattctggaagcatgagtgtgttcatgaaaacagggaggggacttgagccttcaacgacatacggcagggtgggttaggcagaaggcagggagtcttgaggcctccacagcatgtggacaggtggctgaggaaggacccagagtgacttgctggagccttagtcaccaaacgctcttgcagcttagtgggaaaggtgttcattgtaaaatacggtatttacacaaaatgcacaaaaatacgtatgtacagtttaataagttactgtaaggaaaacatccatgtcacccccaactgagtccaagttggttgctttagtttcatcatcacagtgacaccttagaatagtcctgagggtatgtgcttagttcacactttactgatgaggaaattgttgccgctccgagagtttaaaagtatttgctgatggtgccatgacttttaaacgatggcctgctgactctagaggctggtcctgcataaccagttaatggcatgtgactggggaagtgagggtacagtggaaagagacaaggatgcctcagcgatgcagctcatttgaagcaggaagcagtgacaggtgtttgcttattttctctgagcttcattttcaacctttatggaatgaaaattttacttttagatcgataamattttatttctgtatactttctagttttgcagcatttccagtttccaggagcctcatgaatggctttttggtttagttaactttgtggtcatgtaagccctgccttttgctcagtttatgacctttgttaaggagaaaagtagaactgttaataattaacgcagcagacattgcctcactcccacttaagtgtgttttgttttcttttttctagaaaacactttcctggataaaaaagaaaacattccagatgcatgatccagctgtgtgttttcaatccttgggagggtgccatccacattttaacagtacctgtgcctgagaatttaatttttaaaagactttgatgtgtttttgtatgaagtacttttaacgtatgtatttcattgctgtgtcacactctgtgttttgtgaggtgaatgtcttccttttctttctccctaaccactaatgttagaattgatttccaagaatcggcatgtatacttaatactgaatttctttgatttaactgacttaacaactgactaaccattgatgagcactcctgatttttatctagaacattcagatttrccataatgttccttagtggtagaggtgtgtgcctagtgatgtagaaagatacactgacttggtgcaaggccatctgcttaccacatcacaccacttggagatctttgcttccttgcttttatgtttgtacacaacacctaaaaccagttttgctgctataattctatactgttgattcgtctgcgattttatctgttaaccaaataaaacataatagaatttcctaatgagatatatctttatacttaaacagcttttttagaggtgagttttaaagaagtctcttaattctgatgctaggttgtttttaaaaccactatgcaaagaactcaccacaagccaccttttgtagtgttctccactaatactggttatcctgtgctacagagaaaatcaaagcagtcataagctccagttttcgtattgcaaataagactcttacctacaaaatgagattcagtgaactaatttggtttttactcaaccaaattaaaaatttttttaaggaaaattagcagttggtctattcagaatcaaacctttttatattttatactgcacttyagtgtattttctgtcactgtaggtatagaagatctgcctcccctgtggaaattggggtctgttggtgggcktgcccctgaagcctggcttgggttgaaaagtgttcccgccctaaggccttggtgccctgaacctctgatgcctaccgggttctcctgatttgagtttcctttaaatactccctttttgagtaattttctgatgggaggaaagtagcagtcatcatctttttgtgtgcaggctgtctcatttatttttagccattgtcgtttcattcattttgtgtaatataaaccgtgtgtcatgtcaaagtgaaagacatttcaaatctgtagcataggctagtgggcaggtccgcacagtcgaagccacacctggtctgttttctgtgcactgtagccttagtgtcacctttcttcttgtgtctccttatggtacactccagcggttgccttttttatcatttctactgaagttgggaaattcaaccccagaaattgacagatgaaaggagacaatggttgtgtagggagatggagaaaatgcttratctgaggatgagacagggttttttcatttttgtgggggctagaaaaaacataaaatgaggcagttaaataataatagttaatgaaggtgtgctacagaaaataatctggtgttcttgctaactttgcccttcactgttgcttaattgtgaacagccaaaagctrtatkttatggcttattgtgtgaaggtaactaagaagtggtgttccatgacttcagagtacatccatgcggagtccattatwtgagtttgacatttaataactttgctggaaaatctgtaaaaaagaaaaacaagtttgctagtgactaagccccgcatatgtgagtgaaagtacttcaggcacgctgmctcctggtaacagctatgcagggagggaggacccacacygctacacttctgatcccmtttggttttactacccaaatctaaatagatasttttgataatagataactgctcttttactaagacatagtctctacctatagaaatgtattttgaaaacacktattttacacagcaattttgtatccatttaaactaaccttttatcaataaagcactattgtttagatattaaatgagtatttctcttggttatttgcaagggaaagttgtgaggttttctgggaaaattcaaagtcttgacaacatctttgtataaaatcaagaaaaattacttgaatcaatagtgtcagtactggacaagtttgtacgtattggagatccagcccaaaagaaagcacaaaagattggaaaggaattatttacaggtgatcagaacatctacttagaaagtacaagacatctggtgaaaattaacactaagaagtcagtgatatctattttctaattagaaaatgtagtgagaaaagaaatcgcattgataatagcaactactaaattactggaaatataagtgaatgattgaaatatatctaggaagaaatttctaacctataaattttcaagaataggctaaggcggctctgccacttgagtaaaggaaactggaaacctgaattgatctgggtggctggacacctacactccaaggcctctagccttcttcctgcccactggactgatcatcccaggaccaccttgggccccttttaccttgctatcagtgttttctgagcttccttatagacagacccctggatactgaaacttgctctctctagttcctcagctgacagctgccacgcctgctgccttccctccagactgccagcctcaggtcaccagcacacaccctgcatcctaccaggggtcagtaccaccctctggccaggctctcacctgcactatccccacccggccctgcccgtctgcaggcagggatcctctgttctggggtgtgtgcaccactctgggcctggtggtgtcattgggggttggttaaaggaaaagccccagaggtgggtggcacatgaggggagcatcccgcacagctgagcccagtcttggtgtgcctgggtctcagaccccatagttgtctcaggagaaatggaggttcccctgagccagcmtttctcctgtctgggcttctgggaaacgaagggtcaggtttcactctggaatccacagcaccataggaggagtctcttaagtgcccgggtgtttcctgaagttaattattccctcaacagccacatggtgacagtgggtgacagggccgggctaggagagcacgatgggtagggtcttgaagaacacataggagttcaatgaacttctcaagagaagggaagtgtgccacagcaagtcagtcttccattctcgggtgggggtccctaggccagaggaaggccgtcctggccgccaccacggagcagcctgtctcagccttagcacagcctcgcgcgatccttcgatgatccccttcggtccctgtagtcccacgagggatgcaatgcgttggaggaaggaggaggctggcagccagggactgagccaaagggtgcaaggacagccggcaaggcccgggccaagacctatccccgcccagcgagccaggcctcgcccagcacctatccgcgcccagcaagcctaggcctcgcccagcacctatccgcgcccagcaagcctaggcctcgcccagcacctatccgcgcccagcgagcctagacctcgcccaagacctagccccgcccagcgagccgactccccgcccaggacctagccccgcccagcgagccgactccccgcccaggacctagccccgcccagcgagccgactccccgcccaggacctagccccgcccagcgagccgactccccgcccaggacctagccccgcccagcgagccgactccccgcccaggacctagccccgcccagcgagccgactccccgcccaggacctagccccgcccagcgagccgactccccgcccaggacctagccccgcccagcgagccgactccccgcccaggacctagccccgcccagcgagccgactccccgcccaggacctagccccacccaacgagccgactccccgcccaagatctagccccgcccagcgagccttggcttcgcctaggacattgcctcgctcagcaagccgacgccccgcccaacgagccgagcgctgcacagatttatatcctacgcagctgcctgcctgctcccgccccttctccgtccgttcaccaatcagaactcgatcttgcgctttcaggccgcgggacgggaaggctccgccctggcgccccgcaggccaatcgactgcgcgtccgcgkcgcgggggcggggtcagggcggggcgcgctgcgcgggggctgccggcgggcagttgggagcaggcgacgccgacgcgagtctggcggctgctgcttgcgactgcggaggccgggcgaggccggtgaggacgcggcgggcgagcgagaggccgagggtgaggacgtgaagcggcctgggcgcgtggggcaggggtgggcctctccgggtgggcggcgaagcccgaggcccgaggcgagaggcccaggcggggggggcgctgaggccgcggtccaccagagatggtcccgcccggcctctgaaggccatcgtgaggcggctggagctcctaggcgggtccgggttagaggagcgtccgtctgtagggagcctgccgcgtgggggcaggcggggcggtgggccggggagtggcccgcgtggactcccgggttgaggggtgccgcgtggaggaggccggtggggctgtagaccggggagtgtcccgcgtggactcgcgggttgagttgtgccccgtggaggccggcagggccgtgggccggggagtgtcccatcccggaaggacaccccagagtgggccatagggacccgcagggtatgggcctggaggtgcctggtggaggcattttgagccgtttgcctttttagcatttctttaaattgtatcttaaaggtgggaatcaagtgttaggtgttaatatttttactccactaagggctagaaatactcataagccagtgggtagcctttgggaaacccatgaaaactggggaccagaatatggcccagtacattacacacccgaattacgggcaccttttccgtttacgctatggcagcaacccctggcctatcatgtgccattaatggatgtgaaaagcagaaattagaacaaggcatcattgaaggaaagattgtcaatacatagtgttaaaaagggatgggcaaatttaaaacccaaggccaaatctttaaagggtggtttttctctctgggtttttgtttttgttttgtttccgtgggatatttttgtctgggccactgtgtaaatgtttgataaccctgaggtggcagtgggttagcrtgttggtcttgtgtagactgccttataacaggcgacacagattttctcagtaccagagagatgggagaggacatttgaggtagggaagcatggagtaacctttacttgtaggccaaatataatttaaattttctacatctgcttgttgaaagttttgttttgttttgttttttgaggtccttaaaggtttaggaagcacttcatgctcgttatttattcagttttccaaaactcttcagagacatgaccaagttgcacagccccgttttaaagtagaggaaagggaggttgagagaggtggaatgaccagtttagggtcacacctagggtacttgcaaataccatctgtacttctcatgtgccctatccttgttgcagattctcattaggtggttcactgttaacaaactaaatgctgatgatgcagtttcctggactgcagacgtttgctggcttatttacctataggactatcagtcgttagtaaatttccaggttccttgtatactaattcctttcccaaagaggaagttgatataaggtgtattcatttctctctgcctcaggttccttattcaaaaaatgagtttaaaatttacttggccaggcacagtggctgtaatcccagcactttgggaggccgaggcaggcagattgcatgagctcaggggttccagaccagcctgctcaacagggcgaaaccccatctctactaaaaatacaaaaattagctgggctggtggcgcacgcctgtaatcatagctacttgagaggctgaggcacgagaatcacttgaacccaggaggtggaggttgcattgagccaagattgtgccactgcacttcatcctgggcgacagagcgagactctgtctcaaaaaaataaaaaaataaataaaaaaagctgtgttaacaagatgcctggcacaaggtaagtgcttaataaatgttagccattattattatcaggtggacaaataatccgagtagaaagtagaacaagctaaccctggatatttacaaaaaacagtagagaaaaaattaggcaataattaagcaaatttatcctgtttagagggaatggtatgaactggattgccaaagcaaagatcaatgcatgggcaattccatgtgagctcatttaaatccatttggcccaaagaattcagttgcttccttcctttccaaacacccctgcttctagtcacatcaatacctcttctatattcggacagtaacagatttttcttactgctgcttgtcctttcagttttgttcttatttttccttcacccactttcatatcagcttgccagcttcccctttactcagtgcgtcatgagcttcataaacacagcatagtgctagatatacaggcaaaaccccattgtagtgttggatactgagctgaggtaattccggtcatgttctctgagatcagaatatagagtcctttgaccatagcgtatttgtcaatgccacagggagttgaaaagttgaggatcctacaaagcaatatgataaagcccagtctttggtgattttctggggagcgtttagttgacagtgattctataaattggtctaatctttttggaaagtagcagtatgtggcaaagattttgattttggaatcacacttttcaaaacaatctgataaactttgttgtgtcagtagggtagagtactccatagcaagtaaacatgcttccacaagctgaatcccatcctcccatccaaggaaaatttgaaccattttgatccatggaaatatgctttaaaatgtgacttaactgaaaagttgaaatggtgtgtacacagcaatcatagtgttgtaaaaatacatgaggaggtgaacaggatcaggagggtagttagagtgttgtaagtggttttattttaagagtcatgaattgttttcccctaaactggtgttttagcttattgccattttaaaattcaaaaacaaaaaggccctataatgttgtaggatgcagtgatgaatcttgcttaatcccatctttccccttccccgcccatcctcctgattgcttcccaaaatgaaaatgtggtcatgtcctatcccagctgcaaaacctactttggtatgagattccaaccagttggcccactagagctcgcgcagcacaaccccaggccacctccccacctcccctcgggtgtctcagcccaactatactcatcctttcccagctgctcctgcagtttctatgtagtcctctgcctgtgcacacactatgtcctttgtccacctggtctcctgttcccctgtgaggaaagctgctccaggtcaggctagccagcggtgctgcctctttctttctgctctctctgtgactgcagtgggcaggtagtactggttactttctcagtcgtctccctttctgaattaaacttctgtatctttgtgtgctctgtgcacaccatgcaatcacgatggggttgaggccgcttgtggagctgagtgactgctaacaaatcactaacctttctgagcctgagttccttgatgccagctgcacatggttattgtgaggattaaatgagatgacataagcgaagggcttgacatgcatctccttgcagtggtggtcatacaggacacggtagctgttgtaatgtgtaccagtgcatttttgaggccttgtcttggaccttgtcctcttgatgaagcctcctccctgtctccctccagctgccaacttcctctctaccaccctcactttactcac
